United States Patent Application Publication US 2017/0114356 A1 - sequence listing, part 68

SEQ ID NO: 96157 - DNA, 675 bp, Zea Mays
atggcgctctccgtctcctccctcgccgccgccctctcccacctctccctcccatcgacctccacccccaagcctcacccggccccgctcctgcgcctgcgctccacctaccgccgcgctgttagcctcgcgctccgcgcctccgcagccgaagccgccgaatcgttcgaggcggacctgcccgccgaggaggtgatggctgtcgaggaggaggcggaggaggatgcgctgtcgggaatcgcgctgcgaaagtatgtgaagcagcggctgccgggcgggttcgcggcgcagcggatcaccgccacgggccgtcgcaagacggccatcgcccgcgtcgtgctccaggagggcaccggcaaggtcttcatcaacttccgcgacgctaaggagtatctgcagggaaatccaatgtggatggagtactgcaaggtacccttgatgactctagggtttgagaagaactatgacgtctttgtgaaagtacacgggggtggtctctcaggccaggcccaggcaatttgccttggtgttgcccgtgcgctggtgaaaatcagcaatgccaacagggttcctctgaagtcggaaggtttgctgacaagggacacccgtatcgttgaaaggaagaaggctggtctcaagaaggcacgcaagcggccccagttctcaaagcgttga

SEQ ID NO: 96158 - DNA, 755 bp, Zea Mays
accttcaagactcgaagaacacgaggaacggtttgcttgataagcctctgcttgacatcactgcagtacatcaacccaactgtctcgacataaatctccacatcctcacagtcagtcacttctatactcgacgccggagactgcccggagagcttgtcagcaaagaaggtactgtttccagctagggtgttcttgtggacgctcatcttcaccgcaacgccgtccttgccatacagcaccaccttcaagtcactcgtctcgagctggccgaaccccacagataccttgtgctgcttctgtggcctctcgttcaccgccttcggcggattagtggcattattattagccgcagcgtcctctgccggcggcaagcacctctgctcctctgagttggtcttagccctggtcggagtcgagtgcgtccttctctcggacgagattgtgggtgccctctggattggtggtgccgcctttggtgcgagaggcgaggcaccccctttgggcttcgtcttcgcctgcgggttttggctcttcgccgtcttctggagcacggcttgcgacgggcagcaccagaacccttctggggtcactgcgatggggacgtttctgatcttcgtcgttcgggcatccagacttgcgaccttcgattccgccatgttgccttttttttcccctgaatattatgagcagttctgaagactcccttccgccgccgaccgcagcccagcccggcgacagccgtaataaagacggcc

SEQ ID NO: 96159 - DNA, 1346 bp, Zea Mays
tcaatgatgaaccactggatctcgaagaccataactaaatcacggattccgagatatcgttgttcggtgggcggcggcgcggggatcgtgagcacatgatcacgttgtctgatgggagttagataatgcagccaagtgacattatctgatgagcgaggtagttgcgacgcaggctcaactaacttctcatcacgaccggtcaaaccccacacaaagatgcatatggcatgggcggcggcttctccttcggatcgcagcacagcaagcagaagctgagctgcgcggctataaaaggagacctcggcacttggttcatgtataataacctgcagagtgcgcgcagactgcagcgcacaagtgaagtgacacaagctaagcgtacgcgacaataacttcctcctggttcttgcaagagttgagcagctagcgacggcacagagatggcgaagcggccgtcgagcaaacggagcttcaggctgccgttcatgtgcgggcagtcggacgtggccagcccgaggggcgcggctgtcaagcggccgtcgtcgtcgtcgtcctcgtcactcggcagggggtccaggtccgggtctagctccgcctccagctccagcagcaggcacggcgagctgcagcggatcttccagcacttcgaccgggacaacgacggcaagatctccggcgccgagctgcgcgccttcttcgtgtccatgggcgacgacatgccgccgtcgtacggcgacggtggctacatgctggacttcgccggcttcgtggcgctgatggagagggagggcggccaggaggaggacctgcgcagggcgttcgacgtgttcaacgccgtggagtccgcgggcaggatcacggccaggggcctgcagagggtgctcgcccagctcggggacaagcgttccgtcgccgactgcgaggccatgattcgggcctacgacgtcgacggcgacggtggcctcgacttccacgagttccagaggatgatgagctaactgattccggcttacgttgtgggtttcgccttcagagcgttgagaggtctgcatccagatgaggcaatgcaatttgctgcagggcaaatgcgtcatctacttggatgctgctgcttgcctgaagcaatttgctgcttcatcttgtgttgttcggtgtgtcacaccagtgaatcagttacgttacagtttattcttttttaagagaaaattagttcggtagaagatcatgggaatcctttaatacctttcatgaaatactaccgaaggcttgttcagttgtgtttggattgaagaagattgagaggattaaatctctcttaaatgataaaacgttactttttttaatcg

SEQ ID NO: 96160 - DNA, 2155 bp, Zea Mays
cctctcttctctttttccacgggagggatgacgatgccgctcgcgcgcgacgccgcatcactccctcgccactcgcgcgcccgggctccttcccgccacgctcacgacgatgccgtccccgacgtcctatcttctcctgaatccctccaaaccctcctccttccgccgactctcggccccgcgcctgagccggttccatgtctcctgcgacgcgccacggggcggcgggaggcgcgaggtcatccccgccggtgccagcaaggccaagaaacagatcgtattcttcgacgccgccccgccggtgtcccaggagggtggaggcgccgtgaagaaggcggggagcgagaagcttacccaggtgggcagcggcaacgcagcgctggcgttgttgaggagggcaaccaagatgacactctcggtgctgtccaacctcccgctcgctatctccgagatgttcgccattgccgccctcatggctctaggaacggtgattgaccagggagaggcacccagctactacttcgagaagttccccgaggacaacccggtcttcggcttcatcacgtggaggtggatcctcacccccgggttcgaccacatgttctcctcgccagtcttcctcggcctccttgcgctcctcgcgacgtccctcatggcttgcacctacacgacccagctccccatggtcaaggtcgcaagaagatggtcgttcacacattccggagaaagaatacggaagcaggaatttgcggactcgcttccccaagcatccattcaggatttgggagtcatcttgatgggtgctggatatgaggtattcaccaagggtccatctttgtatgctttcaaagggctagctggtcggtatgcgcctatcggcgtgcacttggcgatgctcttcatcatggctggtgccacgctaagtgcgacaggaagctttaagggctccgtggatgtgcctcaagggctgaactttgttataggagatgtcatgaaacctagaggggtcctctctgttgcgccggatgttttcaatactgaagtccatgtcaaccggttctacatggagtactatgacagtggagaggtctcacaattctacagtgacctctccctattcaaccttgatggtaaagaagtgatgagaaagactatcaaagtgaacgatcccctgagatacggaggggtcaccatctatcagacagactggggattttcagcattgcaagtgaagaaaaatggtgaaggccctttcaatttggcgatggcccccttgaaactgaatggggataagaagctctttggaacattcttgccacttgaagattcagactcgtcgaatccaaatgtcaaaggaatatcaatgcttgctcgagatttgcagtctattgtgttgtatgatcaagatggtaagtttgtaggggtccgtcggccaagctcaaaactgcctattgagatcaatggcaatgaaatactcattgaagatgctattggtagtactggactggatcttaagactgatccaggagttcctattgtttatgctggttttggtgcgcttatgttaacgacctgcattagctatctttcacactctcagatatgggcattgcaagatggaagtacagtggtcgttggaggaaagacaaatcgagccaaacttgaattttctgaagagatgaaccggctacttgataaagtaccagagctgatcagcgccgatgagaatctattagataccaaatcgacagccacatgaaacatttttttgtgtgtttttgtttgggattgctgaagatgcagtagctctgttcaggtgaacacacgttcgaattcacaaaacatggccttcaagaatagaaaaactgttacaatctttcagtagaacttcttagatcacacttcaattgagctctttgtacatctttgaatgaggaaactaaactgatagcttgttatattaccaatttaccaattaccatactttagagcaaaataaatatgtaattttggttctgttactgatttttctagtgaccagcatgagttgcctcctactgatcattttttagacaatgggacaaggttcccgcctctgcgtttccgcacatagcgtccacatattccaaaatcgggttaccggcttgcttgaaag

SEQ ID NO: 96161 - DNA, 1276 bp, Zea Mays
tcaattaacatataatgttcagtaagatcgaattatcactaataaaatatatctttgtaatgctttgttttctttggctacatgctaatgaacgcatggaaaagctagatgttttatgtatcatgctcttgatctgaatgtatggatccaatttaccataccggacctctaatgtgaacacaattgctgtgaacacaatttaccataccggacctctaatgtgctgtccactctctctttcacttggacgcagattgcattttggaagaaggcgaacctgatattccttttcttcctgctccggaagctcatactgcctttctactccttcacgctgttctgcatcatcctcccgatgacgatgttcgtgccggaggccgagctccccgactgggtggtgtgctacgtcccggccctgatgtccctgctgaacatcctgccgtcccccaagtcgttccccttcatcatcccgtacctgctcttcgagaacaccatgtccgtgaccaagttcaacgcgatgatctccgggctgttccagctggggagcgcgtacgagtgggtggtgaccaagaagtcgggccgctcgtcggagggcgacctcatcgcgctggccccgcccaaggagcctgtgaagcacgcgacgaggacgggctccgcgccgaacctcgacgccgtcgccaaggaggagcaacagcagcagcagctggcggcgtcgaggaaggacgccgccgcgaagaagaaggagaagcacaaccggatatacaagaaggagctggcgctgtcgatgctgctcctgaccgcggccgcccggagcctgctgtcgaagcagggcatacacttctacttcctcctgttccagggcgtgtccttcttgctagtaggccttgacctcataggcgagcaggtcgagtgaaatgtgtaaaacaggaaattgataggtgtggggaaaaaaaaacggtgagtcaccatggatggaagtgctgggagaggagggggatgtgttatttctggctggctgccatggcacggcggcatggcatggcatggcagcagctcttgggcgcttcttggctgagattcggaacatgcgttgtgcggttgagccttcccggatctgtcctggctgcacggcatggtatcccacacgtgagagagcaacctcctccgcctgtacggaggtgtagatacagttttctcttgttttttcatgtgtgtgggcctgttcgcctgtacgaatggtgaaggtaaacagagagtcgccgctggattagggaga

SEQ ID NO: 96162 - DNA, 2965 bp, Zea Mays
taaaaactactggctgcgaaagaccacagacatgcggaaggacgagagaaagaaacatcgtaaaatattgggggcttctattcggccggatctctctcttctctctctcccaaccaagacgtgttgagctgtttcccagtccttcgtcgctttccctccgctcaggcctcagcagcatcagctccccaccccaccccacgcctcccctcctcttccttcataagctcactctcaaacggaggtggagcggagctagcttctgcagggtaccactagtaccagtaacctctggggattttcctgtgagaagagggattggcattggactggactggagcttgggggggagccaaaagcaaaaagaagcccaggattagcgtgtggcggattgcgtggctatttcgggaggcgagagaacgagaggcgtggggcctaggccgggggaggcggcggctccttggaccggccattgatggcgccgtggagcggcttctggggcggcaagcccggcggcgacgcctaccggggcacgccggtggtggtcaagatggagaaccccaactggtccatctccgagatctcctcgccggaggacgacgacgaggacatcttggccgccgccgccgccgccggccgccgcaacaaggggggccgcaccaagaacgccaagcagatcaggtgggtgctgctcctcaaggcgcaccgcgccgccgggtgcctcgcctcgctggcctccgccgccgtcgcgctcggcggcgcggccaggcgcagggtggccgcggggaggaccgacgccgaggccggcgtcgtggccgccgccggcgagagccccgtggtgcgctccaggttctacgccttcatcaaggccttcctcgtcgtctccctgctgctcctggccgtcgaggtcgccgcgtacttcaacggctgggacctcgccgcctccgcgctcgcactccccgccatcggcctcgagtcgctgtacgcctcctggctgcgcttccgcgccacctacgttgcgccggggatacagttcctcaccgacgcctgcgtcgtgctcttcctcatccagagcgccgaccgactcatccagtgcctcggctgcttctacattcacatcaagcgcatcaagcccaagcccaggtcgcttgcattgcctgatgcggaggacccggatgccgggtactaccccatggtacttgtgcagataccaatgtgcaacgagaaggaggtgtatcaacaatcaatcgcggccgtgtgcaaccttgactggcccaaatccaacttcttggtccaggtgttggatgactcggacgacccactcacacagactctgatcagagaagaggtggccaaatggcaacagcagggtgcccggattgtgtacaggcaccgtgtgctgagggatggttacaaggctggaaacctcaagtcggccatgagctgcagctatgtgaaggagtacgagtttgttgccatctttgacgcagacttccaacctcatcccgactttctgaagcgcactgtgccacatttcaaggacaatgatgagcttgggctagtgcaagcaagatggtcctttgtcaataaggatgagaacctgctgactcggttgcaatatattaacctttgcttccactttgaggtggaacagcaggtgaatggagtgttcttaaacttctttgggttcaatggcactgctggggtgtggaggatcaaggcattggaggactcaggtggatggttggaacggacaaccgtggaggatatggacattgctgttagggcacatctccatggctggaagtttatattcctgaatgacgttgagtgccagtgcgaattgcccgagtcttatgaggcttacaggaagcagcagcatcggtggcattcgggtccaatgcagctattcaggctttgtttaccggacatcatcaaatgcaagattgcattttggaagaaggcgaacctgatattccttttcttcctgctccggaagctcatactgcctttctactccttcacgctgttctgcatcatcctcccgatgacgatgttcgtgccggaggccgagctccccgactgggtggtgtgctacgtcccggccctgatgtccctgctgaacatcctgccgtcccccaagtcgttccccttcatcatcccgtacctgctcttcgagaacaccatgtccgtgaccaagttcaacgcgatgatctccgggctgttccagctggggagcgcgtacgagtgggtggtgaccaagaagtcgggccgctcgtcggagggcgacctcatcgcgctggccccgcccaaggagcctgtgaagcacgcgacgaggacgggctccgcgccgaacctcgacgccgtcgccaaggaggagcaacagcagcagcagctggcggcgtcgaggaaggacgccgccgcgaagaagaaggagaagcacaaccggatatacaagaaggagctggcgctgtcgatgctgctcctgaccgcggccgcccggagcctgctgtcgaagcagggcatacacttctacttcctcctgttccagggcgtgtccttcttgctagtaggccttgacctcataggcgagcaggtcgagtgaaatgtgtaaaacaggaaattgataggtgtggggaaaaaaaaacggtgagtcaccatggatggaagtgctgggagaggagggggatgtgttatttctggctggctgccatggcacggcggcatggcatggcatggcagcagctcttgggcgcttcttggctgagattcggaacatgcgttgtgcggttgagccttcccggatctgtcctggctgcacggcatggtatcccacacgtgagagagcaacctcctccgcctgtacggaggtgtagatacagttttctcttgttttttcatgtgtgtgggcctgttcgcctgtacgaatggtgaaggtaaacagagagtcgccgctggattagggaga

SEQ ID NO: 96163 - DNA, 2959 bp, Zea Mays
taaaaactactggctgcgaaagaccacagacatgcggaaggacgagagaaagaaacatcgtaaaatattgggggcttctattcggccggatctctctcttctctctctcccaaccaagacgtgttgagctgtttcccagtccttcgtcgctttccctccgctcaggcctcagcagcatcagctccccaccccaccccacgcctcccctcctcttccttcataagctcactctcaaacggaggtggagcggagctagcttctgcagggtaccactagtaccagtaacctctggggattttcctgtgagaagagggattggcattggactggactggagcttgggggggagccaaaagcaaaaagaagcccaggattagcgtgtggcggattgcgtggctatttcgggaggcgagagaacgagaggcgtggggcctaggccgggggaggcggcggctccttggaccggccattgatggcgccgtggagcggcttctggggcggcaagcccggcggcgacgcctaccggggcacgccggtggtggtcaagatggagaaccccaactggtccatctccgagatctcctcgccggaggacgacgacgaggacatcttggccgccgccgccgccgccggccgccgcaacaaggggggccgcaccaagaacgccaagcagatcaggtgggtgctgctcctcaaggcgcaccgcgccgccgggtgcctcgcctcgctggcctccgccgccgtcgcgctcggcggcgcggccaggcgcagggtggccgcggggaggaccgacgccgaggccggcgtcgtggccgccgccggcgagagccccgtggtgcgctccaggttctacgccttcatcaaggccttcctcgtcgtctccctgctgctcctggccgtcgaggtcgccgcgtacttcaacggctgggacctcgccgcctccgcgctcgcactccccgccatcggcctcgagtcgctgtacgcctcctggctgcgcttccgcgccacctacgttgcgccggggatacagttcctcaccgacgcctgcgtcgtgctcttcctcatccagagcgccgaccgactcatccagtgcctcggctgcttctacattcacatcaagcgcatcaagcccaagcccaggtcgcttgcattgcctgatgcggaggacccggatgccgggtactaccccatggtacttgtgcagataccaatgtgcaacgagaaggaggtgtatcaacaatcaatcgcggccgtgtgcaaccttgactggcccaaatccaacttcttggtccaggtgttggatgactcggacgacccactcacacagactctgatcagagaagaggtggccaaatggcaacagcagggtgcccggattgtgtacaggcaccgtgtgctgagggatggttacaaggctggaaacctcaagtcggccatgagctgcagctatgtgaaggagtacgagtttgttgccatctttgacgcagacttccaacctcatcccgactttctgaagcgcactgtgccacatttcaaggacaatgatgagcttgggctagtgcaagcaagatggtcctttgtcaataaggatgagaacctgctgactcggttgcaatatattaacctttgcttccactttgaggtggaacagcaggtgaatggagtgttcttaaacttctttgggttcaatggcactgctggggtgtggaggatcaaggcattggaggactcaggtggatggttggaacggacaaccgtggaggatatggacattgctgttagggcacatctccatggctggaagtttatattcctgaatgacgttgagtgcgaattgcccgagtcttatgaggcttacaggaagcagcagcatcggtggcattcgggtccaatgcagctattcaggctttgtttaccggacatcatcaaatgcaagattgcattttggaagaaggcgaacctgatattccttttcttcctgctccggaagctcatactgcctttctactccttcacgctgttctgcatcatcctcccgatgacgatgttcgtgccggaggccgagctccccgactgggtggtgtgctacgtcccggccctgatgtccctgctgaacatcctgccgtcccccaagtcgttccccttcatcatcccgtacctgctcttcgagaacaccatgtccgtgaccaagttcaacgcgatgatctccgggctgttccagctggggagcgcgtacgagtgggtggtgaccaagaagtcgggccgctcgtcggagggcgacctcatcgcgctggccccgcccaaggagcctgtgaagcacgcgacgaggacgggctccgcgccgaacctcgacgccgtcgccaaggaggagcaacagcagcagcagctggcggcgtcgaggaaggacgccgccgcgaagaagaaggagaagcacaaccggatatacaagaaggagctggcgctgtcgatgctgctcctgaccgcggccgcccggagcctgctgtcgaagcagggcatacacttctacttcctcctgttccagggcgtgtccttcttgctagtaggccttgacctcataggcgagcaggtcgagtgaaatgtgtaaaacaggaaattgataggtgtggggaaaaaaaaacggtgagtcaccatggatggaagtgctgggagaggagggggatgtgttatttctggctggctgccatggcacggcggcatggcatggcatggcagcagctcttgggcgcttcttggctgagattcggaacatgcgttgtgcggttgagccttcccggatctgtcctggctgcacggcatggtatcccacacgtgagagagcaacctcctccgcctgtacggaggtgtagatacagttttctcttgttttttcatgtgtgtgggcctgttcgcctgtacgaatggtgaaggtaaacagagagtcgccgctggattagggaga

SEQ ID NO: 96164 - DNA, 550 bp, Zea Mays
ggcagctccgccatgaagccagccatccatggcgggccctggccctggccctggccccggcacctctgatcaatgcagccgtgggcacggccggtcgagccgcgcagccggtgatccggtgaacagtgccacggatctcggattgattgcgggtagtaatcgattcgatcgagcgcgctgcgtttcgtgtggctcctcgccgctcagctgaatagctgatctgatcagccgcgacgccgcagcagcatgcatccctggtggctcgcgcgcacgtgactcggggccggggtgccctacacggtatcgacacgccattactcggtgtcgggttttctgaccgtgatcggtgatgaggtgcaaaattgcttgttcgtgctgccaacgcaaggatggataagcagattacgggctctgaggatgctgaaagtggtgatgctccatctcaggatgatgctgaatgaatctacggtgaactaaggtgtggttgatccttgtctgtttgttacgagagatgaatcttttggtgcatggtagatcgagttgatcctgt

SEQ ID NO: 96165 - DNA, 2114 bp, Zea Mays
cggctagttgcccagcctgccgagtgccgactgccgaccctccacccgctgacactccccctccgcgatctcaaattcatccatcgccaccaggcatcatctcagcccaagcaccaccgctacctcgccaccgcccgccgccgcgccagcgagctcagctgcctgctcgatcgcccgccagcgtaccccgtcgagggtccagaaaactccatgaagatcccgtcgaggctcccggaccacgaggaggaggaagagtacgacgatgccttgttctacgaggacatccaggcgcccaagttcgttgacctcaccgcgcccgacgcaggccgccccgacgacgaccccgcctggttctgcctacgagtcggttgcgaccagagccatgagcaggtcgaccctgaggccctggacaggagcttctttatgcgggtcatggcggcgagaagccccaacgtgaggctacagaaggctatcagcaagaagaaccagagctcgatgctgaaatgcccgcactctgcgccgccgaagcgtccgagagctcggttcgcgaggctgagcgcagagactgagactgcggggaaggcaccggcggagcccaagccaagggtcgagcggatctgcgccatgcaagcgtccccaattcgcaccaagacagccagggtcgaatgtcccagcgagaggaagaaggcactgaccacgccgcggagcaaggccgtccggccgaggcaggagctgtttcacagtgtgaagcaccagaaggagccgttggccgctgcagccaggaaagggacggtcgttaagtctctgttcatgagcacgacgccaaaaaaggagccggtccagacgccggcggcggacaagagcaagggggcggtatccaaggtctgttcgaagctgaggaagctgaacttggcgtgccgggaggtgccgagcaggtacatgtctcagcctcagccgaagattatgaagacggccaagaaggctgaagagaccacggtggccaagagcgagaagcgggggctggaatccaagaccaatgctaagaagaaaattttaggacgctcagtgaagcgtgctaatgctggacctgacggagagaaccgaaatggttgcagcactgctgcagacgagaactcgcttgcagaaactgctggctcccatcaggaaaggaaggtggtgctgcaggaattgagaatcgaggtggatgcatcgcgatatggcaattcagatgacaacaaggagaatgtgtccagtgctccgagtgaagaagcattggacaattcacattatggaagtgaaaacagactgttggagaacaatgagaatattcctctgaaggagaatgttgctctgaaggtggccaaattgcagaagaaagtgcatcaagagcaggcaggaaagctcaagaaaaccaccaatcctaggccattcaggctaaggactgatgaaagaggagtgcttaaagaagcaaaaccagagaaaaggcagccgttcgctgagaataactccatggcagtactcaaggacgcaaacagagaagtgacgcaaatggacaaacacacccatggcaagggacgagacaagccgccgacctgcggcaagaaacagaagaaacaaagcgcccagattgctgtaacggctcagcagctcggtgagcccaccaggccggccttcaacaacggcatccagcgcaaagctgtggaaccggagagagtttgtagggctgcatcgtcaacacgaacaaccaaaccagcaagaggccttccggcaccaccaccaccttcccggactgggaaggataggaaggctgccgtgaagctgtcgtcgaggttccaaacagcagccgcttgagctcatgcagaactagggcgctccaactgttgtgtttgtcgtctgtctcctccaacgatgagttctgtatttacggcgtcgaattcgttttctggatttcgttgacttgtgtacactgattctttctgcgaatcgtgtggtgaattcctctaccaacaggattctttctgtaatatgttttggaatttgatcctttctgtaacttaaactggggaaaggaggcccagccgcccacccagcccgtgggacacttttatctcagt

SEQ ID NO: 96166 - DNA, 512 bp, Zea Mays
ttcccttttcagggcataaacacaccgcccagatcgttattatcactaaccaagcttaggccctaatcggcgcttttgttcgatccaccacactcgctcacaagagagcccaagctatagagcagctccgagtcgtcagagcctcagaggggagaaagaagaaggcgcaggccatggggagagctccgtgctgcgacaaggctactgtgaagaagggcccgtggtcaccggaggaggacgccacgctcaagtcctacatcgaggagaacggcaccggcggtaactggatagccctgccgcagaagataggtctgaagaggtgcggcaagagctgccgcctccggtggctcaactacctccggccaaacatcaggcacggcgggttctcggaggaggaggacaggataatccttagcctctacatcagcataggcagcaggtaaagttattaattcagtaggtcatcttggccttttcttcgatcaaatccacactgtagaatttgctgcaaa

SEQ ID NO: 96167 - DNA, 887 bp, Zea Mays
aatatcccctagccttctccagatgtgttttctctctctcttcactttttatcagatcagtgttttgaaaaaagtgattgcgcatttgacctgctgcggcaccacattcttcatgagtgctggattgctttctcgggggaatctagagagggagtgtcgcacagctggctccattgcccggggttgtgctcacgccatcagttttggagtccgtaggagggaggaaaagcagggtagccagaatctctgttggcgtcgcctgtttcattgtgttcatgatgatcctttcagtaatatgcctttttaggtagtaaaggaaacatttgtgctctggtttctacaagaggtttgcacataaacaattttttattgcagtctaggctccaacctttggttgataaacactctcaccataagtaacgaaggaataagaataaatgatgggagatacaagaatctgaaaatgaataaatgatgtgataggttgttgtagagcagcatgatctaagtgaatgcataactctactcttatattgtatcattcctctcaatccatgccttttaactggtgaatcattttaggtttctatttgatttaattatggttgttctgacgtgtctttatgctttatacaagcttatacatacctgttttgataagagtcgagcaacgatgcttccatttcgggccacgacctagctaaaggctaatggttccaaatgtctgaagtaccgaagacagggctagctcctcgttttttgtcatgtcaaataaatcgtgtatgattgcaacaatattggcaaaatatcgttgtactttatattttgatatactgtgaacaaaacaagtgccctatgagaccatcgtgatttatgcattttcaaac

SEQ ID NO: 96168 - DNA, 2127 bp, Zea Mays
atgatgaccttcgccacgtcatcacgcccctgcacaaccccgctccatgaccccgcgatgggatcacccattccccccttccgggcgcgatgggatctaggagcggcaagaggtcctcctccatcttcggcaacgagctcctgtaggtcctgcctggacgaaccaccctcggccacggcaccgcggacggcctcaccgagcgtggtgaccctccgccggatctcggtcccttcttccgatgccatgaacctatctaccgcgggggtcacgtcgtggcgccgctcccacgagcgcaccaggacgccggcttggagagacctgctcgggttcatgatgttcttcgacctcaccctggtgcacctcggccagtacttcaccaaggcagtcaggcgggataacaagcagaggtttagtctgttggaggaagatggcgagctgttgatccgggcgaaccagggacacacagtaatatctggaggtgacctcaatcttattggacagaataatgactgcaattgtacagttgaacaattatggctcagccaaagaagagggctattgtggagagtggagatggaggtcttggtttgggaattgctacattcattgcgaacgtcgacgcgcgatgagttgaagggcatgctatatggcgagaattcacacctgcaggaggcttctgctgaccaactcctgaagctcgacgaacttcttgagctatattctgtgaagaaaaacgtcggggaggccataacaacgctgaagatatgtgtggagcttgttaagaaggtggtgccgaggcagatcccactgataaagctgcacatagagaagaaagtctgtagcgagttcaacgattggctcgtccatattagaagaatggccaagcagattgggcaggcctccataagccaggcgtcgttggcttaccaaaagggcgaggagatgtgtgcacggcagagggaagccgaagcgcatagccatgctggaccagatgagcatctgtatgccttggacctggagaacacggaagaggaatcgacgctttattttgatctcacaccggtttatcgggcgcaccacatgcacacatgtcttgggatggaggacaagtttagagactattactacaagaacaggctgatgcaactcaacttggacatgcagatctccacttcgcagcccttcttggagtcccatcaacccttccttgcccagagtcaggtggaaacaacatgggagacatctattggcaagataacgtctatactggaggaacagttctctcgcatgcgtacagccaaccacttccttctcataaaagactatgtcactcttctaggcgcagctgtgaacaagtacggctatcgaatcacacagctgattgaagttctggagaagagtagggacaaataccaccagctgctgcttctggaagaggtgaactggatagcggaggaagcccccgacaacgtgaacgactacatgaacgaggtcctgatctaccttgaaacgttggtgtcgacggcgcaggagatcctgcctctggaagctctgtacaaggtggtttctggtgccatgagccacatctcggactccataatgaccacgctcctgaacgacggcgtgaagaggttcaccgtcaacgcggtgttagggatcgatattgacctgaagacgctggaagcgtttgcggacgacaagttcgatagcacgggctgtcagatctggggaaggaaacgactttcagggactgtttggttgagatcaggcagctcacgaatctcctgctcagcagccagcctgagaacttcatgaacccggtgatcaggcagagaaactacgggtctctggactacaagaagctggccatcatttgtgaaaagtacaaggactctgcagacagtctgttcggaagcctttcgaaccggaacaccccccagcagagcgcccgtaagaaatctatggacgtcttgaagagaaggcttaaggattttagctaaggtcaaatcggttgcattttatatataacaaaggaataaattgctggcactagcgtatagtatctatcttttagatttcaacttcctcgactacttttctaggtaggtccatttgtctttgtaggtg

SEQ ID NO: 96169 - DNA, 169 bp, Zea Mays
tctttttcttcttgttgttttttcaccagtccttgcttgcgacgtttcttggagctggacggattttttgaggtttcgatcagtgccgacggcctctatctgcgcagcagccagtgccggccctggcgggggtcgagcagtgcccccgaccagggcccccatattaacg

SEQ ID NO: 96170 - DNA, 168 bp, Zea Mays
atgggcaagccgattactggacggtgcgtgcgagagtggtgcgacggatattcttaccatcaaatcggggttcaacaaggtcgatgccaagacctccgtgactttgggaagggaatgagagaagggataacagagggagagggtgggggcattgagcggtacctttag

SEQ ID NO: 96171 - DNA, 351 bp, Zea Mays
atgtgtttagtgaatcattgttcacataggaaagagaagaaacgtacatgtaattcatggcagacaaatatttggcagaagcaagtcgagtatcctgcctccaccgtgagtgatgttcgcaccagaaacactcaccgcatcatcatggctcatggtctggagtctggacgatctcacacagtcacaccattctccgagctcccctttaacagtcgttcgctagactttggctttttatggtgctgctcgcctgattgtacagctccattgaagctcccatcgctgccatcatctctcatgctcaatgcagcttcgttttcgaagccatgtgaaaaaggatctgaatggtag

SEQ ID NO: 96172 - DNA, 2236 bp, Zea Mays
aagaagcttctccgttcgcacgcagacgcagcgactcgcaggcagatagatgcggccaggccaggcgcccggcacagctggagcgctttgctgcgcctgcacggctcggctcggctggccctggcctgcctctgctctgcctgcctggcacaccactgccgctcgcctgctccagcgcagcggcagggcacgtgcgcgcgccagccagcccggcgcgatccgtctaatcgccgcgattgggagggacctgctctggctgtggctggaatccgagccggtgggcgatggcgcacaacttgcactgcagtactagtacgagccacgtgggtcccgtcccgcccggccccattagctgtgcccagcctggacggagtacggacggacaccaggagtccaggacatggacactcgcactccgctccgtcctctctcgcgtaacagcgcacgcctctcatccttcgctgcctcgtgggggccacaggcgggtgctctggtctctgtgggcgacgccgagctggctgaccggaccggattagttaacggcagccggggaatggaattaacgcggcgtgtttttataattgaggtggcggataccatacgtgcaggcccgccgtggacggagctgcggctgctggacagcacagcgtcggcctttttctttttctctcggtactagtacaaagtacaaagataaaaatacatttgttttcgagatcagcgatgagtcatcgccatgcagtgcgcgctgttcactgcacgtccactccagcagtgggcagtggcccgctggtggcgttctcccgctgagtcagccgagtccgcgcccgtgcgtctctgtctcgtgacgaatccggccctctgtggctgtcacatgacggatccggccctcggacaccctggattagctccagtatttaaagaaaggttggtttagtggatgagggcaccagctgagctgccacgctatagcgcattggattcttcatgttacaaaatatgtataacatgtgatcaaccccctcccctgacacttttcccccaagggacacaccccttgggagactctgtatccacttgtatataagcaagtaactctgtaataaagacaacagttctgtcatttgtttctctctgtatctcgttaccactgattcactgatatccaacatgttatcagcacgatcgcaagattacagaagaggaatctgaaactcgctagatggatcgcaggggccatgctctcacttctgacttgaggacagtaaccagtgcggttggccattgttgatgcgacacgaggtatatcagtcatccatcatcatgattaatgattaaggctagaaaaattgcctctgcatcatcacgtcgccgagaactgggaaagtccttgtgcgcgctacaggtcgacgtggccagtggggccggcaccgccaaggccgtcgcggctatgcccatgccgacggatgccggaggcagtcacgccgtgggaatccacaccgtgcgcgccacgaagggcctgcgcacccgtgtcacgccgccggaccgcggtttcgcgccatggccgtatctgcgcaagggtaccgcacccgcgtgccgggggctgtaaccgtacgcgcctgggaccgcgcgcccgtgccgccacacctggccgttacagcacaccagggctccgtcgtcgcgtgcggaggatgcggtcgtgcacgcagatcggggcctaggccggtgcccgcgcgcctgcgctgccagggggctgtgccccgtgcagccgagcccggaccgccgtcggggctgcctcaccgcgcccgccgccgaggctgggggccgcgtcgcctccggtgccgaggctgggtgccacgcacccgcctggctgcctgcaccgccggagccgccaggggcgagaccgtgaccgctcctggtcgggccgaccaccggcgagtcggggctagggcccgcgcgcgcctggccgaggccggggaaggaggccgcgcccgccgctcctggccgggccacccgctggcgagccggggctgggggctgcgccagccgcaatgagaccgcgccatggccgggtctggcccgtcgccggggccgaagcgctcggctgctcaggctcgagcaccgcgcgaggccgcgctgtggcctgcctgtgcgcccgcgtggcagcggcttgcgcacccgcgaggcggcggcggtggcggcgccctgctgctggtggaagagagagagggccgcg

SEQ ID NO: 96173 - DNA, 811 bp, Zea Mays
acagaagaagccgaacgttttcggttccgctcagagtcataagccaggtcagactaggttagggtttacctgtgaggcctgctcccctgccgccgccgccatgggacactccaacgtgtggaactcgcaccccaagaactacggccctggatctagggtttgtaccgctgaaacttggggagctccaaagcatggcaataatggaagcatggatggggacctaaaagatagcctgtactcttattcttatgataaaaccatgtaatgaattgtttggctttgtgtggacgaagttggtgtattctagatggtactcttgaatcttgatgcttccctgctatgctagctgagcatgtcgaaccgctatgaatcagacaatacagtatcaatgttaccactcagtcttgttatttgctgctgcgtatggggagtgatcgacagtctccgccgtgcattgattgtttgtttgtagaggttggagtggatttggataatcctaaatccaattggatctgcctgaccaccctatctgatggctgtgttagatggacataaaaaccttagccttgtgttaatactagggatagatcatagattggaccatactgattggatttgtgcttaaaaacaagctgggcattagtcattttgcattgaagtgggattggaatcggagttttatcacttggattggattgcaatgaatttgtctgcatggattttgaccctaatttatattttcatatgtatgttttaatttaatgaaatcaactagatgtggggcttgtgtcatatgaaaccgttttgtcgt

SEQ ID NO: 96174 - DNA, 1613 bp, Zea Mays
acagaagaagccgaacgttttcggttccgctcagagtcataagccaggtcagactaggttagggtttacctgtgaggcctgctcccctgccgccgccgccatgggacactccaacgtgtggaactcgcaccccaagaactacggccctggatctagggtttggtaatcctctattcctctagttccttcgccccacttaatcgccgatatcattttatatacatgtcatctgtttaatccgtcatgttgtggcatgagcttgtagttaagattttagcgctttagcccaagtagatttgcttgcccttacgtttgttggtttttgtacttcgtactcgatgatggcgattgttgatggatgccatggtgtgtgattgcagccgtgtgtgcgctaacccccacggcttgatccgaaagtacgggctcatgtgctgcagacagtgcttccgcagcaacgccaaggacattggcttcatcaaggtactggccaaaagtttccggcctctgcttccttccctgcaacataagcctgcgttaggtagtggttacctgtttcattggttgggtaatctatgacctaccgtttcttctgttctattatgccatggtccatggtatgtttcgccgtgatgtatctgtgttggtccagctggtactagtttaaatagtctgttactggcttcttagaacttgaagcaatgtccatggcgcccatattgttgcacttatatgcccattgccaatactttgttggattttgcatatcctgttctgtagggtaggtcttagtttagttgtttgcattcgaattagtgtctttctggattttgagtgtcatctctatgcggacacatagcagactgctgtgattatggtgaattgtcccatgattcccagattttggcacctcagcaatttggaaccagggtcaagtttcttattgcaagagttcgttaataattaacatctttttactgctccgcttgtgtgtaagctctgaagcatggttgtttccatatccaaccatagtttcttatgatctagagcttccaaatgactcttttatgatgaagatgccatgcattttagtcgtggtaaacagttgtgctgtggcttcttatttgaaaagttgcattctttttatgcagtaccgctgaaacttggggagctccaaagcatggcaataatggaagcatggatggggacctaaaagatagcctgtactcttattcttatgataaaaccatgtaatgaattgtttggctttgtgtggacgaagttggtgtattctagatggtactcttgaatcttgatgcttccctgctatgctagctgagcatgtcgaaccgctatgaatcagacaatacagtatcaatgttaccactcagtcttgttatttgctgctgcgtatggggagtgatcgacagtctccgccgtgcattgattgtttgtttgtagaggttggagtggatttggataatcctaaatccaattggatctgcctgaccaccctatctgatggctgtgttagatggacataaaaaccttagccttgtgttaatactagggatagatcatagattggaccatactgattggatttgtgcttaaaa

SEQ ID NO: 96175 - DNA, 727 bp, Zea Mays
acagaagaagccgaacgttttcggttccgctcagagtcataagccaggtcagactaggttagggtttacctgtgaggcctgctcccctgccgccgccgccatgggacactccaacgtgtggaactcgcaccccaagaactacggccctggatctagggtttgccgtgtgtgcgctaacccccacggcttgatccgaaagtacgggctcatgtgctgcagacagtgcttccgcagcaacgccaaggacattggcttcatcaagtaccgctgaaacttggggagctccaaagcatggcaataatggaagcatggatggggacctaaaagatagcctgtactcttattcttatgataaaaccatgtaatgaattgtttggctttgtgtggacgaagttggtgtattctagatggtactcttgaatcttgatgcttccctgctatgctagctgagcatgtcgaaccgctatgaatcagacaatacagtatcaatgttaccactcagtcttgttatttgctgctgcgtatggggagtgatcgacagtctccgccgtgcattgattgtttgtttgtagaggttggagtggatttggataatcctaaatccaattggatctgcctgaccaccctatctgatggctgtgttagatggacataaaaaccttagccttgtgttaatactagggatagatcatagattggaccatactgattggatttgtgcttaaaa

SEQ ID NO: 96176 - DNA, 226 bp, Zea Mays
ctttagaaatggcccaagggcacatttccctttcatgcgccaggctcaagcaatagtgcaacactagagcgacacataagggacctaatggcaagccactatagtagacccttccccacaaaatattaatttaatatcaaagtggacacatggtccacatatcagatattaaactgataagaacagatactacacttgatcttagccaaaaggccgagaaaggtat

SEQ ID NO: 96177 - DNA, 219 bp, Zea Mays
aataacaatttttttgatttggttggggtgcgccaggctcaagcaatagtgcaacactagagcgacacataagggacccaatggcaagccactgtagtgtacccttccccacaaaaaattaatttaatatcaaagtggacatatggcccacatatcagatattaaactgataagaacagatactacacttgatcttagccaaaaggccgagaaaggtat

SEQ ID NO: 96178 - DNA, 220 bp, Zea Mays
aataacaattttttttgatttggttggggtgcgccaggctcaagcaatagtgcaacactagagcgacacataaggaacccaatggcaagccactgtagtggacccttccccacaaaaaattaatttaatatcgaagtggacacatggcccacatatcagatattaaactgataagaacagatactacacttgatcttagccaaaaggccgagaaaggtat

SEQ ID NO: 96179 - DNA, 218 bp, Zea Mays
aaatttatttttttgatttggttggggtgtgccaagctcaagcaatagtgtaacactagagcgacacataagggacccaatggcaagccactgtagtggacccttccccacaaaatattaatttaatatcgaagtggacacatggtccacatatcagatattaaactgataagaacagatactacacttgatcttagccaaaaggccgagaaaggtat

SEQ ID NO: 96180 - DNA, 219 bp, Zea Mays
aataacaatttttttaatttggttggggtgcgccaggctcaagcaatagtgcaacactagagcgacacataagggacccaatggcaagccactgtagtggacccttccccacaaaatattaatttaatatcaaagtggacatatggcccacatatcagatattaaactgataagaacagatactacacttgatcttagccaaaaggccgagaaaggtat

SEQ ID NO: 96181 - DNA, 269 bp, Zea Mays
taatctaacaaattgataatttagcactttgttaacaatatttttttttgatttggttggggtgcgccaggctcaagcaatagtgcaacactagagcgacacataagggacccaatggcaagccattgtagtggacccttccccacaaaaaaataatttaatatcgaagtggacacatggcccacaaatcagatattaaactgataagaacagatactacacttgatcttagccaaaaggccgagaaaggtatgaattgttaatttgat

SEQ ID NO: 96182 - DNA, 80 bp, Zea Mays
ggacaccttatgctacccactacttggatctcatgctggaggttattgggaagatgaatgagtttagtggctgcattgct

SEQ ID NO: 96183 - DNA, 220 bp, Zea Mays
tagacatgaacttgtaatatgttattggctaggcatgaacttatgagtggtgactgatgcgtgaggtgtgcctatgtgtttggtctgtacttagtgaccagtgcacaacaagtcatctgtcagcaacacaaacaatatgaatttagtatgaattaactatgcttacaagcttattatcctttgatctttattggttgtaagtacaaagtactatgtaatt

SEQ ID NO: 96184 - DNA, 220 bp, Zea Mays
taacaaatttttttttgatttggttggggtgtgccaggctcaagcaatagtgcaaccctagagcgacacataagggacccaatggcaagccactgtagtggacccttccccacaaaaaattaatttaatatcaaagtggacacatggcccacatatcagatattaaactgataagaacagatactacacttgatcttagccaaaaggccgagaaaggtat

SEQ ID NO: 96185 - DNA, 827 bp, Zea Mays
tactgatacttcaccctggttagacacctgcactttttcctatcttattcccctaagaaaatgcactgccaaggaacacacctactctacaactttgagttctatttatataatacataaagggtcctttgctgacagtagtatttgtttctttctggcaggtcccttgacaagaacataccaggtccaccagctagctgctcatacgacatttactgtttcgggaaggttctactagagctaatcactggaaacttcggtgcgagtggctcaaccaacgcagattcagaagagtggttagcaagaacattagattacatcaacgcaaatgacaaggagggtgtctcaggtattgtggatcccacccttgttgtggatgatgaccatctagaggaagtgtgggcagtgtccatcgtcgcgaagacatgcctgaatccaaagccctctaggcgtccactcgctcgatacatcttgaaagcactggagaacccactaagggtggtgcgggagcaggaagagttccaatccagtccatctcacctcagaagtaccccatcccagggctcttggcgttttgccttccatggaaacaagtaccacagctgggaggccatgccaacgtcggggcaagcacttgctcggaaaaatacagcgaagtctcaggggaccgaggggagtgacgaggacgaagagaactcgttctcgttcaagagggcttcacgggacgattttccggatcccatagagtttgaaggaggtgttgttgtgaaggagtacccgcagactagctagcgatacttgatgtgcatctctttgatgtctctagg

SEQ ID NO: 96186 - DNA, 223 bp, Zea Mays
tagtcatgaacttataatatgttattggctaggcatgaacttatgagtggtgactgatgtgtgcggtgtgcctatgtgtttggtctgtactctatagtgaccagtgcacaacaagtcatctgtcagcaacacaaacaatatgaattttgtatgaattaactaagcttacaagcttattatcctttgatctttattggttggaagtacaaagtactatgtaatt

SEQ ID NO: 96187 - DNA, 2373 bp, Zea Mays
atgcttccgcgctgctgccgccgccgctcgggtgcctcctgcctcgccgtgctcctcctcctgctgctgcacgcgggcgcggcgtccgcgcagggcgcgcttgcgcggcaggacgtcgcggcgctccacggcctgcgcgcgtcgcttggcgtgcgcgccagcgactggcccgacagggccgacccctgcaccttctggtcgggcgtcgtctgccgcgccggccgcgtcgcggagctccgcctctccgggctccgccgcacccgcgcgggcgcccggagcgcggccttcgccgtcgaccaactcccgcggctcgcagcgctccaggcgttcaacgcctccgggttcccgctccccggccggatcccgtcctggttcggccgcggcctgccgccgtcgctcgccgtcgttgacctccgctccgcacgcgtcaatggcgagctcccggtcgatctcggcatgtccgggaacctcaccacccttgttctctccggtaacaacctgtccggccctatcccgctgtcgctcctctcaatcgctggtctccgcgttctcgacctctccgccaacaatctcaccggcccgctgccgaacgtgtcgttctctggcagtggtggagctggagtcttgttcaacgcctctggtaatgccttgtacggcgccgtcggcgatgccactggctccctcaggaagaggttctgggttgttgatgtctctgacaattacttcgatcaggtgcttggaactgggtttcagaatggaaccgatggtgtagtggatctcaggatgaactgtttgtctggtgcagcaagccagcgtacccgcggggattgtgaggctttctacacgaggaacggggtgaggcttgcgttggaccccaagccaccatcgccattgccagagccacagccaccacaggtgctgatgccgtcaacgaaaaagagagggggcaaatggaagtttgtattgaccggggtccttggtggtgctgcaattctggtaacacttggccttagcgttctggtattttgcttgttgagaagaaaaggaaggaaaccgagagggagaggagtggagcagactgaagagggcattcggtctgggcggagaagtagtagtgtgaatcccgtcacaatgtcacccatggcatcccccagagccagtggttcaccaaagggcgttcctattatcacagatgaattcacctatgagcagttgcaccatgctgcagggggctttggggatgataacctcgtcaagcatgggcactccggtgacatgtactatggtgtcctggagagtggctttcaagttgtcataaaaaagattgatctgaagaccaggaagaagtgccagggcgaattgagcttccttacaaagcatacccatgggaggatcgttccattgctgggccatttggctaaggatgaagaggaattgcttgtctataagtacatggcaaaaggtgacctcacaaccgcactgcacaagaagtcagtggaagttgaacaggggttgcgctcattggattggataacgaggctcaagattgcaataggtgtggctgaggccttgtgcttccttcatgacgaatgcaatcctccgttggtccacagagatatccaagccagcagtgtgcttcttgaggacaaatttgaagtgtgccttgggagtctgagtgaaatatgcactcaacaaagtgcaggaagccaaagtttcttctctcggattctaagatcatcgaagtcccttgacaagaacataccaggtccaccagctagctgctcatacgacatttactgtttcgggaaggttctactagagctaatcactggaaacttcggtgcgagtggctcaaccaacgcagattcagaagagtggttagcaagaacattagattacatcaacgcaaatgacaaggagggtgtctcaggtattgtggatcccacccttgttgtggatgatgaccatctagaggaagtgtgggcagtgtccatcgtcgcgaagacatgcctgaatccaaagccctctaggcgtccactcgctcgatacatcctgaaagcactggagaacccactaagggtggtgcgggagcaggaagagttccaatccagtccatctcacctcagaagtaccccatcccagggctcttggcgtttcgctttccatggaaacaagtaccacagctgggaggccatgccaacgtcggggcaagcacttgctcggaaaaatacagcgaagtctcaggggaccgaggggagtgacgaggacgaagagaactcgttctcgttcaagagggcttctcgggacgattttccggatcccatagagtttgaaggaggtgttgttgtgaaggagtacccgcagactagctag

SEQ ID NO: 96188 - DNA, 1554 bp, Zea Mays
atactgcatcataccgcaccggcagtggcggagaaaagagatgagccagccggggccgggagccatcgccgcctcatgcctcccgactccgtgacggcccgcagccacaggccaccggataacgcacacagcggaaccatccaaaaacgcgggagctttcccccgtcaaagcccccaccctaatcccccgtctcgcgcgccaatcaaccagcaccgggagcaggagcaagagcaactcaccctcccctccggcttccgcggaactaggagctgccatgcagcccgacgccaacgctccctcgcaccgcctcgcccgcgtcgccgcgcacctaaacccccagcggccgcagatggaggaaggcgcgtccgcactgaggctcgtggtgtgccgcgccaagggcggcgcgccggggttcaaggtcgcgatcctgggcgccgcgggcgggatcggacagccgctgtcactgctcatgaagatgaatcctctcgtgtccgtgctgcacctctacgatgtcgtcaacacgcccggggtcacggccgatgtcagccacatggacaccagcgctgtggtccgcggcttccttggggcacagcagcttgatgccgcacttacaggaatggaccttgtaatcatacccgctggactccctaggaaaccaggaatgacaagagatgatttattcaacaaaaatgctgggattgttcgtacactatgtgaaggcgttgcaagatgctgtcctaatgcaattgtgaatctgatcagcaacccagtgaactcaactgtccccattgctgctgaggttttcaagaaagctggaacttatgatcccaagcggcttcttggagtgacaacactcgatgttgcgagggctaacacctttgtggccgaagtgcttggagttgatccaagagatgtcagtgttcctgttgttggagggcatgctgggataactatattgcccctcctctcccaggttacacctccgagctcattcactcaggatgaaaccagatatttgacagaccgcatacagaatggtggcacagaagttgtggaggcaaaggctggatcaggctccgcgactctgtcaatggcttttgctgcttctaaattcgctgacgcatgcttgcgagctatgcggggcgaagctggaatcgtggaatgctcatatgttgcatccgaggtgacagaactgccgttctttgcaacgaaagtgaggcttggccgtggtggagccgaggagatcctcccgcttggccctttgaatgatttcgagagagctggtctggaagcggcaaagaaggaactgggcgagagcattcagaagggcatcgctttcatgagcaagtgaaagcggagcggtacggagggatcgtccctgagtcagatccggaccatacgtagtaacgtagatgtagggtgttgtgatatagtgctcctacctatacttgtaaggccacggtaaaaagaaggctaattaccctttagcaactgtgaccatctacttggcataatggcatggaataaatctttcgtcttcggtggcggacaag

SEQ ID NO: 96189 - DNA, 1160 bp, Zea Mays
actcgcaaatcgcaacccacagcacgtctcctcctttgctcgtccaccctgccatctccgcaacccctacctacaggcagcagcccagcacgtccctttctacgcctccacctccctcgattcgttccgagcccatcgcctccgcctcttcgtcaccgtcgaggtcgcaccacatggcggcgctcctagcccggcaggcagcgcaggcgctccgcgcgagacagtcggcgcagctcgggccgacaacgtcggcgatgcaggggcacctccgtacctacatgaacgcggggattcccaagcggttcaaagaggaagaggagaaagaacagcttgcaaaagatatcgcaaaagattggaatgctgtgtttgaaaggagcatcaatacattgtttttgactgaaatggtccgtggcttgatgctaactctcaagtacttcttcgagagaaacgttacaattaactatccgtttgagaagggtcctctgagtccccgcttccgtggtgagcacgctctcagacgttacgaatctggggaagagcgttgcattgcttgtaaactatgcgaagctatatgcccagctcaggcaattacaattgaggctgaagaacgtgaagacggcagtcgccgaaccacaaggtatgatattgacatgaccaaatgcatttactgtgggttctgccaagaggcttgcccagtcgatgctattgttgaggggcctaactttgagtttgctactgagacacacgaggaactactgtacgacaaggagaaattgctcgagaatggtgaccgctgggaaactgagattgctgagaacttgagatctgagagcctttatcgctgaatctgtctttcattgtggttgatatactgtgttctcccattttccatattttgctcaactacctgatgaataagtataaacgatatatcataacttagataccaggtaccatgttattttacctcggcaccgtctgtctgttatgttcattaccttgctaaaagtggcaccgagttttctttaatgggaaagttccttctggactggagcactgagctgttttcagtcagacctttattttatatacaatgaaacaggacattgtgctcagggcttcactgatttcgtgaatgttcacattcttgtttctcactc

SEQ ID NO: 96190 - DNA, 2480 bp, Zea Mays
catccatcccatcccaagccagcaccagcagttcctccaccaccagcccagccctcgccccgtccgttcgtccgcccgcgcccgctgctgcttgcctgcttcccacgcacgcgagctctgttccgtgctgcagcaaccgcaaccgcatccgcatccgaatccgcacacgatccccgcgccacttgccccgtcaccccccacgcggcccgcgcctccgcccgctcgtcggccaatgcccggcgcaggccagctcggcgagatgagatgacgccgccgcgcggcggtgcccggcctcccgtcgctcacgcgcgccagcaccagcaccacccggccccatcgggattcttcatcccgtcctccacctagcgcggtagcgccgcatttattccctcccccgcacaacggtcacgtttccatcgcccccccgtcttctctccctcgtcgcatccggcactcctcctcgtctcctatttaaagcgcgccgggctgggagccagcgatcatgctattctctaggaggcctctcgccgccgctttccacctcgcgcccctttcgcctccgctgctcctcttcttcgcatccgcgtcctcgtcctgctcgcccgccgcctccgccgccgccgcgtcggtctccggctccaggggttgcactgctgcaaggatggacagcggtgcggtggagacagcgtccactggggcagtatggtcatcaccttcggcagaaccgagaagcatttctgtcgggaaggaggtattctgcaacaggtcactcaacatgaggaacatcacagcagtgggatttgatatggactacactctggcacagtacaagcctgaaaccttcgagtcccttgcttactatggtacaatagagaagcttgtgaaggatctccgctaccctgaagagctgttgacttgggaatttgattggaaatatatggtcagaggactagttctcgataagaagagaggaaatatcttgaagatggatcgacacaagtatgtaaaagttgcataccatggttttaaggaactatcgaaagaagaaaaagttgctgcttatgggagtacattgataagagattcatttgatgaacctgattatgcccttatagatacacttttctcactgggtgaagcttatctatttgctcagcttgttgatttcatagacaagaatcctggaaaagtacctgcaggcacagactatccacttatgtacagagatgtgaggtctgcggttgacttgtgtcatcgtgatggaactctaaagcggatggttgcgaaggatcctgccaggtacatcaatgaggacttggcaattgtaccaatgcttgaaatgatcaggaaatctggacgctcaacattcttagtgacaaatagtttgtgggactacaccgatgttgtcatgaactacctttgtgggccatacacttcaggtgtaggctctggtctcaatcacaagtggcttcaatattttgatattgtaataacaggcagttcgaagccaagtttcttccatgatgataaccgtgcaggattgtttgaagttgagcctgattctggaaaacttctgaatgctgatattcagatcggaagcccaagatcaagtcatcaacactcaacaccagttcagaaagtttatcaggggggcaatgttggtcatctccacagattactttctgttgcttctagttcacagattctctatgttggtgatcacatatacggagatattctgcggagcaagaaagttctaggctggcggactatgctggtgattccagaactagaacaagagctgaagcttctctcagaatcaaagtctactcgaaaggagcttagacatcttagaatggagcgtgattcgattgaagacaaaatccatcatcttgaatggtctcttaagcttgatgatatctcagaaaaccagaaggagaaattgttctctgaacatgacaatctgctgaaacagagagggcatgttcgtggtcttcatcaagaagctcagaggcaacatcatcagaagtttcataaggtgtggggacagctcatgaagactgggtaccaaaattccagatttgctcatcaggttgagagatttgcttgcttgtacagcagccaggttacaaacttcggtttgtattctcctgacaaatactatcgtccgagcgaagattacatgccccacgagtttgatgtgcttgggctgtaggagcagcccctactgctggtcggagttcctcgttgtaattgatccatagcctaggaggggacatcgtagttgccgtattatataacaggaagcttcacccattgtgaaggagagaaggtttataactatagtagctacatttctacttatcagtaagtttacctgtatataaatatgtacataactgatatatgatgcgtgttatttgtgagcacgcgataagtagtactgactaagtcctgctggtgtagtcattggttttttt

SEQ ID NO: 96191 - DNA, 2192 bp, Zea Mays
catccatcccatcccaagccagcaccagcagttcctccaccaccagcccagccctcgccccgtccgttcgtccgcccgcgcccgctgctgcttgcctgcttcccacgcacgcgagctctgttccgtgctgcagcaaccgcaaccgcatccgcatccgaatccgcacacgatccccgcgccacttgccccgtcaccccccacgcggcccgcgcctccgcccgctcgtcggccaatgcccggcgcaggccagctcggcgagatgagatgacgccgccgcgcggcggtgcccggcctcccgtcgctcacgcgcgccagcaccagcaccacccggccccatcgggattcttcatcccgtcctccacctagcgcggtagcgccgcatttattccctcccccgcacaacggtcacgtttccatcgcccccccgtcttctctccctcgtcgcatccggcactcctcctcgtctcctatttaaagcgcgccgggctgggagccagcgatcatgctattctctaggaggcctctcgccgccgctttccacctcgcgcccctttcgcctccgctgctcctcttcttcgcatccgcgtcctcgtcctgctcgcccgccgcctccgccgccgccgcgtcggtctccggctccaggggttgcactgctgcaaggatggacagcggtgcggtggagacagcgtccactggggcagtatggtcatcaccttcggcagaaccgagaagcatttctgtcgggaaggaggtattctgcaacaggtcactcaacatgaggaacatcacagcagtgggatttgatatggactacactctggcacagtacaagcctgaaaccttcgagtcccttgcttactatggtacaatagagaagcttgtgaaggatctccgctaccctgaagagctgttgacttgggaatttgattggaaatatatggtcagaggactagttctcgataagaagagaggaaatatcttgaagctatccacttatgtacagagatgtgaggtctgcggttgacttgtgtcatcgtgatggaactctaaagcggatggttgcgaaggatcctgccaggtacatcaatgaggacttggcaattgtaccaatgcttgaaatgatcaggaaatctggacgctcaacattcttagtgacaaatagtttgtgggactacaccgatgttgtcatgaactacctttgtgggccatacacttcaggtgtaggctctggtctcaatcacaagtggcttcaatattttgatattgtaataacaggcagttcgaagccaagtttcttccatgatgataaccgtgcaggattgtttgaagttgagcctgattctggaaaacttctgaatgctgatattcagatcggaagcccaagatcaagtcatcaacactcaacaccagttcagaaagtttatcaggggggcaatgttggtcatctccacagattactttctgttgcttctagttcacagattctctatgttggtgatcacatatacggagatattctgcggagcaagaaagttctaggctggcggactatgctggtgattccagaactagaacaagagctgaagcttctctcagaatcaaagtctactcgaaaggagcttagacatcttagaatggagcgtgattcgattgaagacaaaatccatcatcttgaatggtctcttaagcttgatgatatctcagaaaaccagaaggagaaattgttctctgaacatgacaatctgctgaaacagagagggcatgttcgtggtcttcatcaagaagctcagaggcaacatcatcagaagtttcataaggtgtggggacagctcatgaagactgggtaccaaaattccagatttgctcatcaggttgagagatttgcttgcttgtacagcagccaggttacaaacttcggtttgtattctcctgacaaatactatcgtccgagcgaagattacatgccccacgagtttgatgtgcttgggctgtaggagcagcccctactgctggtcggagttcctcgttgtaattgatccatagcctaggaggggacatcgtagttgccgtattatataacaggaagcttcacccattgtgaaggagagaaggtttataactatagtagctacatttctacttatcagtaagtttacctgtatataaatatgtacataactgatatatgatgc

SEQ ID NO: 96192 - DNA, 383 bp, Zea Mays
tgcacgcggttgtagggagggcatattgtggcggctacgaggaaacgatgttcctgtgtggcggtgacaacgacaacgtggagccaaggcaatgtcagcaagctgatttttcagattggaatctatggttctttttaaagattgaatatgttctagcatcttaaaaagatttgtcagaatgtaaacatttgttatgaggtcatttaggccttaaacagaatttcttggacttatttcgttgagggaatgggacatctcgagatctaaatgtgtatataagatccaaatgtgtatagaacatatattttttatgggtatcaaatatgattatgtgcaaaacacggacatagtaatataacaatgaaacacacatttgtacataa

SEQ ID NO: 96193 - DNA, 1302 bp, Zea Mays
atagctagcactagcaagctgctgcgctgcgcattgtgtggccgcgcgcagtctcggtgccggtggagagcgctagctgtggccatgtcgtcgtcgtcgaactcgaagcaggagaaaaaggaagaagaggaggagggtgatgtgccgccgtgcatgaatggcgacgtggggagggacgacgacaacaacggcggaggaggaggcgaagaagaagaagaagaaagagaaggcgagttcgcggcggcgatggcgcagctggcgccggagggcgtgcgggcgctgcacgcgcgggtggaggccgagtggggccccgtgctgcagagcgcgtgccagacggcggcggcgcgggcgctctggggccgcgcggtgcgcgacccggctgccgggctgctggccggggagcgctacctcagggggcttcgcgacaagatgcggcgcgacgagcaagccggcgcgagcgaggtgcacggggtcatgatcgccgtcaggacgctctggttcgacgcccgcgtcgaggccgccgtcgccgcgctcggcggcgacccgcaggtcgtcatcctcggtgcagggatggatgcaagagcctaccggctgagctgcctaaagggatgcacggtatttgaactcgacttcccggagctcctagaactgaaatccgaccttctgcgcgaggcagcggcgagttccgcaagccgccagaaactcaccgtggcggcgaaatcattggctagggttcctgccaacatacgagacggggactggatagcgaagctgcagagctgcgggtacgtccccgggaggaacaccgtgtgggtgctcgaaggcatcatctactacctccaccacgcggacgcgatgcaggtcctcgagagcatcgccgccagccgctcctcggccagcgcggtgctcctggtcgatttcatgaacaagaacgcgacgctgctctctccgacgatgtaccacttctaccatgacagccctgacctcctgctgccttctatggggttctcccgggtgacgctgacgcagattggagaccccgaagcgcattttgggctgctgagtcacccggagaacctgttcgataaactgaggaagctgcccaggtcggtggagaaaaatcccgacgacgggacgccgtgctgcagactgtattttgtggaagcctctgcctcgcccgatgaccagatcatgtgtccgctcaatcgttacttggaaatggaatagctgcattacctctttctttttcatctcgtggtgtgcgcaattcattagcattcaaaccctgatatgattcttgta

SEQ ID NO: 96194 - DNA, 896 bp, Zea Mays
gtgtaaagctggagcaagaatgccacattttgtggcacatgaagctagcaagcttagctaaaatctgctttacaaagggcatcttcgtttgcaggataagtttacccagaacaaggctcgttctgacgaccaagcaacgctctctcactctattgtgtttcagggatggatgcaagagcctaccggctgagctgcctaaagggatgcacggtatttgaactcgacttcccggagctcctagaactgaaatccgaccttctgcgcgaggcagcggcgagttccgcaagccgccagaaactcaccgtggcggcgaaatcattggctagggttcctgccaacatacgagacggggactggatagcgaagctgcagagctgcgggtacgtccccgggaggaacaccgtgtgggtgctcgaaggcatcatctactacctccaccacgcggacgcgatgcaggtcctcgagagcatcgccgccagccgctcctcggccagcgcggtgctcctggtcgatttcatgaacaagaacgcgacgctgctctctccgacgatgtaccacttctaccatgacagccctgacctcctgctgccttctatggggttctcccgggtgacgctgacgcagattggagaccccgaagcgcattttgggctgctgagtcacccggagaacctgttcgataaactgaggaagctgcccaggtcggtggagaaaaatcccgacgacgggacgccgtgctgcagactgtattttgtggaagcctctgcctcgcccgatgaccagatcatgtgtccgctcaatcgttacttggaaatggaatagctgcattacctctttctttttcatctcgtggtgtgcgcaattcattagcattcaaaccctgatatgattcttgt

SEQ ID NO: 96195 - DNA, 1326 bp, Zea Mays
atcattggccagctagctagcaagcatatatagctagcactagcaagctgctgcgctgcgcattgtgtggccgcgcgcagtctcggtgccggtggagagcgctagctgtggccatgtcgtcgtcgtcgaactcgaagcaggagaaaaaggaagaagaggaggagggtgatgtgccgccgtgcatgaatggcgacgtggggagggacgacgacaacaacggcggaggaggaggcgaagaagaagaagaagaaagagaaggcgagttcgcggcggcgatggcgcagctggcgccggagggcgtgcgggcgctgcacgcgcgggtggaggccgagtggggccccgtgctgcagagcgcgtgccagacggcggcggcgcgggcgctctggggccgcgcggtgcgcgacccggctgccgggctgctggccggggagcgctacctcagggggcttcgcgacaagatgcggcgcgacgagcaagccggcgcgagcgaggtgcacggggtcatgatcgccgtcaggacgctctggttcgacgcccgcgtcgaggccgccgtcgccgcgctcggcggcgacccgcaggtcgtcatcctcggtgcaggttagcagcatacgggcacagccctctaccctctgccctgcatgatgccgtgccgcagaccaaaattattgctgatttataatcaggaaaagatattggctatttgcattttttatttttgcatgctgcgcatgcgtagcgccgatcttcgcacgcatggcatgcatgccgtacatgatcgacgcgtcacgcatgtcggcatgtacattcacccgcgcatggtactcgcctacccgaggcattcttttctctttttttttcctttttttttcggggtggggggagtgtcaagtgtgtgagattttgcgcaggcgcgcactgtccctatagatgctttcgagaggcttggccggcagtcgttgacaccgatgacgtcaccgcagccacctcactgttgaggatcacattttacctcacaggctcacactgaacaaatattagccataaacgagagactacacgcctacggctagttagccacaaaaaatatatctgcaagcaggagtccagttcattaatgatagcatattcttcgtttgtaaaataacttggctggtcgtcatccacgcggtccattttagggattgttcgttttaaaactaatctatatggattagattgagatcggttaaattcatatcaattaaaaatttattttaattcctctcaattcattccaattcatatataataagaataaccaaacaagacacaccttatgtgtgggga

SEQ ID NO: 96196 - DNA, 3055 bp, Zea Mays
atgtcccgcaccgtatctgacgcaccgcaccacgaaagcccgcctatccatcagctaagcaaaagcggaagagaaggaaccgaacgagatggactcacgaggagaggactgaagtactctaccaaagacatcgagagggtcgagcacatcggcggcgtgggggtgcgaggcgcgctccggccgctcgtgcaccaccgggtttgcgttgatcatgcccacagtcatcttcctcctcctcctattggatccggcgccggcggtagtgaatggatttgggaggggcggagggcagagctaaggaatgtggggagaggaccgacgacgacgagtcgggtctcaatcattggtgcactttcccgagttgcggcgaccggcgaggacagttcaagtgggcttaaagtccatgttgcggcccatgaatcttttccaaatgagtcaacccgtctagagtttggaggtccatggactttaagctctaaactggtagcgttccacgggatcgacaaccacaaggggcaacgaagctcttccaggccatgcaaaatgccgccatggcccatggcagccgggaccgccgcggcgcggccggcaaccatggcaacaacggccgcggccgccacggccaccgaccactacgcgcggctcctgcagctctgccgtaccgcggtcaacccgtccgcagggcgggccatccacgcgcacgccgtcaaggcgggcctcctcgtcagcacctacctctgcaacaacctcctcgcctactacgccagcgtgggcgtgagtcgtggttgcttccgcgaggcgcggtgcctgttcgacgacataccgtacgcgcggcggaacgcgttcacgtggaactcgctgctgtcgttgtacgccaagtccggccgcctccctgacgcccacgtcgtgttcgccgaaatgcccgaccgggacgccgtgtcctggaccatcatgatcgtcgggctcaaccgctccggccgattctgggacgctgtgaagacattcctggacatggtcagtgaagggtttgcgccgtcgcagttcacactcacgaacgtgctttcatcgtgcgctgcgatggaggcctgcggggttgggagaaaggtccaccccttcgtggtcaagctggggctgagcagctgcgtgcccgtggccaactccgtgctctacatgtatggcaagtgtggggatgctgagacagcaagggctgtgtttgagaggatgcaggtgcggagtgtgtcaagctggaatgtcatggtatcgctgtacacccaccaggggaggatggagcttgctgtgtccatgttcgagaacatggtagaacgaagcattgtctcttggaacaccatcatagcagggtataaccagaatgggcttgatggcatggcattgaagttcttctcacgaatgctgagtgcttcttccatggagccagatgcattcacggtaaccagtgtcctatcagcttgcgctaaccttcgtatgctgaagatgggaaagcagatgcactcttacatcttgagaactggaatgccgtgcagcagtcagattatgaatgctctcatctcaacctatgcaaaatccggaagtgttgagactgcaaggaggatcatggaccaggcagtggtcgctgatttgaatgttatctccttcacggctctcctggaaggctatgtcaagcttggggacacaaagcaggcaagggaaatcttcgacattatgaacaatcgagatgtcattgcctggactgctatgattgttggctatcatcagaatggtcagaatgatgaagccatggagctcttcaggtcaatgatcttgattggcccagaaccaaacagtcatacgcttgctgctgttctcagtgcctgtgcaagcttggcatatcttgattacggaaaacagatccactgcaaggctatcagatccttgcaggagcaatctgtctctgtcagtaatgccattatcacagtgtatgcaaggtcaggcagtgtgccactggccagaagggtgtttgatcagatttgctggcgcaaggaaacgattacatggacatcaatgatcgtggctatggcacagcatggtttgggagaacaagccgttgtcctttttgaagaaatggttcgtgtcggcgtgaaaccagaccatataacatacgtcggcgtgctttcagcctgcgcgcatgctggttttgtagacaaagggaagaggtactacgagcagatgcagaatgagcatggcattgtgccacaaatgagccattacgcgtgcatggttgacctgcatgcccgtgccggcctgctcacagaagctcacgaattcatccaacggatgcctgttgcgccagatacagtagtctggggttcgctccttgcagcttgcagggtgcgtaagaatgcagatttagcagagctcgcagcagggaagttgctgtcaattgaccctcacaacagtggcgcctactccgccctcgccaacgtctactctgcctgtgggaggtggaacgacgcagcgaggatctggaagctgaggaaggacaaaggagtgaagaaggagaccggtttcagctggacccatgtacgaggcaaggttcacgtcttcggagcagacgacgtcctgcatccgcagagggattcgatctaccggaaggccgctgaaatgtgggaggagatcaagaaggcgggatttgtccccgacctgaactccgtcctgcacgacgttgatgacgagctgaaggaagagttgctgagccgccacagcgagaagcttgccatcgcgttcggcctcatcagcactccggaaaagacgaccctgcggatcatgaagaacctgcgggtgtgcaatgactgccacacggcgatcaagttcatctccaaattcgtggatagggagatcatagtgcgagatgcaacgaggtttcaccatttcagagatgggtactgctcgtgtaaagattattggtaggaaacctggtctgggatccttttattcttcttttgaaaagagatttattaactgaaggacgactgaagatcagcggcaataagtttcacca

SEQ ID NO: 96197 - DNA, 126 bp, Zea Mays
tttttttgtgaaattagacctctatttaagcaaggtgttgtttggttcaagaaatgtaacgcaaatggtaatggtaatggtttacgctcgattactgacggtaacaaatttaaataagctggtatc

SEQ ID NO: 96198 - DNA, 730 bp, Zea Mays
tgatccaaaaaagattatacatactttcaacaaatttgaaggtgcagcatcaacctcacaccacacaacaatagtcggtcacttaagttccttcaacacagttaattccagaccacatcgtccaatcttattttacccagactcatatttacaccgtaggggtcaaaaatgattggcatttgcaaacaagaaagcaccagatactcaagtgtgactgtataaagggaagaacaaaaaaaccactctcgtctgcgactatagcatggacaggaaaggtggacagttagaatcctacaagaccaaggtagacacacatctacattccatgggggccattgttgatcagggcagccgccgcctgaagttcctactggtgctttggtatgtacgaaccagcaggccgacgcctaatccgatacccacacacacgcccagaccgattccaactccaacacggacaccagcattaaaccatgaaagctcaccgtcctcgccttctagaaagtcctgccttgagtacaaactgttatagtcaacatcaacatccgtctcagatttggaatcctggaactctgatacctgaaacaagtaacaggatatataggatcaagtggtttaaagaacacgtctcatgaattggcctccaactaagtgtaaactaatgcggtgaatcgcgtgtccatgaataaagtgaacctttttgcaatgtcatacaggagagccaataatc

SEQ ID NO: 96199 - DNA, 2363 bp, Zea Mays
aaggaggccgtggctagttgacggaaaaaaacaaaggtccgagaagattcttgaaacagttgtccagtcatccatccttcgtgtcagtcacctcacgcagcaccacaggtccacagctggtcagctgccatgcatcctgcagccagcctcacaaccgacgagctgcagatgaggcgaacgccaaccacccgccaagatcaacagcattgcacaacacaaggcaacagaaacagaacacacagagagacatgagagcaaagcaggggaatggaatggacaatggagatcctctccctccctgccttgctatttttcgccgctcgtgagatggcggcgggtgaaatgccctgaccagcgtgcgtgcacatgcccggggaacggacccgccggggctgaccgctgctagggcccggcgtcgtgtccggtagcggttggggcggaacggcgacgccgtcggagtcgcagtcgcggtcccggcttcctcctcatctccattgccttcggacgggccaaggcgccagtagcggaagcgtggacgtgagcgagcgcatccgcgcggccattgagagcttgtgcaagacttaaccgtttcgtggtgcgtcatgtcgtctaattcttcgaccggcccgcgcccacggccgtctccgtcgccgccgccgccaaaaagcagcccttctccttcgcactcaactgcgccgccgccgtcagcggactcgtcgtctccgggcccatcactgcccagcgactcctcgccgccaccggcggcgtccaggtcgcatggcgctcaggcctcctcaccagccaagccccactctccacgggagcaaccgtctagaggttccgcggacgacggtggcaggccgccaccggctcccgcgcaccgtggcgggcccaccatggtggaaatcgttttcgccgcggccggcgccgcggcgctcctcgtcatcctcatcgccgcctgcgtgtgctgctcgaggaagacggcgccgaggaggaggaagagacctcacaatcccatgcattactacgcggacttcccgtcgtcggcgtgcaaagccacaggtaatagcagcacgtactacccgaacgggccgcagccgcagtggcagaacgacaccgtcgcggcggcgacgcggagcaccttcggcccgccgggaggtggctggcatgcgccgccgcccgacatgacctccggcccgcacggcgcacggccgccgccgccgacgacaccgcacgaggcgctgctggggctcggcaagggcaccttcagctacgaggagctggcggcggccacaggcgacttctcggcggcgaacctgctggggcagggcgggttcgggtacgtgcacaagggggtgctccccggcggcatggtggtggccgtgaagcagctcaagtccgacagcgggcagggggagcgcgagttccaggccgaggtggacatcatcagccgcgtgcaccaccgccacctcgtgtccctcgttggccactgcatcgccggcgcgcgccgcgtgctcgtctaccagttcgtgcccaacaagaccctcgagttccacctccacggaaaagggcagccggtgatggagtggtcgacgaggctgcgcattgcgctcggatcagccaagggcctcgcctacctgcatgaagactgccatccccggatcattcaccgcgacatcaagtcggccaacattcttctcgacaacaacttccaagccaaggtcgccgacttcgggctggccaagctgacgtcggacagcaacacgcacgtgtcgacccgtgtgatggggacgttcgggtacctggcgccggagtacgcgtcgagcgggaagctgacggacaagtcggacgtcttctcctacggcgtggtgctgctggagctcctgacggggcggcgccccatcgacgccggcgacgcgcgctcgttcctcgacgtcgacgacagcctcgtggactgggcgaggccggcgctgtcgcgcgcgctggccgacggcgactacgacggcgtcgcggacccgaggctgcggggcaactacgacaccatggagatggcgcgcatggccgccagcgccgcggcagccgtgcgccactcggccaagaagcgccccaagatgagtcagatcgtgagggcactcgagggggacatctcgctggaggacctcaacgacaacgagggggtgcgacctgggcagagcatggcgttaggcacggcggccgcggcctcgtacaaggccaaagctcccggaccgtacacgcacggcgtggaacggatcaggcaggcgcccacggtgtacagcggcgcggtgggccgtccctctacgatcggcaacgacggcgatgagtcccgtgaaccgcaccagtag

SEQ ID NO: 96200 - DNA, 2465 bp, Zea Mays
aaggaggccgtggctagttgacggaaaaaaacaaaggtccgagaagattcttgaaacagttgtccagtcatccatccttcgtgtcagtcacctcacgcagcaccacaggtccacagctggtcagctgccatgcatcctgcagccagcctcacaaccgacgagctgcagatgaggcgaacgccaaccacccgccaagatcaacagcattgcacaacacaaggcaacagaaacagaacacacagagagacatgagagcaaagcaggggaatggaatggacaatggagatcctctccctccctgccttgctatttttcgccgctcgtgagatggcggcgggtgaaatgccctgaccagcgtgcgtgcacatgcccggggaacggacccgccggggctgaccgctgctagggcccggcgtcgtgtccggtagcggttggggcggaacggcgacgccgtcggagtcgcagtcgcggtcccggcttcctcctcatctccattgccttcggacgggccaaggcgccagtagcggaagcgtggacgtgagcgagcgcatccgcgcggccattgagagcttgtgcaagacttaaccgtttcgtggtgcgtcatgtcgtctaattcttcgaccggcccgcgcccacggccgtctccgtcgccgccgccgccaaaaagcagcccttctccttcgcactcaactgcgccgccgccgtcagcggactcgtcgtctccgggcccatcactgcccagcgactcctcgccgccaccggcggcgtccaggtcgcatggcgctcaggcctcctcaccagccaagccccactctccacgggagcaaccgtctagaggttccgcggacgacggtggcaggccgccaccggctcccgcgcaccgtggcgggcccaccatggtggaaatcgttttcgccgcggccggcgccgcggcgctcctcgtcatcctcatcgccgcctgcgtgtgctgctcgaggaagacggcgccgaggaggaggaagagacctcacaatcccatgcattactacgcggacttcccgtcgtcggcgtgcaaagccacaggtaatagcagcacgtactacccgaacgggccgcagccgcagtggcagaacgacaccgtcgcggcggcgacgcggagcaccttcggcccgccgggaggtggctggcatgcgccgccgcccgacatgacctccggcccgcacggcgcacggccgccgccgccgacgacaccgcacgaggcgctgctggggctcggcaagggcaccttcagctacgaggagctggcggcggccacaggcgacttctcggcggcgaacctgctggggcagggcgggttcgggtacgtgcacaagggggtgctccccggcggcatggtggtggccgtgaagcagctcaagtccgacagcgggcagggggagcgcgagttccaggccgaggtggacatcatcagccgcgtgcaccaccgccacctcgtgtccctcgttggccactgcatcgccggcgcgcgccgcgtgctcgtctaccagttcgtgcccaacaagaccctcgagttccacctccacggaaaagggcagccggtgatggagtggtcgacgaggctgcgcattgcgctcggatcagccaagggcctcgcctacctgcatgaagactgtgagtgagcatccgtaacagcttgaaattgtctgtcatcagaaacttggtttgtgacgcgaccatgtcacgtcggaatcttacatccgccgtgttatgtcaccatgcatgaaggccatccccggatcattcaccgcgacatcaagtcggccaacattcttctcgacaacaacttccaagccaaggtcgccgacttcgggctggccaagctgacgtcggacagcaacacgcacgtgtcgacccgtgtgatggggacgttcgggtacctggcgccggagtacgcgtcgagcgggaagctgacggacaagtcggacgtcttctcctacggcgtggtgctgctggagctcctgacggggcggcgccccatcgacgccggcgacgcgcgctcgttcctcgacgtcgacgacagcctcgtggactgggcgaggccggcgctgtcgcgcgcgctggccgacggcgactacgacggcgtcgcggacccgaggctgcggggcaactacgacaccatggagatggcgcgcatggccgccagcgccgcggcagccgtgcgccactcggccaagaagcgccccaagatgagtcagatcgtgagggcactcgagggggacatctcgctggaggacctcaacgacaacgagggggtgcgacctgggcagagcatggcgttaggcacggcggccgcggcctcgtacaaggccaaagctcccggaccgtacacgcacggcgtggaacggatcaggcaggcgcccacggtgtacagcggcgcggtgggccgtccctctacgatcggcaacgacggcgatgagtcccgtgaa

SEQ ID NO: 96201 - DNA, 1230 bp, Zea Mays
atggcggccatggaggaggactggatctttattggtgacggcgccggtggtagcagcgatacagacagcgcctccgacgacgacgacagtggattcatgatcgtgaggcggggccgcaaaggcggtgatcacagattcgacgcggcggcgcacccgcgggtggcggccgtggccgtggccatgcctcaacccacgccaccgggtccggggctctccttcagggtggtatcgtcggacggcggcggccgccgcgagcatcccggatgcaacgacgagccgtcggaatcctttcacgacgacattgataacgacaggtctgacacggaagatgacttctctgggtctgacgaggaagcagagaacggcaaccgagacatcttccacatgctttttccaagagctacgggtacggcatgcgacgccaatatcgacaactatgaggacgagagcgagcacggctatatcgacgacgacgaggaggatgaagatgggtcctcgtttgacattgatagttccgacggcgaagaagaggctgctaccgctactgcggcatgtgactggtacaacgccgaggacgacgatggcatcgctgatgtagcagagaacggcaaccaagacatctttgacatgctgttgcccagggagcgtaccatcgacgacgctgctatgacgactgcgaacatctttcgcatgttgtttcccagagctaaggcatgcgtcgccaacatcatcgacggcgactctgaggacgggagcgagcaccgctacatcgactatgaggcggagtttggcatgctgttgcccagggaatgtgccatcatcgacgactatgaagacgagagcgagcacgtctacattgactatgaggcggagtttggcatgctgttgccccgggaacgtgcgctgttcacatcggcggcccagagtggtccggcggaagccctgttcacattcacagtgcggagcagggagcgtgcgctggtggcgatcgaggaggtgcggcggcggcgggaggccgcgcaacaggagctggaccgcgcgctggcgagacaggcggcggcggctgccgaggcgttggagtcggctctgcgtggcggtaccaccactgccaagcggcaggccactggagtcacgcagcccgccgtggccgaccttgatgccccggctgacttcaacttcatcatcggcgtttgtatgttcgtgtaccttgttgtttctctttttctctag

SEQ ID NO: 96202 - DNA, 285 bp, Zea Mays
atggccatcgcctcccgcgtctcccgcctcgaggccgacactgcgcgcctccgccgtgacctcgccgaccgtgaccgcgccgaggccgacctccgcgcctgcctcgccgactccgacatgcgcctggccgccgctctcgacgagaacgcgaaggaaagggactcgctcgcggcgacggtcaaaaagctgaccaggaatttggcgaagggcatatttgtccccaacatggatcgttttaatgaagagagcgagcatggccttactgtcgctaagagatcaatctga

SEQ ID NO: 96203 - DNA, 2118 bp, Zea Mays
ggcccgatcgcggtactcgggtcgggccgtcctccgagagtcccagtctcccacggtcccacactcccacccccggagcgctccactgactccgccgtgcctttctcttctctccttccctcggcctccgcctccgcctccggccccgcctcgtctctcctcccccattttaaatttcaaacccctcccacctgcttcatcctcttcccctaaaacctcctcctcagtcctctctcctgctgccacgaggtacggcccagctcttcctcaaagcgggcgaaatccacgccgcgcggcggcggcggcagaggaggaggggggatgatggggtgcctcttcgcctgcttccgcgcgtccggcggcgatggcgaggtgaagggcaccggcggccagctcgcgcatccgtcccagccccccgcgacgacgacgacgaccagccaccaggtccaggatggcgcgggcaggagggccaggccgccgtcgaggaacgcgctctccgccgtgttccagcgagaagatgagggatcaaggacggcgcaagtggcgagctcgtgggcggacgagagtggcgagaggaaggagatggatcaggagcttgtgcatcaggccattatccaaagaagctgtggtgcgttgctgcaaactacaaataacattcaaggagcgctcatcaaatatgctgattcagttcatcagaaggaaacacattcaggatgtcttcctgttgtgtctgatgatctacatttcatggaagcgccgaaggttgagaaatgtgaaactccttcaaggtctcatcagagtttcactgttccagatgcaacgagttcttcaaaaacaaacgatgagttgcagacttccgctacttcccttgcaaataatgtgaaagattcgatgaatgagaacaacatggaggcacttgtgcaggatgaagagcaacaccaagctctggatcttgaagaatgtggggtctcaaaagaagaatcctttcaccctgaaaaaacagaggaaccaaagtgcgcaaagaatcaccatgtggtctccatggaaatttcaatatctgatgaatgctcccttttccagagctctgagggttctgtaccatcttcttacaagataagagagagcatgaacacaacatctgtggagaagtccccgaaaactgaggcaactatccatgccaccagaaagaagttaccgaagagcgataattcagaactggagctcccaagcttagcccaatggttgaagcccccaaatcctaagaagacattcagagatgaggccatggcaggagacaggtctcattcgggtaagagttcagatgaggataggcctattattggaatggttgcagcacattggaaagataaggtgccactgccagcaaattttacctctaaattgcgggatggaaatggcattcccaattcaacaaataagtacaaagaagaccaaaaggtgagttggcatgcaacgccatttgaggagaggctcgagaaggctttatccgaagagaagttgctgtctgaaaggagctgttcgagtggaaagacgtctcagtttttaggagtggaaggcgaggagagtgacatggccgaatctaaccgtctgtacaccactgcttatgcatgccaattcagttctgctagccatgagccacagaagctttcagtataatggttctctggccatcaccttcctgattgatggcatttgcacagccctgtttcccctctgtccttttagtaggtagtatctggatgtgatgtttcagcttgtgcttaactcaatcagttaagatataatattactgctgccactagtccacagatattgttgttagcttctattgttctgttttgcttgcgctgctacctacctacctgactgataggcatgcttcattctgcaattctacttgtcctgcgcagcacattaatcccttaccctggtatctgttattttattggattcctgactgacaggcacgtttccagtttacctcgacaagtcgcaaacaaactaaaacaacctacgcctggcggaaaatactatgacttgggagtcgcccttgaaaataataccctttcgcccttgtcttgggatcgattcccgtag

SEQ ID NO: 96204 - DNA, 1152 bp, Zea Mays
atttcaggttcgtgccccgtttccactctccactccactcgcgcgtccgttccgcctccactgaacatctccttttaacacccggctccggcgactcgccccttcctccactggtgcatccaccattccacctaccccacccccacaacccgctcgcgcggctgtccaatggcgggaggcggggcgccgtcagcgtggggcccgagcccggcgctggtgaccgcactggtggcgctgcttgggctcggcctcgccgcctacatcgtcggcccgcagctctactggcacgccgcggaggtgctcacggcggcggccgcgtgccccgcctgcgactgcaactgcgacgcgcgcccgctcctcgaccttccggaagattgtgctaaacacttcaaaggggtcaagagtcgcgcatctggtgaagagacagaaaagagtttcacagagctgcttgtagaagaactaaaacagagagaagaggaggcaacacaagctcagcaagaggccgatgttaagttgctcgaggccaaaaagttagcttcacagtatcagaaggaagctgacaaatgcagctcaggcatggatacctgtgaagaaactagggagaactcagcggaagcattggtccaacaaaagaaactgacttctttgtgggagcgaagggctcgggaactaggatggagacccgagaatgccaaggcacgtctaaagtagtaaaaccagtggatggtgttggatactatgtgtagcaatagatctcattgtaaaaccagtggatggtgttggatactacgagctcgagatgatgaggaaacaaatgagttcctggttggactcgactctctttacacgccatggggccttattgttcatagtaaatttatgttcagtttgtagtgtactttcattgttctttgtgaacactgttgtgtgttgtacttgggatggtcataggattacattgttcattatttcctggatgttctaaaaaggagaaaagtaattgtctgggggtggtggcaataaagaagagattgcctgcagttcttaagttctttcatcttactggcattagcccttctgtagataattgccatttctgttcacatggttttaccgtcaccctattgataatgtggttggggtctagttgtg

SEQ ID NO: 96205 - DNA, 4174 bp, Zea Mays
aaatcccgctcgaaccctagtaactacctaccccgcatggtcgatcgtgccgccgcgcgggcacaggcggtgagctccgacccgccgccgcctgcactgctggagcccgacccgcggctcagccagcccggggccgctgatgggcaagaggtcgcttcggcgggtgcgaccgcgggtccgccttccctgccccaggccagcgacgctgaggaagacgctcttgcctcgccagcggggcagccgggcgagcggtgcagagcgatgatggaggtggtggccaaagacggggcgtggaaggtgaccaagctggtggtggagcactgccacgagctgcaggtcgcccccggacatgtcgcggtgaccgtgccagcgttggggatggaattcgactccgtagacgacgccaaggggttctactatggctacggcgagcaggtgggcttcaaggcgcgcatgggctccaaccgccgctcagtgggcgacggcgagaagatcctgcagcggttcctctgctggaaaggcaattacgcgaataggagtagatgtaaggattcggatgcagggaaggaaaccgatgaggtgctggagggtttgtctgctgctgcggggaagaggaagagggaaccttataagacaaggagccgcaatcctggtaggagtacagaggtgattgaagtggagaaaggtgttgggttgggtggtgctgggaatgggctagagctggataatgggaggcgttccaggaggggtaggagtaaaaaggctgaggtagagcatggtgaggattctgttgttgggttcgaggcggaggaggtggctaaagctgtttctgatgctgacgaggaagaggatgaaggggacgaggatcaggaagcagcggaacaggaggtcgaggtggaagtgaaggaacagagagcgagagggaggccgaggaaggctgttatggaagacaatgcccttcaggcacgcgtcttgagggagcttggtgtgagggcattgcagtacaataacgaggagagaaagaagatactcaataagtaccgctctaaacggcagagcagatcagtgtcgagcaggcctaccaagatatcttcaagacaagctttggctgaaaggcgtaagcgtggcaatggaggtagatttctgtcaagtgaagaacagccgctgccttcagaaaggcgttccaaacgtcttaagaagcaaaatctcaaaatgcagaaggctgagagcaaagaagacgaaacaatggaagcagaaccagatccagaaattgatgtagtccctggacctgggggagaaccaaaggttgggatggtttttctgaatgaggataaggcatatgaattctatgccaactatgctgaaactgcagggttcagtgtccgaaaaggctggttggacaaaacagcaaagaatgttacaaaatctcgagcatatgtttgttccaaggagggatttcgtccaagaagtgcttctatcgaatcaaagaaaccaagcctagaagcaagaactggttgccaggcacacatgactattaagattacagcaagcacaaaatatgtagtgactgagtttgtggccgatcataatcatgatcttgaaactcccttggttgacattcagattttgaagtcagaaaagttattagcaaaggtacaacagcctcctgatccaccaaaagttgttctgataccaaatgagtataaaaattacacaaggacaaaacgtacaaaaaatatgcaattaggtgatacccaggccatctgtgaatatttgcaaaggatgaaaggcgagaatccttctttcttttatgccattcaagtagatgaagatgatatgtttacaaatgtgttttgggctgatgctaaatcaataatggattataactactttggtgatgtagtgtgtgttgacacaagatattgcacaagtgactatgggagacctctactattatttactggtgttaaccatcacaatcagctgataatatttggttcagcgttgatttatgatgactcagcacaatcctttagatggttgtttgagaccttcaaatctgctatgagtggaaaacaaccaaaaacagttttgactgaccagtctgctgcacttagcgatgcagtttcttcttggcctggaaccatccaccgcttctcactactgcatttgtatctgaatgctactaagataagcagggataccttacaaggcttggagacttttgcatcagattttagtaggtggctgtatgaatatgaggaggacaacttctattcaagctgggaaatcctttcagagaaatacaatataaaggataatgagtggttctgtaaattgtatgaggatagagaaagatgggctttgccttatgggcgtgacacattctgtgctgatattgcaaccacactaagaagggataacacaaatacaatcctcacagatctaattaaaccagaaatagatcttcagaacttcttcaacaattatgataagtttttggaggagaaacgcctagctgagcaacaagctgactaccttggggctcaaataacgcaaagggtagcaccactgcatctgctttggcaagctgccaatttatatactccaacactttttgagatgttcagaatggaatatgaacagatctcaaagtgtgtggtctatagttgtggtgagattggaccaatatctgagtaccaggtcactgtcaaagacaggcctcagggtcaatttgttagatttgattcaacagaatgtatggttgtttgtagttgtaagaagtttgaattcatgggtcttctttgttgccatgtattgaaaattcttgatctcagaaatattaaagaacttccacgacactatatcctgaaaagatggagaaaagacgctcagagtgaatctccagagaactatggttttgctgccatagatgaagatcctaagttttcattgtcaaaacggtacaacgcattataccggaatttgtataaaattgcagcaaaagcttcagaaagcgttgaagcttatgcattcctggagaaccaatatgaacagcttgttgaacaagtggaagtacttttgcaagcaaagttgcatgataaatcttccttaagtaccgtcctgaaaggcaatcagccaaatatgcttaatagtgaggtcaacagcagtgaacatcgcagagcaactggtaagaaaattaaaaatgtagaggtgcgccgtcagcaacaaagtcttgatccaaacaaaaagaagaagggtagacaagttctgctggaacctgagattgaaattccactcagggttgaacctcccacggtatcaaatgatatccaaaatcatttaagaacaacaaatcagtttcttgcaccaagccatatgatgcaggcaccttatgttgcacagcagtttggtcttggttctttacaaggattcccaggcatgtcaccatttgggcagattcaagaaccaacacctcttcagcagccccatttacaaccaccatcgtttcatagtggtcctcaaattacacaggctccacctccagacattcaatcactacagtttcttagcagcaatcctcagcttggccaccagaccacggatcaaggccagtacaccattccagtctgggatttcctgtgacatacagtatcctcctgtttggttgctagcagcttggtgcctgactcgcccagcatcagttgaaactaacgattcttacttcctcacgcatctccacgcatgcaagtcaacgagggtaaaaaagcctagcttgcacctgcgcgcacatgcgtccactatatttttacttccccaagcacgtgcctgggcgcggtcaacgcatgcacggggccaggcgcgggagcagagccaaccaatcatgcagtatgtgatgtatggcgaagtagcaatgtagttgtaaattatgtaatgacactgcccctccccgaagggttaatgtcaatgaaatcctttagcatggtgcattggattagattttggaactgaatgcaattctaatgcacacgttaaagccaaccgggaatggggactgtttgttccaggcaaggtggcatggttgggcacagttatcatacaatacaatatgggcctgtttgtttccttttattttgaggaattagaatcttactattggaatagactatttttt

SEQ ID NO: 96206 - DNA, 643 bp, Zea Mays
tattaactattatttcgcatacattcggaaatctaatgaaacagatccaattcaggtttaggtacaacattttcttactcttaattcattttggatcacacccgaactaacccattctatggcaccagctacaatatcgaacactccgtaagataccctcaaatggctatcaaggagatggaagacctcgctacgaccattcggcaactggtgccgaatcctactgacgaacgagttcagtgccaccatgtgccagagctccttgcttagatcctttacttggctgattggatccataaggtctctattcagtgcaccaccattcttgccaagtacaaccccaaccctccagacacaggcgtcacaatcgaagacgaatgagttgtcgctgatatggaactaacgccaacaccgtcacctaaatccgttgaagaactgtacgaagagcggagcatgaactacgacagcgatcaggctagaggcatcagctagctaggtttttagttaaatgtagtcggttcatggtagtattttgtcagtcatggatgtagtgaagtaccctttcgagttatttgtaggggatccatgcgaactatgtgtctgttcttggcttttggaataaaaattgtgcctctgtcgttgc

SEQ ID NO: 96207 - DNA, 509 bp, Zea Mays
tacatagagcatatccactctaccgtggcgaaatggaccaactcctaggttctcgatccgacggccacgtcctttacacggagttgcttcgccttgacgcaccctccgcgatcacgtcgcgtgccgccaccggttccctccggaaccaccaccgccgagttttgaggcccaaactcagcaaaacccgccatccatagcgctaggtggttttgaggcccaaaccaccaaaccagccatgagcaccgcacctcgtgcacgtcctccacgatcagacgtgtgtcccgccagtcctcgaccacaccagtatcacggtccactccaccacgtcctcgcacaagtgtatgtcccaggtgtcagccaccgcggttggtcacctggctactctgatccgccagtcaagacccagcactcgcccttcaccgctcttggttcatcagtacgagcctgcatgaccttcatctcagccgtcgaccaccgttcatgtgctccacacctacacaccacaagtc

SEQ ID NO: 96208 - DNA, 1476 bp, Zea Mays
gaccccacaaaacgtgagcgccctcgccgacgcgcgccacgccggatgccccggcgccaatccgcggcacccacctcacttcccccttatcccccgcctcggcctcacccactcgtgcgccgcggccttatcccaaagttgcattgcatccatcgtgcctgatctccctcccaataagcacgtctgtttctccccagctccaagccggacgacgcagcgtagcagcagagagccagagaccagagatggccgccctcgccgccgcctccacggccgccttcgccgcgaagccgcgcgcgcgcctctccgtggcctgctccgccgccaccggcgacagcagcagcgtgtcgctcgcgtcctccgtgaagacgttctccgccgcgctggcgctgtcgtcggtgctgctgtcctcggccgccacctcccctccgcccgcggccgccgacatcgcggggctgaccccgtgcaaggagtccaaggcgttcgcgaagcgcgagaagaactcgatcaagaagctcaccgcgtcgctgaagaagtacgcgcccgacagcgcccccgcgctcgccatcaacgccaccatcgagaagaccaagcgccggttcgagaactacggcaagttcgggctgctgtgcggcgccgacggcctgccgcacctcatcgtcagcggcgaccagcggcactggggcgagttcgtcaccccgggcctgctcttcctctacatcgccggctggatcgggtgggtcggcaggagctacctcatcgccatcagcggcgagaagaagcccgccatgagggagatcatcatcgacgtcgagctcgccacccgcctcctccccagggggttcatctggcccgtcgccgcctaccgcgagctcatcaacggggacctcgtcgtcgacgacaaggacatcggctactactagctgcgcttgttcacctgcttgcactgtgcatatatattgctgctgccgaggcaagaccggatcccatgctggctagcgactcacaagcttcattttttttactgctctggttttgcattgatggtaaccgatcatggaagatttagttaattaatgtgtgcctttgtggtcttttgcagctgggcgcttggatagtacgtggggaaacatggatggcttttggtgtaggagctgcatgctttgctagggctatctggtcatgtaggaaatggaagctctgctgtactttaagaaacttgatgaaacctttgtataactcaactgtacctctatctatcccttgtgtgtatttgagaacgatttcagagcatgtctggttcgggcgtctattagggcttgttcatttagctcttaatccatgtggattgagtcggattgaatgggtttgaatcacaaacaagtcaaacttctttttaattttttccaatcccatccaatccatgtgtattgggaataaccgaacaagaccttagatggagcataaatttttttc

SEQ ID NO: 96209 - DNA, 1073 bp, Zea Mays
tcacccactcgtgcgccgcggccttatcccaaagttgcattgcatccatcgtgcctgatctccctcccaataagcacgtctgtttctccccagctccaagccggacgacgcagcgtagcagcagagagccagagaccagagatggccgccctcgccgccgcctccacggccgccttcgccgcgaagccgcgcgcgcgcctctccgtggcctgctccgccgccaccggcgacagcagcagcgtgtcgctcgcgtcctccgtgaagacgttctccgccgcgctggcgctgtcgtcggtgctgctgtcctcggccgccacctcccctccgcccgcggccgccgacatcgcggggctgaccccgtgcaaggagtccaaggcgttcgcgaagcgcgagaagaactcgatcaagaagctcaccgcgtcgctgaagaagtacgcgcccgacagcgcccccgcgctcgccatcaacgccaccatcgagaagaccaagcgccggttcgagaactacggcaagttcgggctgctgtgcggcgccgacggcctgccgcacctcatcgtcagcggcgaccagcggcactggggcgagttcgtcaccccgggcctgctcttcctctacatcgccggctggatcgggtgggtcggcaggagctacctcatcgccatcagcggcgagaagaagcccgccatgagggagatcatcatcgacgtcgagctcgccacccgcctcctccccagggggttcatctggcccgtcgccgcctaccgcgagctcatcaacggggacctcgtcgtcgacgacaaggacatcggctactactagctgcgcttgttcacctgcttgcactgtgcatatatattgctgctgccgagctgggcgcttggatagtacgtggggaaacatggatggcttttggtgtaggagctgcatgctttgctagggctatctggtcatgtaggaaatggaagctctgctgtactttaagaaacttgatgaaacctttgtataactcaactgtacctctatctatcccttgtgtgtatttgagaacgatttcagagcatgtctggttcggg

SEQ ID NO: 96210 - DNA, 892 bp, Zea Mays
ctcaatgcaccagataacacaatcgccttcataaagcccatcaaaagtgagttagatgccatggactacatgctacggcgctttgggctggcatcttatctatgtatgaacattcaaaaatcatcattcctagccattagatgtaacaatgtgaaccttgatgaaactatgtgcaaattccctatggtaagagagaacttcacaattaagtatcttggcttacctttgacgattaacacattaaggaaaatggacttccaatacctgatggacaaggtacaaagcaagatgacaacatagaaaggacacaacattacccatgttggaagacttatccaaacaaaatcagtgatctccacgtagccgtcgcacacgctaaccattcatattgtccctaagggtgtgctacagattattgacaaactaagaagaaggttcctctgggtaggggaaagtctattgggtggaaaatgtatagtcaactaggcaacggttacatgtccgatcaaccttggcggcctaggagtacttgacatttataggtttgctagagcactatggctacattggctttaaagctagacgtcccctgggtggggcttgaaacgccttgcaacaagaccgattatttaatcttcgcaacaactaaaaaaattaaaattggggatggataaaaaattccttctgccacaatgcttggacccaaggtgaacacccaaaagacatctcacctagctctggacttgcaatcgatggagctcacccagaacatagaagacgtgttgatgtggaccttcaatagcacaggttcctacacaacaacatcagcctacaaagcacagtttgtggggtgctatgacgttcacatcaagatgattctctggaaaccctg

SEQ ID NO: 96211 - DNA, 453 bp, Zea Mays
atggtgggtccccagcgaggcgaggcaacccgagcgaaccccggatccgaatatgcggggacgacatgggtgggggaaggggcaccgaggacctgcgtggaggagggtaaggatggcgaggtgtgcaggcgagcgtggggcgaggatggcgtggatggtagaggagtgggggcatggtgttgccttatggatggtgggagcgaggatggcggagagcaggcggggcgaggatggtgggatctgccgcggaggcaatccctggaatggtgcccttccatcgatggagtgttgggcgagggcgagaatggcagggcggccgcagaggcttccctgaattgcgtccttccatcgatagagagcggggttgacggaggctggggcgagtaccacgggatcaacggagcgcgggcgagagggtgtcggggtgtagatgcctacactgcagacttatag

SEQ ID NO: 96212 - DNA, 2958 bp, Zea Mays
atgcatcccggtgctccacccgccgctgaactggcttcagctggggaggccggaggggattacatctgcgacgtgggagacatttcggctggggatcgtgagcattctgaggcagcgcctgaagccgagcatggacaacctgcaatagatgatgatactagtaagttatctagccctttcaattcctctctccgtgaagagttctggtgtgatattggtttcccaaaagaacgccggtggtgggaagatacggaagaaccaaacacatcggctgatacgatgatcgacctcctgggagacatgggaagtttgatgaacaaggttgatgccgaagcaatcctgaacccagtggggagaaaatcgtatgaaatcgggctggctagttcatcgacacccaatgtcggaactgtcagcaccattgcttcgagcaatgtctctatctatagccgcaaggagagcatcgaaaatcagaacaaaatgaaaaaaagaaaggggagatgctacggatgtaaaattcgtccttggcgcggtcctctgcccaggatcagtaaacggttgatcactctcgaggcattcatgccaagcttgatcaatgggcttgatagtttgaaacggccattatcagatgagaagttcaagagttcttgggtgacgaaaacacacaacattcaaactaaagaaacctctttagaaaatgtgcagctgctaaacgcttcgggagaggaacagaggcatttattgcctttaagcagggctcagctggtacaaaaagcaaagacatatggcgcttcgcgtgaatcattacgacggccagcattaaatcaaaagaaaggtcaaatttctcccataccagtgcaacacttaatccgaccctcatacgctgagatagctgcaagacagcctgcaaacctcaagcctcagcgccagcatatgccaacaatggaggagaaagcccatcatggtgagagaaccttcgtacctcgccatcatcagcgcagagagcaatttcctcggggcggcagggcagggagaggtcctggacgtggctctccagcgtccggtcacggaaggggaacaggccagaactgggcgcgtggccgtggatacgcgccgcagcagtatgcacctgttgcctcatcccagcagcttgcgcctgtgggaattcaaaggatgggaaatcaacaggagatagtgggtggaaaccttcctgctgaaggtgtgcacgatgcgactcagaaatgggagaatcgagatttcaaggccaagaaaccaagaccaccacactgctatcgctgtaagtgcaacgagcatctagttgaagcatgcaaagcagatttagattgttatgtatgcaataagaagaatatacatattgcggccaaatgtcctttgctcaagatggagaaaccatctgcagccatgagtggatttgccaagaatgagctttgtttctttcgcataccagtttttgactatagacttgaaacacctgatgctgctccaactggattgataaagatgactgggggtaagcttgatgctgtctcaattcaagctgaattggcaaaattgtcaagggttgaatgggcttgggaagctttgcaacatggggaggattctttccttgttgcttttccatcagaagaagaattagcaaggatgtctgaaatggaatacaagatgaggagcagtggagtgaccttaaccatatctgaatggaaacatgggggcgatgcaacaccagcctactttttggatgaagtgtgggtgcatgttactggtgtacctcacgcatggaggcattatcttggtttttgggcgcttggatcaatgattggcaccaccattgatgttgatatgtatacatacaggaagaaaggtgtgattcgaatcttggttgggacactagataaagaacttcttccgctcacaacagatgtggtttttgataaggtggggtatgagattacattctccatggaggatcaatattttgagccggcaatacctccaccaaattctcttgtacccagagaaaaggatgatgatagtgaaggaaatgaggacgctgcaaaggataaggagagagtgcagactgctaaaaaagctaagaacaccaaagatgcctcaggctccaagtccatgcagggcgacaatgaatctgctcctatgcagactgatggtgaaaatctgaaacacagcattggtcacatcgtggtggctccttctgatccaatgacaattttttcaccaggcaaacccctcaaccttgagcagggggttatatgctctgatgagcagcgcccaaattatactcaactttatgaaaccaatgaagtagaagggaaagagcatgctagcttggacttggggatgaggaaacaaccatgcatcgatgtcatattagggagacatttttccatgccaacacaaaggatggaaaacagttctgactgtgacagcaatacacatcaaacaagtgctttggagaccccagcgagcaatgtattatcgcctttgtctatgagggctgagaaacctgcaacaccattaagccaagatataggacagaactcacagggcgagcaagtggctgagatagaaacgagtgaggaattgaagatggagatgtctcctaattctgcccaggacaaaaatatggattcattagagaaggcaatgaatcgtgctgctgctcgcaatttggatgtgaaaggaggatccagtattgctgccggatttaagcagtataatacatctccatgcccaggacctcatgcagcaggttggtattgggaggaagaatatactatgaatgtgcaaaaatcatctgaggcagttgatgagagtacacctaagcatgaagtggtgaaccaacgaaaaaagtccaccgatgaagaactaacgaaagatttgtttgttttgttagaatttgtcgtgaaatccttattctattga

SEQ ID NO: 96213 - DNA, 2771 bp, Zea Mays
atgtctcgtgtgaatggagtcactgacgccttgagcatcggtccctccgcagggtacattctattcttagtaattgtgcatattttactattttttactgcttatgatcgttcatatacactcttagccatccaaaaggttactcttttatgctccgcttgcaaggcgccaaggacggacggaggcgacgactcgcaaggtagctctgctcgggcgaggcagcagcagcacgcagcagtactccgttcagaatcaggagagaagacgttgttctccgggcactcgagtcgaagtcctgacgagatggacggcaatgcgaggtcggcggcaacgaatcagaagaagcccgtcgtcgcggacgacgacctcgtggagctgctgtggcacaacgggagcgtcgtcgcgcagccccaggcgcaccagaggccggcgcccacctacgaccccgaccgcccgggcaccagcggcctcaccggcgaagagaccgccgcgtggttcccggacaccctcgacgacgcgctggagaaggacctgtacacgcagctctggtacagcaccatcgccgacgccgccccgcagcacgagggcacgctcccgggccctacctcgcagccttcgccttcgccgcccgttgggagcagcggcgtcgagtcgagctgggctggcgacatctgctcgaccttctgcggaagcaaccaggtgctcaggacgccggcaaggatcagggggaaggacgcggcattgcagtcggagttgccgagcaataccggcgcgcacgacggcacatcgtcatccggcgggtctggaagcaactatgggggattcgggctgcccagtgacagcgtccatgtacagaagaggaaggggaggtgtagagacgactcagatagtccgagtgaggatgccgagtgtgaggaggcaagtgaggaaacgaaaccatcaaggcgatatgggacgaaacgccggactcgtgcagctgaagttcacaatctttcagagaggagaagaagggaccggatcaatgaaaagatgcgcgcattgcaagagctcatcccgcattgcaacaagactgacaaagcgtcgatattagacgagacgattgagtatctgaagtccctccaaatgcaagttcagatcatgtggatgacttctgggatggcgccaatgatgtttcctggtgttcaccaattcattccacagatggctctaggaatgaatccaggttgcatccctgcagcacagggcctaagtcagatgccaagattaccatacatgaaccacaccctgccaaaccatatccatctgaactcgtctccagctatgaatctaatgaatccactgaacgccgcgaaccaggtgcaaatcggtcacctcagggatgcaagtagccacttgcttcacctagatggcgggcgagcagcagtggtacctcaggtaccaggaccaggaccccatgttcatggacatcaaatagcacaagccgaagaacacaataagatactggaagtggcagctagtactgttataccaacttctaaggcagggcaaccaccaactttacatagagtttagagtgaccaaaatcatgccttgagctgtatatctgtacagaagtgtcagaagcatattctttgacatgtaagcttagttctagagttattatcaggagtcttgtataggttacaagataacagcctgtctaccgccgtattctatctacggaagaactcagctgcatactgctgtgcagactgcagtacagcgttcaagagagaattgaatgggatcaagaaagggtctttctttttctgggaaccgctgaaaatactgacgtgatgaggagcggatggcatctctgtagctgcgctgcgctgcagtgtatctacatcaatatggcaatgcttgtctggacacgaatgctacatctacatgtaaatgcagagttgcaggtttggtcttgcaggagatgagctcgccagacagtccatcacactgccggcttgattgcatcttcacaggacgtggacttgtgggcacatgctccacgggcaacggttcggcatcctcctggcgttcttgtggctggcagcagccgcgagaatctgtgtggagccctgggctgggctcgttgcaagatatgccagcctctcatcttcagactggaggaggaggggggggttccctctccaggctttttccatgatgttacaggcttacagcattcagagtgcatgttacactcacggccctatcagcacatgctgtgggcagccggtgatgataggatcagatgctcatatctcctgcggttttctgtctaccgcatttggattggatttggaccccccctgtactgtacttcctccttgctcccctgctgcttggcgctttgtccatgtgcctggttggaattgctactatacatttttggagggtaattgtttcaccggaacatgtagcgtggacgtgtggtaataacaattgaattgatgcctttactgtctgagtaataacaaagggaagcgatgagcagcacatggtaagcttccggtgccggttggaggcttcgatgtcgatgtctgcattgagtttatttgatgctgtgtgttctatagctagactaggctagagtttggatagagttcatgggacaatgttgtctgcatcttcatctcccctttagtttaggacttatctgagaggtacggttctttgcatgacagaacaaaactagcagcagcaaaaaaaaaaaaaaaaggaaacaacgacaa

SEQ ID NO: 96214 - DNA, 487 bp, Zea Mays
atggtgtcgcgcttgttgctcgggaggatcgggatccagtccgccagtcgtcttttcggcggccaccgcggcttcagcggaggcgaggcgctccgccgttatattccgccggcgggggatcggtcggtctgcggcaacgcgtatgtgccgcgaaccaagacggacgacatcgggaggacggaacatgagccgcagcacctcgtcaggtttttagatccccaggttgctcgtcagcaccaggagttcgttcagtccctcgacaggatgctggacgcgataaggaatcctcagagtctcgcgcagatggagcgtcggaggcttgctagtggggtgaaagtcttggatgatgacttatgacagtcaagttccctatgcagaagtagagagttgaataagtgaacaatttatgttatcgtttaggttcattcagtttatgttattgttattgcttaaatatcaaatatatacacttaagcaattttatttc

SEQ ID NO: 96215 - DNA, 782 bp, Zea Mays
cgcaacacagcaagacccgaccttgcctcctcctgcagcagcagcataaccagaggggagtacatcaagccgtttcgagagagctttagtgtctgctactgctagcagtatggcttccgctgcgcgcttcctggtggccgtggtcgtggcgtgcgcagtcctggccagcaacaactgccatgcggcgcgccacttggccgacacggcagcggctcccgctgctgctggtgtcgtccctggcctccccgctgtgcccaccttgccaacgttgccgccagtgccacaggtggcgctgccacctatgccggccgtgcccgcggtcaccgtgccgcagatgacgctcccgcccatgccagcggctcccaaggtggccgtgccgttgccgccaatgcccgccgtcccgtccgtgctgcccaagctgaccctcccaccgatgcccgttgttgttccatctgtcgtccccaaggtggtcttgccgccgatgccgtcggtccctaccgtgcccatgccgttcgcggcaccgcctccatcggcgtagacgcgcgtgctcctgcaggtttgcgttcgccgtggccaccatgcacaggtggtgcggtgaccagtgtacgcgagagtgatgtcattgtttgtgagtcgcgtgctttctttttgttcctaacgttgtacgtatgtatatcctttgtatttctactacattcatttacgccgtatatgtctggtcaacactcttctccttttttttgttcttctgttcaaatctgaactttagtttccaccgtata

SEQ ID NO: 96216 - DNA, 783 bp, Zea Mays
aacacagcaagacccgaccttgcctcctcctgcagcagcagcagcataaccagagtgcagcaagccgtttcgagagacagctttaggctactgctagtgctagcagtatggcttacgctgcgcgcttcctggtggccgtggtcgtggcgtgcgcactcctggccagcaacaactgccacgcggcacgccacttggccgacacggccgcggctcccgctgctgctggtgtcgtccctggcctccccgctgtgccgaccttgccaacggtgccgccagtgccacaggtggcactgccacccatgccggccgtgcccgcggtcaccgtgccccagatgacgctgccgcccatgccagcggctcccaaggtgtccgtgccgttgccgccaatgcccgccgtcccgtccgtgctgcccaagctgaccctgccaccgatgcccgttgtcgttccatctgtcgtccccaaggtggtcttgccgccgatgccgtcagtccctaccgtgcccatgccgttcgcggcaccgactccatcggcgtagacgcgcgtgctcctgcaggtttgcgttcgccgtagccaccatgcacaggtggtgcggtgaccagtgtacgcgagtgatgtcattgtttgtgagtactctctgtacgtgcgtcgcatgctttcttttttttcgtaacgttgtacgtatgtatatcctttgtatttctaccacattcatttgctgtatatgtctggtcaacactcttcttccttttttgttcttctattcaaatctgaactttagcttc

SEQ ID NO: 96217 - DNA, 801 bp, Zea Mays
atttcactggcagaagaagccatggggcagaagccgtcgtacctcctgctgctcgtcggcctcctcgccatcgccatgctctgcgccagcccgggtcacgcgctgcgccaactgaacgacgccaacggcggtggcctcgagttctccttgggctccaaggcggccgcggcgggggccaagaccgagccgctggacccgtccctgagcgacgactacgagaacgataccagccacgtggagttcgagccagagctcggccgcgcgacggccgtccccgccgcgaccaccgtcaccgtcactgccgccgcggggccgaccacggagcctttgacgtcccggaacgccgccgccgccgccggcagccacagcatgaggtggtggctgccgccgtcgaccttgccgtcgttcccgctgttcccgacccccggcgccggcggcatgcccgccatcccggggctcccgctgcccggcatgccgttccaccccatcggcggctggggcgcgcccgcgcctcccgccccgtcgcagccggcgccttctgccgcagaggccgccgcgagcacgaacgccaacgaccccaacactcgcggagggggcgtcaactgaccaaaccttgctctgcttgcgtatgctgcgacggctaccgttcattttttcagttttttttctctatttttattactactgctactcgtatcgcctcaaatgctgggtctagagcgtgattgatacatgtggttgtattggaaactcataatccaagagtcaagagatgcgcacaaaactttttcgtctgatata

SEQ ID NO: 96218 - DNA, 2548 bp, Zea Mays
ctcccgatgttgagcatcaattgctagtacgatttcttctctcctccaaaccggccaagccaccaaccagcgccccccaccgccgcctttttatttcatccacgctgctcgtgctcgctgcctgcttcttgcgcgatcgtctcggcctctcgggactctagagtggcggccggctctccgcctgttcttgtcgtcgctgctcctttccctgtgagcttaaaatatacacaggatgtcggaacgttctgagagtgcaactgaaaagattatgagcagcatcatggataccattgctgacaaccttcctaagcagaagtctgggaaatttgatccaggttcagtctctgacaaagtgaagaacaagctgtttggtcgtcagaagaccttgcatggagttctgggtggtggaaaacctgctgatgtgctgttatggaggaacaaaaaaatatcatcgagtgttctggctcttgcaacagctatttgggttttctttgagtggctcgactaccactttctgacaattgtttcatttgcccttgttcttggaatggttgtccagtttgtttggtccaacttctcaaacatgctaagcagcggatcccgttctcaggtgccccgagttgaattgcctgatgagttatttgtgaacattgccgttgcaatcggtgcccaagtaaacaagttcctgtgcttccttcaggatgtttcttgtgaaagaaacttgaagcattttgtagtggcgatcgcaggactgtgggctgctgcggtgattggaagttggtgcaatttcctgactgtcatatatgtcgggtttgtttgtgttcacacgcttccggtgctctatgagaagtacgaagaccaagtggacgatttcctctacagccttcttggtctgctgcgagatcaatatcagaagctcgaccacggcgtcttgagcaagattcccaaggggaacatgaaggctaagaagaacgagtagtttagcagatggtttctcgtgaatgagatcaatatcgttttgacttgtgtcgattattaatttattacctaaggcgtgtgtgccattctgaacctggctgctagttcatcgcccaccggggttttaaactactaagctgcaatgcacaagtaatgaagtgtgctagttcattgcccacaggtgtactagttcttcgactcatttaaatttctgatccgatcagttgcgggatattgatagactgcgtgcccataattcatgtctgaaaactggaagttgctgagataaagtttacagtttaggctcaatctgcaaggataagttctggcaaatgtgtatgactattatattccttgttccgcaattccattagcttgataaagtttacagtttttttcttcattaagttaaaaccttattcatgtcaccttcaagaactacgtaatagctaccaactggattacctggtgtcttaaaagcgaaatgcctgacagaggaaattgagaattaagatggaaggcagggttggatgacagaagacattaaagcatgagtggatttaattaatctcaggagaattgatctgcgtctgattatggattctgaatgctaaagcaagtagtttaaacttagatgttgcacgcgcccgacgtgcaggagcaataaaaacgatgagaccattcagaaaatcggaatgcaggtcaccatgatccaaccaaactgctctccaaccatgctataagtactaggaaaactcgtgcgacagccatttcactggcagaagaagccatggggcagaagccgtcgtacctcctgctgctcgtcggcctcctcgccatcgccatgctctgcgccagcccgggtcacgcgctgcgccaactgaacgacgccaacggcggtggcctcgagttctccttgggctccaaggcggccgcggcgggggccaagaccgagccgctggacccgtccctgagcgacgactacgagaacgataccagccacgtggagttcgagccagagctcggccgcgcgacggccgtccccgccgcgaccaccgtcaccgtcactgccgccgcggggccgaccacggagcctttgacgtcccggaacgccgccgccgccgccggcagccacagcatgaggtggtggctgccgccgtcgaccttgccgtcgttcccgctgttcccgacccccggcgccggcggcatgcccgccatcccggggctcccgctgcccggcatgccgttccaccccatcggcggctggggcgcgcccgcgcctcccgccccgtcgcagccggcgccttctgccgcagaggccgccgcgagcacgaacgccaacgaccccaacactcgcggagggggcgtcaactgaccaaaccttgctctgcttgcgtatgctgcgacggctaccgttcattttttcagttttttttctctatttttattactactgctactcgtatcgcctcaaatgctgggtctagagcgtgattgatacatgtggttgtattggaaactcataatccaagagtcaagagatgcgcacaaaactttttcgtctgatata

SEQ ID NO: 96219 - DNA, 1420 bp, Zea Mays
ctcccgatgttgagcatcaattgctagtacgatttcttctctcctccaaaccggccaagccaccaaccagcgccccccaccgccgcctttttatttcatccacgctgctcgtgctcgctgcctgcttcttgcgcgatcgtctcggcctctcgggactctagagtggcggccggctctccgcctgttcttgtcgtcgctgctcctttccctgtgagcttaaaatatacacaggatgtcggaacgttctgagagtgcaactgaaaagattatgagcagcatcatggataccattgctgacaaccttcctaagcagaagtctgggaaatttgatccaggttcagtctctgacaaagtgaagaacaagctgtttggtcgtcagaagaccttgcatggagttctgggtggtggaaaacctgctgatgtgctgttatggaggaacaaaaaaatatcatcgagtgttctggctcttgcaacagctatttgggttttctttgagtggctcgactaccactttctgacaattgtttcatttgcccttgttcttggaatggttgtccagtttgtttggtccaacttctcaaacatgctaagcagcggatcccgttctcaggtgccccgagttgaattgcctgatgagttatttgtgaacattgccgttgcaatcggtgcccaagtaaacaagttcctgtgcttccttcaggatgtttcttgtgaaagaaacttgaagcattttgtagtggcgatcgcaggactgtgggctgctgcggtgattggaagttggtgcaatttcctgactgtcatatatgtcgggtttgtttgtgttcacacgcttccggtgctctatgagaagtacgaagaccaagtggacgatttcctctacagccttcttggtctgctgcgagatcaatatcagaagctcgaccacggcgtcttgagcaagattcccaaggggaacatgaaggctaagaagaacgagtagtttagcagatggtttctcgtgaatgagatcaatatcgttttgacttgtgtcgattattaatttattacctaaggcgtgtgtgccattctgaacctggctgctagttcatcgcccaccggggttttaaactactaagctgcaatgcacaagtaatgaagtgtgctagttcattgcccacaggtgtactagttcttcgactcatttaaatttctgatccgatcagttgcgggatattgatagactgcgtgcccataattcatgtctgaaaactggaagttgctgagataaagtttacagtttaggctcaatctgcaaggataagttctggcaaatgtgtatgactattatattccttgttccgcaattccattagcttgataaagtttacagtttttttcttcattaagttaaaaccttattcatgtcaccttcaagaactac

SEQ ID NO: 96220 - DNA, 1141 bp, Zea Mays
aaccggcgatgtggaatcttaagggattttctttttacctgctcctttttgtactgaaagatggacctggtgactttactgatgtcggaacgttctgagagtgcaactgaaaagattatgagcagcatcatggataccattgctgacaaccttcctaagcagaagtctgggaaatttgatccaggttcagtctctgacaaagtgaagaacaagctgtttggtcgtcagaagaccttgcatggagttctgggtggtggaaaacctgctgatgtgctgttatggaggaacaaaaaaatatcatcgagtgttctggctcttgcaacagctatttgggttttctttgagtggctcgactaccactttctgacaattgtttcatttgcccttgttcttggaatggttgtccagtttgtttggtccaacttctcaaacatgctaagcagcggatcccgttctcaggtgccccgagttgaattgcctgatgagttatttgtgaacattgccgttgcaatcggtgcccaagtaaacaagttcctgtgcttccttcaggatgtttcttgtgaaagaaacttgaagcattttgtagtggcgatcgcaggactgtgggctgctgcggtgattggaagttggtgcaatttcctgactgtcatatatgtcgggtttgtttgtgttcacacgcttccggtgctctatgagaagtacgaagaccaagtggacgatttcctctacagccttcttggtctgctgcgagatcaatatcagaagctcgaccacggcgtcttgagcaagattcccaaggggaacatgaaggctaagaagaacgagtagtttagcagatggtttctcgtgaatgagatcaatatcgttttgacttgtgtcgattattaatttattacctaaggcgtgtgtgccattctgaacctggctgctagttcatcgcccaccggggttttaaactactaagctgcaatgcacaagtaatgaagtgtgctagttcattgcccacaggtgtactagttcttcgactcatttaaatttctgatccgatcagttgcgggatattgatagactgcgtgcccataattcatgtctgaaaactggaagttgctgagataaagtttacagtttaggctcaatctgc

SEQ ID NO: 96221 - DNA, 1204 bp, Zea Mays
ctcccgatgttgagcatcaattgctagtacgatttcttctctcctccaaaccggccaagccaccaaccagcgccccccaccgccgcctttttatttcatccacgctgctcgtgctcgctgcctgcttcttgcgcgatcgtctcggcctctcgggactctagagtggcggccggctctccgcctgttcttgtcgtcgctgctcctttccctggatgtcggaacgttctgagagtgcaactgaaaagattatgagcagcatcatggataccattgctgacaaccttcctaagcagaagtctgggaaatttgatccaggttcagtctctgacaaagtgaagaacaagctgtttggtcgtcagaagaccttgcatggagttctgggtggtggaaaacctgctgatgtgctgttatggaggaacaaaaaaatatcatcgagtgttctggctcttgcaacagctatttgggttttctttgagtggctcgactaccactttctgacaattgtttcatttgcccttgttcttggaatggttgtccagtttgtttggtccaacttctcaaacatgctaagcagcggatcccgttctcaggtgccccgagttgaattgcctgatgagttatttgtgaacattgccgttgcaatcggtgcccaagtaaacaagttcctgtgcttccttcaggatgtttcttgtgaaagaaacttgaagcattttgtagtggcgatcgcaggactgtgggctgctgcggtgattggaagttggtgcaatttcctgactgtcatatatgtcgggtttgtttgtgttcacacgcttccggtgctctatgagaagtacgaagaccaagtggacgatttcctctacagccttcttggtctgctgcgagatcaatatcagaagctcgaccacggcgtcttgagcaagattcccaaggggaacatgaaggctaagaagaacgagtagtttagcagatggtttctcgtgaatgagatcaatatcgttttgacttgtgtcgattattaatttattacctaaggcgtgtgtgccattctgaacctggctgctagttcatcgcccaccggggttttaaactactaagctgcaatgcacaagtaatgaagtgtgctagttcattgcccacaggtgtactagttcttcgactcatttaaatttctgatccgatcagttgcgggatattgatagactgc

SEQ ID NO: 96222 - DNA, 357 bp, Zea Mays
atggtgggcacggcgaacgcaaacctgcaagagcgcgccgcgagcgtctacgccgacggaggcggtgccgcaaacggcatgggcacgttgacggtggggaccgacggcatcggcggcaaggccaccttagggacgacggatggaacgacagcgggcatcggtggcagggtcagcttgggcagcacggacgggatggcgggcattggcggcagcggcacagccaccttgggagccgctggcatgggcggcagcgtcatctgcggcacggtgaccgcgggcacggccggcatgggtggcagcgccacctgtggcactggcagtggcggagcacgatccaaaaataaagtatggcaatga

SEQ ID NO: 96223 - DNA, 1018 bp, Zea Mays
gatatattgtttgttacatgcggagtttgaaggagtttaaaacacaagcaaccacattggcatcgcttcagcatcccaatttatgtaaactgatcggctattatgcaaaagaagattctaatgaaaggatgttggtctatgaacggctttatcatggaagcttagataagctactctttggaagatcagatggtcgtttcatggactggtctaaacgtttgaaggttgccctgggtgctgccagaggtctagctttcttgcatgatgaaggaccctttcaggccatatacaacgagttctcaactttgaacatccaaatagataaaggtttcactgctaagctttcaggatatggttgtgttggcttcaataccgaggagatatctaatgcacatgtgcaaaccattcggtggagaccttggagaagggtttactcactcagtttgtctattgctgcaacaagtcggggctggaccgttccaaagtaaatgtaaatggaggcgcgattgcccttggacaccctttgggtgcaacaggtgcccggtgcgtggctactcttctaaatgaaatgaagtgccggggcagagactgcagatttggtgttgtcaccatttgtatcggatctggaatgggggcagcagctgtgttcgagctatgttcggcccggctggaggtatcgaccatcactcgtcactgtaacctgatggtgatcggcgaccgtgagcttccatgttattgcgttctgatacttgagacttttattataactatgtatgagatattgtctcttattagtactggatgatgagatgtgtcttattatgactatggatgagacttttgtgatgtaattgatgagactatggatgagacttttgtgatgtaattgatgagactatgaatttaaatattgttatgtgattgtgtgtgagatgtgttatgtgaaaatatgttgtgctatatagctgttgatatatttgttatgttgtggaatgtggtgtaaaataaaaataaacaa

SEQ ID NO: 96224 - DNA, 395 bp, Zea Mays
actgtaatatttgaagaggttttcgttatcattattactgcatgtgattctacatgtaggcatgactgcgccacaagcagctggagttattcatagtgacttccagaaaggattcatcagagctgaaactgtatcctatgatgattttgttgcagctggttctcttggagtagcaagggagaaagggctgctgaggttggaagggaaggattatgttgtgcaggaaggagatgtcatgcttttcagattcaacgtgtgacagcaatagtagcaaaaggcttcaaaaacaccggaatttgtactaggcagaatatagtttgcccatattgtgagattttttttttgccacttgaccaccgattattgatctaccacgctggtagggcagctttctt

SEQ ID NO: 96225 - DNA, 1530 bp, Zea Mays
gtgccatttcatctatccatcccgcagctcttgtctctggcaaccgtacgcccaaccgtgttcccgcgccgcccacgaactactctccggcgctgcccatgacgacggtgtcgcgcgcgctcggctccgcgttcgcgggcttcacgcgggcgcccgcggtggcgcagaccgcgacgaccctgccctccccgtacggctcgtcggctctgcaccagcactggcgctggagccgggcctgccgcacccggcggttctcgtccggccgcgcggcacggattagcatgagcctccgcgccggtatcgtcgggcttcctaacgtcggcaagtcaaccctcttcaacgccattgttgaaaacgggaaggcacaagctgcaaactttcccttttgcaccatcagcccaaacgttggtgtggtggctatccctgatcctcgtttgcaggtgctctcaaaattaagcaagtcccagcagacggtcccaacatccattgagcttgtggacattgctggtctagtcaaaggagcaagcaaaggagagggactaggaaatcaattcctttcaaacattcgtgaagtggattccatacttcaggttgtgcgatgctttgaggatgacgatatagttcatgtcaatggcaaggtcgatcccagatcagacattgatgtcattaacctagagctgatattttcagaccttgaacagatagagaagaggctagataagcttaacaagagtaaaacgaaagatacccaagtaaaagtgaaggaacaagcagagaaatcaggattggaaaaaattcagcaggcacttatggaaggaaagcctgcaagatcggtcgatttagctgagcatgagaaagaagctataaaacacctttatctgctaactatgaaacctgtcatttatgttgctaatgtgacagaatctgatcttgctgaacctgatagcaattctcatgtcaaagaggtggctaaagcagcatcagacttgcagtctggtatggttacaatatcagctcaggttgaagctgaactcgccgagctacctctagaagagagagtagaatatttaaaatctcttggtgttgctgaaagtggactaggaaatttggtaaaagcaacatataatctattggggttaagaacttatttcacaaccggagacaaggaaacaaaagcttggactattctttcaggcatgactgcgccacaagcagctggagttattcatagtgacttccagaaaggattcatcagagctgaaactgtatcctatgatgattttgttgcagctggttctcttggagtagcaagggagaaagggctgctgaggttggaagggaaggattatgttgtgcaggaaggagatgtcatgcttttcagattcaacgtgtgacagcaatagtagcaaaaggcttcaaaaacaccggaatttgtactaggcagaatatagtttgcccatattgtgagattttttttttgccacttgaccaccgattattgatctaccacgctggtagggcagctttctt

SEQ ID NO: 96226 - DNA, 1651 bp, Zea Mays
gtgccatttcatctatccatcccgcagctcttgtctctggcaaccgtacgcccaaccgtgttcccgcgccgcccacgaactactctccggcgctgcccatgacgacggtgtcgcgcgcgctcggctccgcgttcgcgggcttcacgcgggcgcccgcggtggcgcagaccgcgacgaccctgccctccccgtacggctcgtcggctctgcaccagcactggcgctggagccgggcctgccgcacccggcggttctcgtccggccgcgcggcacggattagcatgagcctccgcgccggtatcgtcgggcttcctaacgtcggcaagtcaaccctcttcaacgccattgttgaaaacgggaaggcacaagctgcaaactttcccttttgcaccatcagcccaaacgttggtgtggtggctatccctgatcctcgtttgcaggtgctctcaaaattaagcaagtcccagcagacggtcccaacatccattgagcttgtggacattgctggtctagtcaaaggagcaagcaaaggagaggtaccagttttgccattgtcttcaattaacctgcaggatacctccaactccgctgagcaaatgtgagatggttccagattagtttatacataatggtattatggttggcaattgaaaacagggactaggaaatcaattcctttcaaacattcgtgaagtggattccatacttcaggttgtgcgatgctttgaggatgacgatatagttcatgtcaatggcaaggtcgatcccagatcagacattgatgtcattaacctagagctgatattttcagaccttgaacagatagagaagaggctagataagcttaacaagagtaaaacgaaagatacccaagtaaaagtgaaggaacaagcagagaaatcaggattggaaaaaattcagcaggcacttatggaaggaaagcctgcaagatcggtcgatttagctgagcatgagaaagaagctataaaacacctttatctgctaactatgaaacctgtcatttatgttgctaatgtgacagaatctgatcttgctgaacctgatagcaattctcatgtcaaagaggtggctaaagcagcatcagacttgcagtctggtatggttacaatatcagctcaggttgaagctgaactcgccgagctacctctagaagagagagtagaatatttaaaatctcttggtgttgctgaaagtggactaggaaatttggtaaaagcaacatataatctattggggttaagaacttatttcacaaccggagacaaggaaacaaaagcttggactattctttcaggcatgactgcgccacaagcagctggagttattcatagtgacttccagaaaggattcatcagagctgaaactgtatcctatgatgattttgttgcagctggttctcttggagtagcaagggagaaagggctgctgaggttggaagggaaggattatgttgtgcaggaaggagatgtcatgcttttcagattcaacgtgtgacagcaatagtagcaaaaggcttcaaaaacaccggaatttgtactaggcagaatatagtttgcccatattgtgagattttttttttgccacttgaccaccgattattgatctaccacgctggtagggcagctttctt

SEQ ID NO: 96227 - DNA, 1255 bp, Zea Mays
ccaaacgcacgcacacaggcgtgcggggatctgtctggcggcagactggaggcatctttttttggcagaatacccccctgcctcttattcggcccccgctcgcccctgcagtgccatccgctgctcttctccgttcgaccgcccgcccgcccgcccgcccctcctctctctctgtctcgccgcccggggagaaggagggctccgccgctcccggggaagagcgcgccattgccgccgccgcgctgactggggaagatggttgtccaggagttcacagttgatctcaacaagccccttgttttccaggttggccatcttgaggaacggtaccaggaatgggttcaccaaccgatcgtcagcaaggagggtccacgctttttcggaaatgatgtcctggagttcttgactcgcacgaagtggtgggctgtgccaactatatggctgcctgttgtctgctgcctgctcgtgaaatctattctgatgggtcataccgttcaggacgtagctatgatggctctatttgggatatttatttggacgctgatcgaatacactttgcaccgcttcctgttccacattgagaccaagacctactggtggaacaccgcgcattaccttcttcacgggtgccaccataagcaccccatggactcactcaggcttgtgtttcctcctactgcaacagcaattttgtgtttcccgttctggaacctggtcgcgttcttcgcaactccctctaccacacccgcactgttcggaggcggtctgttgggatatgtgatgtatgattgcactcactactacctgcaccatgggcaaccatccaaagacccagcaaaacatctcaagaggtatcacctcaaccatcacttcagaatccaggacaagggcttcggcatcacctcatcgctttgggacgctgtctttgggacattgcctccatccatgacgtctgggaagaagaactgacgcacgtaactcaattcttggcatgagagattctaggggacctgtaatatatattcaagctagggataatcctggatctgtcttcgtgcgatgggttgacatgttcattcagttctcaaagttcttgtagtgtactgattgtctgttgatctattctgaatgtgatgatagtacttcgctgcctcagccttctgtgcattgccagctgtaccgaaaacggcatgttttacttaactcttttcgtctagttcttaaaatcagagcatcagactcttgcaaatgcaag

SEQ ID NO: 96228 - DNA, 1591 bp, Zea Mays
cgctaattcttccaaacgcacgcacacaggcgtgcggggatctgtctggcggcagactggaggcatctttttttggcagaatacccccctgcctcttattcggcccccgctcgcccctgcagtgccatccgctgctcttctccgttcgaccgcccgcccgcccgcccgcccctcctctctctctgtctcgccgcccggggagaaggagggctccgccgctcccggggaagagcgcgccattgccgccgccgcgctgactggggaagatggttgtccaggagttcacagttgatctcaacaagccccttgttttccaggtatgcctcgctcttagttgctcctttgcgatggttgctgtgaatcttagcctttttgaagtagcttatgggattctctctcgcactttacaagttattatgtacttttgagcttgtttaatgcagctttgggtcttttcgcaaccaggccttagtgttagactgtgctttctcctcagcaataattgtggcagattctatcatgaaagcggaatctcatgtagtagttgtaaacttccgagtttctgagtcgatgtccagctgcttcacgtggttcgcattcacataaccatcttctggttgtttcttgattttgtggatgcaggttggccatcttgaggaacggtaccaggaatgggttcaccaaccgatcgtcagcaaggagggtccacgctttttcggaaatgatgtcctggagttcttgactcgcacgaagtggtgggctgtgccaactatatggctgcctgttgtctgctgcctgctcgtgaaatctattctgatgggtcataccgttcaggacgtagctatgatggctctatttgggatatttatttggacgctgatcgaatacactttgcaccgcttcctgttccacattgagaccaagacctactggtggaacaccgcgcattaccttcttcacgggtgccaccataagcaccccatggactcactcaggcttgtgtttcctcctactgcaacagcaattttgtgtttcccgttctggaacctggtcgcgttcttcgcaactccctctaccacacccgcactgttcggaggcggtctgttgggatatgtgatgtatgattgcactcactactacctgcaccatgggcaaccatccaaagacccagcaaaacatctcaagaggtatcacctcaaccatcacttcagaatccaggacaagggcttcggcatcacctcatcgctttgggacgctgtctttgggacattgcctccatccatgacgtctgggaagaagaactgacgcacgtaactcaattcttggcatgagagattctaggggacctgtaatatatattcaagctagggataatcctggatctgtcttcgtgcgatgggttgacatgttcattcagttctcaaagttcttgtagtgtactgattgtctgttgatctattctgaatgtgatgatagtacttcgctgcctcagccttctgtgcattgccagctgtaccgaaaacggcatgttttacttaactcttttcgtctagttcttaaaatcagagcatcagactcttgcaaatgcaag

SEQ ID NO: 96229 - DNA, 1264 bp, Zea Mays
cgctaattcttccaaacgcacgcacacaggcgtgcggggatctgtctggcggcagactggaggcatctttttttggcagaatacccccctgcctcttattcggcccccgctcgcccctgcagtgccatccgctgctcttctccgttcgaccgcccgcccgcccgcccgcccctcctctctctctgtctcgccgcccggggagaaggagggctccgccgctcccggggaagagcgcgccattgccgccgccgcgctgactggggaagatggttgtccaggagttcacagttgatctcaacaagccccttgttttccaggttggccatcttgaggaacggtaccaggaatgggttcaccaaccgatcgtcagcaaggagggtccacgctttttcggaaatgatgtcctggagttcttgactcgcacgaagtggtgggctgtgccaactatatggctgcctgttgtctgctgcctgctcgtgaaatctattctgatgggtcataccgttcaggacgtagctatgatggctctatttgggatatttatttggacgctgatcgaatacactttgcaccgcttcctgttccacattgagaccaagacctactggtaagaatgcttcgaccttcgcgttggcaatgtctcatcatgtctttccttctgctcctcagattgtcgtcgatgcattgctgcaggtggaacaccgcgcattaccttcttcacgggtgccaccataagcaccccatggactcactcaggcttgtgtttcctcctactgcaacagcaattttgtgtttcccgttctggaacctggtcgcgttcttcgcaactccctctaccacacccgcactgttcggaggcggtctgttgggatatgtgatgtatgattgcactcactactacctgcaccatgggcaaccatccaaagacccagcaaaacatctcaagaggtatcacctcaaccatcacttcagaatccaggacaagggcttcggcatcacctcatcgctttgggacgctgtctttgggacattgcctccatccatgacgtctgggaagaagaactgacgcacgtaactcaattcttggcatgagagattctaggggacctgtaatatatattcaagctagggataatcctggatctgtcttcgtgcgatgggttgacatgttcattcagttctcaaagttcttgtagtgtactgattgtctgttgatctattctgaatgtgatgatagtacttcgctgcctcagccttctgtgca

SEQ ID NO: 96230 - DNA, 1233 bp, Zea Mays
atggcatactcgtcagaagaaaacatgaaggctttgctcaaagtccttgttgactgtgccgaggatgccaccaaatcactcagtggtttagtagatcatgctttagaccacatgcatgatgaagagatcgtagctagaaccttgtttgccatcaaagaaaggctagaattgctacaacaagatgccttagaggcaaaagtgcaagcatttccagacattgctaagtaccagggggatgacataagtcttcaacctacaactccgtcgacccctccaacagttactgatcgatcttttgatgaagacgagttgtactgccccgaagtcagtgatgagtggaatccttttgcagattcctttctaggttcaaatcctagtacaccattgcagggttcgaatacggtaccttcaatacctgtgaagttggagtctgatgctgaacatagtgttcaggacataaatagtcctgtaaagaatccagcacctgttaacaaaccaaagaaaaccaaagaacaaaactttactgctcctgaagaccttatactttgcaccacatggttgcaaattagcagtgatcctattgtccacactggacaaaggaaggagggactttgggcacaaatagaaaaaaggtacaacgaacaaagggccaagttccactgtagactaaaccgagcacttagcagtagatgggacaagattcgagcagatgtgaacttccaaggcggctacattgtttgcacacgaagagaacaaaccattccattttatgcattgctggcatcaactgaagggggaacccaattgggagagcatctgtcaaggaaatgtatttcgaggaatacatggaaaatcaattggatcttctggaaacaccctcttggtcgtgattctagtaaaactgagagaaagaaagctgtgtcatcatcgtcgacggaatacttaagccgtctgcaagatttaactgaaaaacaacttcagcgctgcatagaaaagggtgagaagaaagaaaagtgcactgaacaagacagggaactagagaaaaagaggttggaattggaagcgaagttaagcattcgtgaaagggaattgaaacttgaagaactccaatcggccaaacaacaattgcagatgttgcagtctactagtgaagacgaagtggatcctgaagtttggattatgatgaaggagcacaaaaaacgcttgcagcagttcatttttagttttcagtaa

SEQ ID NO: 96231 - DNA, 2262 bp, Zea Mays
ctcatctccacgcctgccgcactagtaccctctcctgttctctctgccgagtgggtcaccgatgtaacagaccgagagaacccggggctggcgcgattgattctgcgagctggccgtgaatctcggaaatccggtcaaaatccgtcgctatccgcccacagaactacctccgatgtgcgcgcggatgaatctctagcgcgcgacctgctcctcctccgtctcccccgcgccgcgtgccctagagacgaaattctctctctcctagagccgccgccgcagccaaaaaaaaaacccctaaacccccaatccatggcgtcgagcagcactgaccttgccgacgacggcttcgcggcgccgcgacttttctcgcagggtgtatcctacacatacgacgacgttatcttcctcccgggctacatcggcttccccgccgacgccgtcgacctctccacccgcctctcccgccgcatcccgctatccatcccctgcgtcgcgtccccgatggacactgtctccgaggccgctatggccgcggccatggcatcactcggcgccgccgctgtcgtgcactgcaacaccgatccccacgctcaggccgccatcgtccgcgctgccaagtcccgccgccttcccttcgtttcctccgtgccctttttctccccgtcctccgccccgacgctcaacgatttcgctggcaccgagtacgccctcgtcaccgagcgcggagattcgctctccaggctcgtcggcgtcgctgtcgcggccgatgctgcctcccgcgaggttcccgtctctgtctcggagtacatgcgaccgacgccgcgctcagcctccgccgccttcgactttgaggaagcagcaaccttccttgccgatgagggtctggattacgcccctctcgtatcagatgatggtgaggttgttgatctaatcaccgccaaggacgtggagcgcatccggagctatcccaagctgggcaagccgtctcttggagccaacgggaagtttgtagttgcggcttccattgggactcgtgaagatgacaagggaagactggagcaactagttaaggcgggggcaaatgctatcgtgattgatagttcacaggggaactccatataccagctcgatatgataaagtttgcgaagaagatgtatccggaggtggatttgatcggtggtaatgtggtgacaattgcacaggcccagaatttgattcaagctggtgtggatggattgcgtgttggaatgggatcgggctcaatttgtaccacccaagaggtttgtgctgttggaagaggacaggcaacagcagtatataaggtttcatcttatgccaaggatcacaatgtaccggttattgctgatggtggaatttcaaactctgggcatattgtgaaagctctgtcgctgggggcatccactgttatgatgggcagctttttagctggtagtcatgaagctcctggtacttatgagtataaggacggccgccgagtcaaaaaatacagaggcatgggctctcttgaagccatgacaaaagggagtgatgcaaggtaccttggtgatacactcaagctcaaagtcgcgcagggcgttgttggagcagtagctgacaaaggttctgtactgaggtttattccttacacaatgcaagcagttaagcaaggattacaagatcttggtgcagattctctccagtcagctcatgatcttttgcggtcagagacactcagattagaggtgagaaccggtgctgcccaggctgaaggaggtatccatggactggtttcatacgagaagaaggcattctaggtccataactaaacaaagaagtattggaacgatagtggttagctgcatgatatggaagggggcgatgctcatttatcctacctggcaaaagctcagcagcttgtcagcaaagcttgtcgagttgggcagcaagtgtaccatctgcttggcgtcatataataataaacctctggcatcggaactgttgtataagctcacagcttgtcatctaaacatttttcccaattttgttaaaagagtaaaacatcaatggttgattgatctactttgccgcgccatgttttaacctaccacaatgccgtaccttgtattattatgtgttcgaagaatggttgatgatagtggtttgtctctaaagttgtcatcctggctagtgtgctgacccgaatgtggtttagatttgaattgctttagacccgacaaaattttagcaggctttcactatga

SEQ ID NO: 96232 - DNA, 314 bp, Zea Mays
aggttatccatttggcgtcacagaagctatcaagttgggccatccttcagcgagaggagctgcgaccgttggttgtggagggttcgcgactcttggtgcgaacgaccacggtctttttttcccgggtgcatgggtggcgatctagtcttcggattgactgtcgctagcttggggaagctgctgcgtttatgtttgtttttttaggttggctatgtgcattaggcagagaccagaagtttgtgtaccaagactatgtatcttcttgatgtatcgctcttggtaacctttaatataaagcttcccttatcgaaaaa

SEQ ID NO: 96233 - DNA, 557 bp, Zea Mays
agagtttattcaataaataggtcaagctcataaaagatccaacaatatccggacattagggtcccgcgaatgcgacggttcgtggcgcagcaagtcatctggctgatgacgagttcgggcggaggcggtgaccacagcggcgggtacgttcagctcctcagggaggtgggcatgaagcggctgctagaatccatcgctgacaccacgtcggagctggagtgctaccacgttttctcaggaagcgtcggcatcagcaagcaccgttttagcttctccgccatcgtgggctccgcgctggagctgatcgccggcagcggtgacggtgatggagcccgagctgaagactgaaaggttgcatggaattatggaaatacataaagggcagctgaagtctgcactcatttttccgtatcttttattacatccaaattcgcagaatgtaaaaagaatacaagaagtatgaaaattacaagggacaccgggtagaatttaaagttttgtacagagagagacttgcatgccatgccaaacgaggatggtttcatcaagtagagaat

SEQ ID NO: 96234 - DNA, 1664 bp, Zea Mays
atgcccacaaacagagtcacagaaggcgatcacgcaaagcagcagactgatcgggagcagcgctggaagatcggcaggctgctcaactggatgcaggtgctctccgccctggcctgcgtcgtgctctcggtgatgcgtctctggaagcaggacttcggcggccgcgacagccgcaacatgaggccggcgctcctgctcttttacaccctggcgctcgtggaggcgtcgctcttcctgttcgagaaggcgtactggacgtggaaggtctccgtctgcaagctgctccaccaggtgagcgccgagtgcgagctgggcccgtacgggctcgtctccctcaagcgcttcttctacgacgcctactcgcggtgcatcgccgggagcatcttcgacggcatcaagatggacctcgtcaccttcgccgaggacctcatcctctcggacttcctcgacgagcagatcatcggcgtgcgcatcctgcagcagttcgccaacagcgagcgctccgcgagcgacacgctgcgcaaggtcggcaccaccccgaggtccatcgaccggctcgtcgagatgctcaactggaagcgtaccgaagaggatgaggtgcgactgtgcgccgccgagatcgtgtccaaactcgccagcaagcgtcagaacgcgctccgcgtgtccggcatccctggggccatcgagtccgtcacgtccctgctctacaccgccacgagtccgcccgtgtccggaacgcacccgcagctgccctgtgctcccgccgagcacggagcctcaccgccggcggccagccgcggctacgaccacctgcagttcaacctgctgggcctgctcatcctcaaaaggctcgccagggaccacgacaactgcggcggcaagatcggtaacgcgcgaggcctgctcgccaaggtcatcaacttcacgcaggcgtcgcgggctctcctccagaacccgcacgtcaccgactcgcaggtgcgcgccatgaagcgcgcgctcaaggtggtcaagatgctcgtgtccacgacgggtagcaccgggaaggcgctccgggagagcgtcgcggagaacgtcttcacggtgagcaacctgcgcggcatactgcggtacgggcagcagcacagggagctgcagaagcttgccgcggacgtgctcactgggctggctatgcacgacagcggcaaggaggccattgtggccaccggaggcgtcgtcaagctgctgctttcaatattcttcaatgcccaagacacggaactcgtcgcgaggccggcgaagcgctggcgatgctggctctggagagcgaggccggatgcgcggcgatactcaggcagaccgacgtgctggaccagctcgtgtcggcgttgcaggacggcgacgcacggcggcgcctcaacgcggcgagggtcctgcggaacctgtgcgcgtactcggggcgacagcagagggagcggctgcgcgtggtgaccaaggccttgccaacggtgctgaacgccaccaaggtggacaaagatagaatactcgaggtgtccgtcggcctgacgacggagatctgccagttaatcgacggcgagcagtttgccgccgagctgcgcggcgccggtgtggcggacgaacgcgcatacgtggagcttctcgcgaacatcctgcggcagtacaggtat

SEQ ID NO: 96235 - DNA, 443 bp, Zea Mays
tttaacgtggaaaacccctctaaagcgaaggggaaaaaccacgggcgccggccagcaacttttcactattttcgggtggttatagatcgcaggagatttacaattgagataattatctcctacggcttacaaagatatttatagaggtgaaaccctaaaatgagtagggaaacgatctgtatggcccaggcctcccggcgacgggcctccgcttcgctcgccaacttggtcgccttcttcagaatttggatcacaaactcaacagaagtcgcttgccgctttctcaaacacggcccgccggagggcgaatagcgcgagccgcttctcgggcggctcccggccgtcgccccctccggagctgccgcgcccgcttccgctgctgcccggcgtccgctcacgccacgactcgaagaaggacgccgagtcggcggtgcctccggtcc

SEQ ID NO: 96236 - DNA, 249 bp, Zea Mays
atgggctctcttgaagccatgacaaaagggagtgatgcaaggtaccttggtgatacactcaggctcaaagtcgcgcagggcgttgttggagcagtagctgacaaaggttctgaactgaggtttattccttatacaatgcaagcagttaagcaaggattcctagatcttggcgcagattctctccagtcagctcatgatcttttgcgatcagagacactcagattagaggttttaacatcaattgtctaa

SEQ ID NO: 96237 - DNA, 920 bp, Zea Mays
actcccttccctccatcggtccatccatcctaacagaactaggacgcgcacgagacgaaaccgccgccgtcccacatggccgactccggcgccctcgtcgtgacggaggcgcaacagcaacacccgctgagccagatcgcggcgagcgagacgcaccggctgctgctcaagcagtgggtcaaggaggaggacctgctggcgcgccgcgtggcgctatgggaggcctgcctcaacggcgcccgcaaagagatcgccttcctctactgcgccttcttcgccttccacgccgcttccgtgctgctcctcttcctctcctcctcctcctcctccgctgcctcggcggcagcgacaacagcatgcagacggtcgtggatcccctaccttgtctcgctgctctcctcgctcaccatgctctgggcgctgtggtacaagtccgacacggaggccgtcctggagcgcgtcctcgcgcgagagcgcgaggatgcgctgtacctggccaggtgcgtctccgagctcaagcgcaagggcctccgcttcgacctgctcaaggaggtggacacactgcgcagggccaagaaccttcgcgctgaggccaagggcgcagcagacaggcccaggaggtggcagactagggacctggccgtcttcgcgctcttcgccgccgcctgcggggtgctcgtgctcaccaggttcttgctctgcaattagccaggtcaggtggggaagcgatcagcacgtgttgcttgccttgccttcttggcctcttctcctccttgttcattctgggcagaattgtttttctgcgaattttggtgctggttttatctatttgtaataataataaggaaatgatctgattgtaacagagagtaaatgctctcggtattatgaatttacgatgatacctattaatgttaatg

SEQ ID NO: 96238 - DNA, 425 bp, Zea Mays
aaccctaaacccccaatccaccaatggcgtcgagcagcacctaccttgccgacgacggcttcgcggcgcctcttctcgtagggagtatcctacacatacgatgacgtcatcttcctcccgggctacatcggcttccccgccgacgccgtcgacctctccaccgcctctcccgccgcatcccgctatccatcccctgcgtcgcgtccccgatggacactgtctccgaggccgctatggccgcggccatggcatcactcggcatcgccgccgtcgtgcactgcaacaccgagccccacgcccaggccgccatcgtccgcgctgccaagtcccgccgccttcccttcgtttccgccatcgtcgtgcagctggttctacgcagccttttgagcaaaaatgcttgtgatccgaacgtggttcaaatttga

SEQ ID NO: 96239 - DNA, 537 bp, Zea Mays
aacatgcagagtggatttcttttgtgcaggtagctgagctcgagaatgggaactcaaaagctaatattcatggaaaaaatacggtcattaagtgagatactatttagacctgatgttggtggtttatcgcaggaggggcgagaagattcagattatggcgatgaaatggaattggatgagacaacggtatctggtcattgaagccgagagaatgatcaaggtgtcttccagggtacttcaagtttctaatttcatcaaagagaggatcaaaccaatgaacgcaccgatgagaatgagtcatttgagtctgttcaaaaagatgatttttttaggtattctttttttcctttattcttaacatttctttttgtatctaataacgtgcatgtatttaatgctattggcctcttgcatggattttcacaaattgttcaaattgcgcaatgcagttagatgttgccattgatataaaacaaagatatgttgcacactgcaatgtaggaccaaatataaaacaagccagttttcttggtgagc

SEQ ID NO: 96240 - DNA, 1171 bp, Zea Mays
ggccttcaagcttccgaaagcaagagatatttatttgttaaatctggaagcaaaaatacaaggtttatattctacctggacatattaaaacaaaacaaggaacttgctgttttgacaccttgtgtgtatggcgttgatacaacacctagtcattgtggaaatcatgtctttatgaagagacggagtgatgaattgtataattctgaattggttgcttgtccactggataatgttgctgagatcacttctcctgaccactgctctagccctgagttgcaggacctgttgcatacccgacaacagatgttacaacaggtacagatgcatttgcagagagctcaagttcggatgaaacgccaggctggcaaaggaaggatggaacggtccttcagtgtgggtgatcgagtgtatgtgaagctccagccatactgccagtcatcagcagccgagagagtgaaccacaaactggcgtttaaattctttggccccttaagcatggtcaggaaggttaacccggtagcgtatgaagtcgctttacctgaaggaagcaatgtgcaccctgtctttcacgtatctcaattgaagtcatttgttcctgcaaatgttatttccagctcggttttaccagctctgactccagactaccagatccctgaagaggttatggactcacgactgcaacgaagggcaggcaaggaggtacctcaactgctggtacgttggactagttggccgccatctctggccatctgggaagatgagcactggatcaaggagcaatttccaagggcgccagcttggggacaagctgtctctgaaggaggaggagatgtgaacgacgctggtattcaggatggcatgggtaaagctactcaagggggcgcgggagaatcaccagcaggaggcgagggcgacgctgttccagcagctcaggcgcggcctgcggaccacaaggcccaacaagaggaggtgcacaggccttgagtgggtgaattagacctatgactatgtatcgtggctccactatatatgggttgttcgtagacagggagagggtgtttttttggctgtaagaactcaggcggcggcggcgatccgaggtgatcgtcttccgaatcggaccgtactttccacaccaccataatcaagcgtgtgctccgtcttaatccta

SEQ ID NO: 96241 - DNA, 648 bp, Zea Mays
cgctagcctctggccatggcgttcaagttctgctcggctcctccggccaggctgccgcgctcacctccgtgagatattccagcgccgcccgtgcttggagaagaagatcctgccgcccgaccgcttttcctcagatgtttgtcgccggtcgccgccatccctgttctttttatatgcgcggcagcagcacccagggagccggactccaccgttttcttctccagccgcgcatctctgctctactcccacaagctcgtcctccgctcggcctcacccacccgctcctccatctccgccccttgctggctgtgaacgacgctggtattcaggatggcatgggtaaagctactcaagggggcgcgggagaatcaccagcaggaggcgagggcgacgctgttccagcagctcaggcgcggcctgcggaccacaaggcccaacaagaggaggtgcacaggccttgagtgggtgaattagacctatgactatgtatcgtggctccactatatatgggttgttcgtagacagggagagggtgtttttttggctgtaagaactcaggcggcggcggcgatccgaggtgatcgtcttccgaatcggaccgtactttccacaccaccataatcaagcgtgtgctccgtcttaatccta

SEQ ID NO: 96242 - DNA, 261 bp, Zea Mays
atggctgattcagttaaattcagaattggacaaagtgatatttgtgtcctgtgcttgtgtgccagcgaggtcagtgaagctcttcgagttgtccgttctatttctaccgttgttggttgctcagaacgtggtcacgctgcttgctgtagttcgggggtcactttggtgccatcaccgttgtctgcgttgcaccgccttggccgatccggcgccggctcgccggtgttcccgtgcggccgtgtcgtggaccggagtttgtga

SEQ ID NO: 96243 - DNA, 2006 bp, Zea Mays
agttttaaattttcgaatatttttaagcaaagatgaaaagccactctcgtccctggtggagtcgaccgatcgagctagatctccaggactcacctccccaaccgtttgcctccgtctcgcgtgacttcattcccagcggccggcggcgacctccacgtggtgccattcgccggcaacgagcacccgcccaccaggatccaggtttgtgctgcgagagggcctatccattcaccatgattaatttcgtgctcctgatcagccgccagggcaaggtgaggctcaccaagtggtattctccttacacccagaaagagaggaccaaggtcattcgcgaactcagtggactcattcttacacgagggcccaaactctgcaattttgttgagtggagaggttacaaggtcgtataccggaggtatgctagcctgtatttctgcatgtgcattgatgccgaggacaatgagcttgaagtccttgagatcatccatcatttcgtcgagatactggaccgctattttggcagtgtatgtgagttggatttgatattcaattttcataaggcctactacatactggatgagattctcatcgctggtgaacttcaagaatctagcaagaagaatgttgcaagacttattgctgcacaggattcattggtcgaggctgctaaagaggaagccagctccataagtaacatcattgctcaggctacaaaatgaagttcttcatgcctgcccccccttccctctatcttgttattgttgtaaaagcaactgtaatgcactggactgtgagtccatttgctctgctcatgtttatggatttcaagactccaggttatttagaatgagcgtgatgtgtaaactacattgcatgtgttcccgttgcaagtaaaatcatgacctcgttgattgtctgttgtgttctccaatctctgaaaatcgctgcaagttgtcagtgttgtgatgccctcctacagtcctacttatttgcaaatctggggttgaatcactctgttctttttcttcccttgtcatttttgttattatcttctctggcaatgaaaaacattgttgattcctgtcatgtacaattaacaactggactgattctttctattgtcgtttgctctatcagtctggtctacatacaggatcccattctgtcctgtagtttaccatcggcttgaatcaacatcaccctatgtagtcttgcacaataagcgccatggaaacgaatgaggcggagaggatcaacatgtttagcaggagcggcttggctgtgtatcagatcgtcacattgcacatgcgttggcgatcccctcctgcgtgaccagtgcaaagccaccttccaccatactagggacgattagactgaggccatggctgctgccatcgacgtcctgctcatggtcgacgaagattgacaccttccctttgtcggtagcctgaattcctaatgaatttgtttctttatgcttgtttctggcctccgtaaggagagctagtgtactatgtattatatttctcttcttaatataattaaaggcgcagtttcctgcgctttcgagagaaaaaaaagatcgacaccttcccttgtccatcgccaggtgctctgcaaccgatctgtggctggggctgagttcgtaggatgtggagccgggagcatcgttggatcatgaaaggaggcactggatttgaagtgctcacatgaatatctagccattgtaagcacatgatacgttgcctggaaaataatcactgttgtgctttgtgtgaaacaaatgttagacagagcaacaccgcattcctactgtcacaaggtttgtggttttgtcgcactttggagtggttgtcagaagctacatgcgtctaaatggaaggaggaagctgaactggaatcctggtctgtccaagcaatcggtgggcgatgcaaggctgctagtaccagaggcgcaggcgccaggatccagcaaaaggagcagcagaagcaagcaaggaaagtga

SEQ ID NO: 96244 - DNA, 845 bp, Zea Mays
acgcacttgcctttcattcccgctgtgcggaagcggaaccgaccaccgcaaaccctaaggtaagctatttgcatctggatctgacccaattatcacgcacgcatgtgttacgcccacgcaggatccaggtttgtgctgcgagagggcctatccattcaccatgattaatttcgtgctcctgatcagccgccagggcaaggtgaggctcaccaagtggtattctccttacacccagaaagagaggaccaaggtcattcgcgaactcagtggactcattcttacacgagggcccaaactctgcaattttgttgagtggagaggttacaaggtcgtataccggaggtatgctagcctgtatttctgcatgtgcattgatgccgaggacaatgagcttgaagtccttgagatcatccatcatttcgtcgagatactggaccgctattttggcagtgtatgtgagttggatttgatattcaattttcataaggcctactacatactggatgagattctcatcgctggtgaacttcaagaatctagcaagaagaatgttgcaagacttattgctgcacaggattcattggtcgaggctgctaaagaggaagccagctccataagtaacatcattgctcaggctacaaaatgaagttcttcatgcctgcccccccttccctctatcttgttattgttgtaaaagcaactgtaatgcactggactgtgagtccatttgctctgctcatgtttatggatttcaagactccaggttatttagaatgagcgtgatgtgtaaactacattgcatgtgttcccgttgcaagtaaaatcatgacctcgttgattgtctg

SEQ ID NO: 96245 - DNA, 1654 bp, Zea Mays
agttttaaattttcgaatatttttaagcaaagatgaaaagccactctcgtccctggtggagtcgaccgatcgagctagatctccaggactcacctccccaaccgtttgcctccgtctcgcgtgacttcattcccagcggccggcggcgacctccacgtggtgccattcgccggcaacgagcacccgcccaccaggatccaggtttgtgctgcgagagggcctatccattcaccatgattaatttcgtgctcctgatcagccgccagggcaaggtgaggctcaccaagtggtattctccttacacccagaaagagaggaccaaggtcagtaccctacactgctctgtgtgataactcgtgtaattcagttccggggttgctttattcatcagtggcagagtggcagtgggtgctaatttctgcagtagttaaggctatgcatgctagtttgtgtcaggactttgcagtcatgacttttgttcccaacaaatcgatgaacattagaagtgaatgaatagttgccgttttgtaacaagtttgacgtacacggttgccaacttccaaagctatatcttgatccagcatacatgtttctgtatagattgtgatgaatgtttttttttgttatgtaaacttgaatatgtgttaattcttgttgttttccctcttgttgtatttggtatacattcatctgaacaaattcccatttctcctactcgttgcccccttccttgtttattcctctaatgtgttgctgccttgctgggtaacaagtgagtgcggccccatgtattttctcatcaatttgatgaattcgtacagaacttactttagtacaatagactgttggaagggagttcctgtcttccatcaaatattatgctttttactggggtacctggttaaaagtacccatggatgttttgtttctttcaaactttaatagcttcatataattcccaaaaaacaagttttctagcggtatctattaaataacctttctttgtgaggcgtattgccgcatgcttgtttattaagtttgctactcatgttcaaaaaggtcattcgcgaactcagtggactcattcttacacgagggcccaaactctgcaattttgttgagtggagaggttacaaggtcgtataccggaggtatgctagcctgtatttctgcatgtgcattgatgccgaggacaatgagcttgaagtccttgagatcatccatcatttcgtcgagatactggaccgctattttggcagtgtatgtgagttggatttgatattcaattttcataaggcctactacatactggatgagattctcatcgctggtgaacttcaagaatctagcaagaagaatgttgcaagacttattgctgcacaggattcattggtcgaggctgctaaagaggaagccagctccataagtaacatcattgctcaggctacaaaatgaagttcttcatgcctgcccccccttccctctatcttgttattgttgtaaaagcaactgtaatgcactggactgtgagtccatttgctctgctcatgtttatggatttcaagactccaggttatttagaatgagcgtgatgtgtaaactacattgcatgtgttcccgttgcaagtaaaatcatgacctcgttgattgtctg

SEQ ID NO: 96246 - DNA, 867 bp, Zea Mays
agttttaaattttcgaatatttttaagcaaagatgaaaagccactctcgtccctggtggagtcgaccgatcgagctagatctccaggactcacctccccaaccgtttgcctccgtctcgcgtgacttcattcccagcggccggcggcgacctccacgtggtgccattcgccggcaacgagcacccgcccaccaggtacgcacttgcctttcattcccgctgtgcggaagcggaaccgaccaccgcaaaccctaaggtaagctatttgcatctggatctgacccaattatcacgcacgcatgtgttacgcccacgcaggatccaggtttgtgctgcgagagggcctatccattcaccatggtaagttcccccttctcccccgtgatcttatggtctgagcccttgtgtttgcgccaggcgcggctgttcgtgcgggttcctgtggatggcggtcacgatctagcacttcgctgcatcttgattgaaatctgaagccttttctgcgcgattttgtagattaatttcgtgctcctgatcagccgccagggcaaggtgaggctcaccaagtggtattctccttacacccagaaagagaggaccaaggtcagtaccctacactgctctgtgtgataactcgtgtaattcagttccggggttgctttattcatcagtggcagagtggcagtgggtgctaatttctgcagtagttaaggctatgcatgctagtttgtgtcaggactttgcagtcatgacttttgttcccaacaaatcgatgaacattagaagtgaatgaatagttgccgttttgtaacaagtttgacgtacacggttgccaacttccaaagctatatcttgatccagcatacat

SEQ ID NO: 96247 - DNA, 85 bp, Zea Mays
cttcaatatctcttatctcctacttagaaaaatatgtatatccactatttgtagtattaatctggtgtgcccacaacgtatttgt

SEQ ID NO: 96248 - DNA, 734 bp, Zea Mays
tccccaatctcctcccagcgatttgccttgccgaggtcgccttgccttgccgctgttcccgagcgcgacgccgcgccgcccctgccctgctaggctgctacagaggaggagaaccccatattttcccacccccccaatggcaacgcgcgcgccgccgcagtcttcttcgaccggatccgtgacggtgacgatcgacccgtccccctcgtcgtcgtcctcctccgccccgcccgcgtcggcgccggccccggccccggctcctgagtcggtggtgctgcgcctcaagcgccgggccaagaagaaggtgtcgtggaaggaggggacggtggacaacgagggcctcggccgcaagagctctaagaagtgctgcatattccacaaggaggtccccttcgacgaggactgcagcgacgacgaggcccccggcggcggcggcggccaccggtgccctcgccctcatggtgacgccggcgaggggaccagcggatgctcgtcttcttcccacgaccatggccaccactgatctccgtgcgtgttactcgttcttctctatcctccttagagaaatggttgcacaaatcatgcaaaatggagggcaattttgttcatccatgggcaactactactcacagttacaactagggctggacaaaatacccgtggtcagctcgactcggttcgtttcaattttgtgacgagctgagctagcatctcagctcggtttgttaacgagc

SEQ ID NO: 96249 - DNA, 1613 bp, Zea Mays
cacgaacgacagatggaatcggccagggctgcggcggaccaggcggcgggtctggacgtggacaagctgacatacgagatcttctccatcctcgagagcaagttcctgttcggctacgacgaccccaagctcttctcgccggcctccgcgggggcctcgccgtcgccgggagcggcggcggcggccgccgcgtcgtccaaggtctgcatactgtcgatcgacggcggcggcggcggcgggcgggccgccgacgggctgctggccggcgccgcgctggtgcggctggaggcgtcgctgcggcggcgcacgggggacgacggcgccaggctggccgacttcttcgacgtggccgcggggtccggcgccggcggcgtgctggcggccatgctcgtcgcgcggggcgccgacggccgcccgcgcttctccgcggacgacgcgctcgcgttcctcctgcgcagcctccgccgcggctcgggcggcctgggcctgggcctgggcctgcgcgcgctgttcaagtccctccgccgcccgggcggcggcgccgcggcggcgttccgcggggtgttcggcgacctgacgctgcgggacacggtgcggccggttctggtgccgtgctacgacctgggcacggccgcgcccttcctcttctcgcgcgccgacgccgtggagacgcgcgcgtacgacttccgcctccgcgacgtgtgcgccgccacgtgcgcgggggactcggtggaggcgcgctcctgcgacgggtccacgcgcatcgccgcggtcggcggcggcgtggcgctcgccaaccccacggcggccgccatcacgcacgtgctcaacaaccggcgcgacttcccgctcgccgccggcgtcgacgacctgctcgtcgtctccatcggcagcggcgaggccgaccagcggggcgccgcctcctccgcgtcccagatcgtcaggatcgccgccgagggcgtcgccgacacggtggaccaggccgtggccatggcgttcgggcataacaggacaaccaactacatccgcatacaggcgacagggacgccgcgaggggcgagccgtggcgccgccgcggaggcggaggagatgctggcgcagaggaacgtggagtcggtgctgttccgcgggaaggtggtggcggagcagaccaacgcggagaagctggagcggctggcgcacgagctggtcaaggagcgcgaccggcgcagggccagcgccagcgcgagccccgccgcggcggcgcctgcgctcgtcaagcaccaccggccgtcggcggcgccgtcgtactcgagcctcgtcagccacaccctcgcgagcatcatgtaggccgagagccgacccacagccggccgccagcagccaacggaatgggcccaactgtgagagaccaggtgtctagcctgctactgcgccatgtgcattcttcagttttgtatacgtactaaaaccgcagggcatgttgtgtagtgtagcgtaatccggcgtatcctcagctcggctgtatgtttgtatgtatctcgagaaagaaaaacggcttgtgagtttgagcagcagagctctgagcctctttgctctggacaaaccaaccaacaaaccaaccaaccctggat

SEQ ID NO: 96250 - DNA, 1523 bp, Zea Mays
gccttttgttttgtttcctatttcctttccttctcgtgtagcttttcggccggcgaccgcgacctgaccgtccgccactgcgcacctgccggcgtctgggcgacgccccgccgccagcctgccaccaccacgacgcctgcaccggaatccgacactgtctcaaccactccgtcgtgcctatccgaagctcaacggcggagcccggtgggatagggcggaggcgctgaggcctgagggggagactggacctgggctgcacgaggtaggctgtgcggtggcggaaggaatcaccgatgagcgatgcgcaggcgacaggggatggtccgcgctgcgttggctgcggcgggcgcgtgaagacgctcttcgtgcagtactccccgggcaacatccgcttgatgaaatgcgataagtgcaaggctgttgctgatccctacatcgagtgcgagttcatgatcatcttgattgatctcgtcctgcacaagacaagggcgtaccgccatgttctgtttaataagctgagcatgggatcatccgttgacaagggaatactttaccggtctactttgatacacattgctcttgacacatgtatccttagaattcataatttttttctttgatttggtttactataaactgtctgcccaacttaagcagtccatgactatgtaatgtaagtcagaatatctttttcgaaaggaaacagagctggtggggcttcttccaggagcattttctcaacagtttccaattgcactgaggttgttggcgatgcattattgggaaacatcgtatttatattcatgttactcctgggagtgcgattttttctcaaattatctttcgatattataaggtatagggatattctgttcgctgtcatcatttcaagctacttcaagttgtttcttttcacaatgatggtttgggagtttccgtcatctgttatattcattgttgagatgtttgttctctcatcaaacgttgtagccctgagagttgtctcgcagtttccaagagcccactgtttcgcggtctgcttactagcgcacgcagcaaaatacttgacccagcgatggatccttggaacgccatgagagcctgaactcgtacagatcaatcatcctggtgcttccagcgacgtctataggtatactgtggcctgatgatgagctctggtttctatcgagttctttgactgtgttgccttgtctcctccaccccctctccctgtgactgtgagtactatcttcaatgtacttgcggcgaagacggatatggcatctttactcataggcagtagctgttgagtgttgtgtggttggtacttggtcccttgacccaaccaccggcctactactacgtagcatctgcggcgtctcctgttcacgaaagaatgcagcaaaggaaagacctactaggctattaccatcgtgttcttctttggcggttctgtcaacattacctgtgaactctcgtttcctggctgcagctgcagatgtgctccagtggagcctaccgct

SEQ ID NO: 96251 - DNA, 1386 bp, Zea Mays
gccttttgttttgtttcctatttcctttccttctcgtgtagcttttcggccggcgaccgcgacctgaccgtccgccactgcgcacctgccggcgtctgggcgacgccccgccgccagcctgccaccaccacgacgcctgcaccggaatccgacactgtctcaaccactccgtcgtgcctatccgaagctcaacggcggagcccggtgggatagggcggaggcgctgaggcctgagggggagactggacctgggctgcacgaggtaggctgtgcggtggcggaaggaatcaccgatgagcgatgcgcaggcgacaggggatggtccgcgctgcgttggctgcggcgggcgcgtgaagacgctcttcgtgcagtactccccgggcaacatccgcttgatgaaatgcgataagtgcaaggctgttgctgatccctacatcgagtgcgagttcatgatcatcttgattgatctcgtcctgcacaagacaagggcgtaccgccatgttctgtttaataagctgagcatgggatcatccgttgacaagggaatactttaccggtctactttgatacacattgctcttgacacattcagaatatctttttcgaaaggaaacagagctggtggggcttcttccaggagcattttctcaacagtttccaattgcactgaggttgttggcgatgcattattgggaaacatcgtatttatattcatgttactcctgggagtgcgattttttctcaaattatctttcgatattataaggtatagggatattctgttcgctgtcatcatttcaagctacttcaagttgtttcttttcacaatgatggtttgggagtttccgtcatctgttatattcattgttgagatgtttgttctctcatcaaacgttgtagccctgagagttgtctcgcagtttccaagagcccactgtttcgcggtctgcttactagcgcacgcagcaaaatacttgacccagcgatggatccttggaacgccatgagagcctgaactcgtacagatcaatcatcctggtgcttccagcgacgtctataggtatactgtggcctgatgatgagctctggtttctatcgagttctttgactgtgttgccttgtctcctccaccccctctccctgtgactgtgagtactatcttcaatgtacttgcggcgaagacggatatggcatctttactcataggcagtagctgttgagtgttgtgtggttggtacttggtcccttgacccaaccaccggcctactactacgtagcatctgcggcgtctcctgttcacgaaagaatgcagcaaaggaaagacctactaggctattaccatcgtgttcttctttggcggttctgtcaacattacctgtgaactct

SEQ ID NO: 96252 - DNA, 2223 bp, Zea Mays
ttttagcctttttttaaaaaattttgtaggctaggcccacaatactgcagaactaaacactgctcagctgctctcggctctcgcgcctgcctgccctagccgctcgcccggtcccactcccgcataggcgccgccgccgctacccgctacccccgcagccggcactcggcaggttcttcccctggcatccggcactcggcttcttcttgccccggctcccggcgcggcggcgcccgctcctcctccccccgctcgcccgctgcaggtcctcccccgcggcacgcgcccgctgctgcagcctgcagctcccaccccaactggcgattgcagctcctccggtcctccccctgccggcgccgcctgcgagctgcacagctgcagctccccccctggctggcagagctgcagcttcaactctcttgaaggcaaaagaattgaatcgcactctgttgatgggcagcttgcatgctctgcgggcgccgacgccgctcgttgggagcactaggattggcttcagttcggggctccgcttttgctccaacagagtcctcagagggttaactcccattggcgcgatgaagtcgtataggctatcggagctcagcgacaccgaagttagcggcctcaaagctcgtccccgcatcgatttctcatctatttttggcacggtgaatccaatcgttgaagatgtccgtgtgagaggtgatgcagcagttaagcactacacagaaaagtttgacaaggtcatgcttgatgatgttgtcgtctgtgttagcgatcttccagatgcagagcttgatccagctgtgaaggaagcctttgatgttgcatatgacaatatatatgccttccatgtttcacaaaaaatacctgagaagacagttgaaaatatgaaaggcgtaagatgtaagagaataactagatgcattggttctgttgggctgtatgtcccaggtggcactgcagtcttgccttcaactgcattgatgcttgctgtgcctgcacagattgctggatgcaaaactattgttcttgccacaccacctagccgtgatggtagcatatgcaaggaggttctttactgtgcaaagaaagctggtgtgacacacatattgaaagctggaggagctcaggcaatctcagcaatggcatggggaactgcatcttgcccaaaggctgagaagatttttggacctggtaaccagtatgtaacagctgccaaaatgattcttcagaacagtgaagctatggtatctatagacatgcctgctggcccttctgaagttttagtcattgctgataaatacgcgaacccagttcatgttgctgctgatctgctatcccaggcagaacatggcccagatagtcaggttgttctagttgttgctggagatggtgttgatctgggtgccattgaggcagaagttagcaagcagtgcaacgcgcttccaagaggtgaattcgcttcaaaagcacttagccacagcttcactgtgttcgcgaaagatatggttgaggcgatatcattctcaaatctgtatgcccctgagcatttgatcatcaacgtaaaggatgctgagcagtgggaggagttcatcgaaaacgcagggtcagttttcttgggccaatggaccccagagagcgtgggcgattatgcgagcgggacgaaccatgtccttccgacctatggttacgcaaggatgtacagcggtgtatcgctgaactctttcctcaaatacatcactgtccaatccctaacagaggaagggctgagaaagctggggccgtacgtcgcgaagatggccgaagtggaggggctagaggcgcacaagagagccgttacccttaggctgcaagaggttgaggccaatgtaactgtctagccgctgtccatggtctattgcaacgttcagactcgatgtgggatgctggagttcttccctaggaacctaggggaactggactattgatgtcttccaaacaggctctggaatgttagaaagaggcgtttcaactggtgcagctaataatgttcattggaccctgatttgtttcacgaataaacttgagcagaacttactgtgtatatatgcagtgttctcgtattagttatttccctagttgcttctgtaccgattttttggattgcgcatatgcatctaatgtgcttcgtgacatgtatgtgtgaggttttgatggaaaataaaaaaaatggcatcgagc

SEQ ID NO: 96253 - DNA, 2195 bp, Zea Mays
ttttagcctttttttaaaaaattttgtaggctaggcccacaatactgcagaactaaacactgctcagctgctctcggctctcgcgcctgcctgccctagccgctcgcccggtcccactcccgcataggcgccgccgccgctacccgctacccccgcagccggcactcggcaggttcttcccctggcatccggcactcggcttcttcttgccccggctcccggcgcggcggcgcccgctcctcctccccccgctcgcccgctgcaggtcctcccccgcggcacgcgcccgctgctgcagcctgcagctcccaccccaactggcgattgcagctcctccggtcctccccctgccggcgccgcctgcgagctgcacagctgcagctccccccctggctggcagagctgcagcttcaactctcttgaaggcaaaagcttgcatgctctgcgggcgccgacgccgctcgttgggagcactaggattggcttcagttcggggctccgcttttgctccaacagagtcctcagagggttaactcccattggcgcgatgaagtcgtataggctatcggagctcagcgacaccgaagttagcggcctcaaagctcgtccccgcatcgatttctcatctatttttggcacggtgaatccaatcgttgaagatgtccgtgtgagaggtgatgcagcagttaagcactacacagaaaagtttgacaaggtcatgcttgatgatgttgtcgtctgtgttagcgatcttccagatgcagagcttgatccagctgtgaaggaagcctttgatgttgcatatgacaatatatatgccttccatgtttcacaaaaaatacctgagaagacagttgaaaatatgaaaggcgtaagatgtaagagaataactagatgcattggttctgttgggctgtatgtcccaggtggcactgcagtcttgccttcaactgcattgatgcttgctgtgcctgcacagattgctggatgcaaaactattgttcttgccacaccacctagccgtgatggtagcatatgcaaggaggttctttactgtgcaaagaaagctggtgtgacacacatattgaaagctggaggagctcaggcaatctcagcaatggcatggggaactgcatcttgcccaaaggctgagaagatttttggacctggtaaccagtatgtaacagctgccaaaatgattcttcagaacagtgaagctatggtatctatagacatgcctgctggcccttctgaagttttagtcattgctgataaatacgcgaacccagttcatgttgctgctgatctgctatcccaggcagaacatggcccagatagtcaggttgttctagttgttgctggagatggtgttgatctgggtgccattgaggcagaagttagcaagcagtgcaacgcgcttccaagaggtgaattcgcttcaaaagcacttagccacagcttcactgtgttcgcgaaagatatggttgaggcgatatcattctcaaatctgtatgcccctgagcatttgatcatcaacgtaaaggatgctgagcagtgggaggagttcatcgaaaacgcagggtcagttttcttgggccaatggaccccagagagcgtgggcgattatgcgagcgggacgaaccatgtccttccgacctatggttacgcaaggatgtacagcggtgtatcgctgaactctttcctcaaatacatcactgtccaatccctaacagaggaagggctgagaaagctggggccgtacgtcgcgaagatggccgaagtggaggggctagaggcgcacaagagagccgttacccttaggctgcaagaggttgaggccaatgtaactgtctagccgctgtccatggtctattgcaacgttcagactcgatgtgggatgctggagttcttccctaggaacctaggggaactggactattgatgtcttccaaacaggctctggaatgttagaaagaggcgtttcaactggtgcagctaataatgttcattggaccctgatttgtttcacgaataaacttgagcagaacttactgtgtatatatgcagtgttctcgtattagttatttccctagttgcttctgtaccgattttttggattgcgcatatgcatctaatgtgcttcgtgacatgtatgtgtgaggttttgatggaaaataaaaaaaatggcatcgagc

SEQ ID NO: 96254 - DNA, 2876 bp, Zea Mays
ctccgcctcttatcctctacggccctgtctctcgcacgggccggttcgctggcagttaccttacctgccgctgactcgctccagtggccaggacctgctgcagtggacgtggtgccggcggcgggccacggcggaagcagccatggaggcagtgcagacggcactgagtgagagaacgaacccgctgctcaacaggtcatccggtccatccgtcgtcactcggcttcaacctgacgccggcaacggcgcgggcttctatgacggggcctactctttcctcgacaccaccaaggcctgcgctacccggttcagcagcgggtcagtgacatccgacgactcgccggcggtgacgcccaggctgctgtccttgatgtccagctccagccccgacaactgctcctcctcctcagaatggcccgaccgagcggcggcgtcgcgctccaatcggtacctcttcgacgcgaacgcacaggcccggtgcgcggggtacctggacctgatgaggctggaggtggatgcgcagctgggcaggctcaggggcggtgtcactggcctggagagctacgctttgccgggcaacggccgtgcgatcggaggtgcgcacctgggcatgtcgcttgatgtcatgctgattgagattgatgagaggttcaacaccctgaagctgctcatgggctccgtgttccggcaggccaaggagatgcttggttcggtcaactcgtcggtgtctgatctgcagtcggagaatgagctgcagctggaagtgttcggtgccatcatcggagagtgcgtcagtggcctgcaggaggagctagagaggaagctgtacgagcagattagcatcacaaacaccatgggcaggaactggaaggaagccataactcagtttgccgccatgcgcgaagaccttggcgctctttgtaagctactactgcctttagcaccagaagctcatatttctaatggcaagaatgaaagtccaggcagcaagagtaacagatggaagtacaatttctttggaaagaaatccagagaggatcgttctccgcgcgctgaggacagcaagagtttcaggaagcaaaaatcatttggtgcaaaggatgtcatctcagaaaagtctgactttcaccatctcaatggtatgactagagagcaagtgataacctattttaagtctgagatcagcaaaatgaaaaggatgcacgaatcagctttgcaagagaagaccgaagaactgttcaggctcaaacgggagaaggggtcacattctctcaagaatgacatagaatttgaacctttgagaaagaaaattccagagcttgtattgagaatggaccaaatcatttccaagaatataaaggtacctgcaatctgcatgacccatgatgaactcgatgaaagatgcagattgatgagcagaatcgatgctttgttctatgaaaatcagcattttcgagggttgcttgcagacaggatgaaggacgttaaggcattatcatcccagctatctgaagccagtacagaactgtcaatgcagatgctgtcggaagaagagctcctgagacaaattgataaagttagagaagactgtgaggacctccgaattgaatgtgatgttagagaaggaatgtaccaaactgttacaaaacatttgcttgatgactataaggacagtatggatggtgctgctctaaatcttagtgcaaaattgtcttcacttgaatctgcagtctctgaaaaggataaggcattatgcatatataacgaagaaaatcacaggttaaaggagaagttagctgagttagaaaaggaacgcttgatccacggtgaccaggaagttccagaagccataaaacaagatagcacagaaattgttctgcgtgacattgaggttgagccttgcacgtcaccgagaagatcaaatgtgaacaattcaaggtatgacgaacttgtgaaacttgactcaagcttagagcaaacgtcatgtgtcctcaaggaaatgaacaacaaaaatatggatcgcagtagtagcctcagtaggaatgagcaagagaagcagctggagtgcattttagtatctatcatgaaactatcaaaagattttgtagagatcgagaaaaagatgtcagcggaaagaaccgagaacaggtcagaggaactgagcgatcactgcaaccacatggtcagacaagccatggtactaacaaagatagggctttggtataaacaaatgattgaagcgaggcgttctgagctccaaaaggctgaagccaaggttatggtattaggcgacaagatcaccgcacagttgagccttctccgaaagatatatttagctctcgatcattactctcctaccttgcatcagcatcctggtctgctagacgctttcatgaagacgtgcaagcttgttgcagatctgagaagtaaacagaacgaaggcgatgcaacatgaacgaggaggcggtatggtgggatctcccttggtatagctaatgtttctcatgtgcttatccgtgttccacgcctgccgctgcagaccaagtgaaggatcctattgaactgaggttttagaattttcagatcctgatctgcagtatatcttagtgccaagtgaaccaatagctgccttgctgatcttatgcgatgcaagtggtagctgtttctatctgcaatgatgactagaaatctgaaactatgtacagatggcattgtgctcacgtcgtcacgtgcttgttggttagagaatagggttgttatttgcttagttagcagcctaggccatggaatagagaaggtgttaactacattgtaagcataaaatttattatccccactctgtgttgatgaatatctttcctccatctagattgatc

SEQ ID NO: 96255 - DNA, 1807 bp, Zea Mays
aaccaaccaaccagccagccctgcctgactgcctctccaaccagcgggagcgagcgggtcgtcccttccgccacctcaagagctcactgctggccctgactgaggccctcggccctcctccagtcccctccgcggctccgcctctattaaacccttgtcccttcggcgagactcctctcctccttcagatcaaccctcccctccccggcccgacgcccctcgccccccccctcctgaccagccatggcgaccgctgctgctgcgtcccgggtggctgtctcggcgccggtcttcggttcggacggcggcgccaggagctccgggatcaagggcaacaacaatgttagcttcggcagcaaatcatgggtcggcggcacattggcctgggagagcagctgctcggtgcggcccaggcgcgccagcaaggtgctctgcatgtccgtccagcaggcgagcaggagtaaggtctccgtcgcgccgctccatctcgagagcgccaaggagccacctctcaacacgtacaagcccaaggagcccttcacggccaccattgtctcggtggagagtctggtcggccccaaagctccgggggagacttgccacatcgttatcgaccatggtggcaatgtgccgtactgggagggccagagctacggcgtcattcctcctggagaaaatcctaaaaagcctggagccccacaaaatgtccggctttattcaattgcatcgactaggtatggagataactttgatgggcgaaccggaagcttgtgtgtccgccgtgcagtttattatgatcctgagactggcaaggaggacccctcaaagaatggtgtctgcagtaatttcctgtgcaactcaaaacctggggacaagattcaattaacaggtccctccggcaaaataatgcttctgcctgaggaggatccaaacgcaacccatatcatgattgccacgggcaccggtgttgcccccttccgtgggtacctgcgccgcatgttcatggaagatgtcccgaactacagatttggtggcttggcctggctcttcctcggcgttgccaattcagacagccttctgtatgacgaagaattcaccagctatcttaagcagtatccagacaatttcaggtacgacaaagccctcagcagggagcagaagaacaggagcggcggcaagatgtacgtccaggacaagatcgaggagtacagcgacgagatcttcaagctcctggacggcggcgcgcacatctacttctgcggtttgaaggggatgatgcctggaatccaggacacccttaagaaggtggcggagcggagaggcgagagctgggaccagaagctggcccagctcaagaagaacaagcaatggcacgtcgaggtctactagggctcggattgctgtggttgcgacccttgatgctgccggggcagcgtcaggagacaaacacatgattgaaattgaatcgatggatggttctcggggcggtgtaaagtcacaaaagttccctttgtgagaaaaatcgccttttgtaattcataaaagcttccgcgccacggttatccgtggaacggaccgtgtaactttcagccgtttacatttgcagtgcagttgcttttggcagtctgtctagtgtctaacaataggtctctgtccagttcgtacgcatatgaaccctgatgactttgcataattgccgttcaatgcttgccccttgtgccccacattcgttggccactctgtcaacgggcgagcggcgatcttcattcttctgagcttcaaatcatgggcatctgctacctctgtc

SEQ ID NO: 96256 - DNA, 1056 bp, Zea Mays
aaaaatgaacgcgttgaaacaccgaaaggcaagccggcagcaccaaacttttctcctaaaaatcctccaaaaaaacaaaaaaggggagggaaaaaattctcgtcttcttccccgtgcttgccagcacccgaggtcggcgagctctccgaaagcggcggcgatgggttccagccaggccgataagccactgcgtcgtatagcggtgtcgttcgaggagctcgccgccgtcgctaagcagcagcccgcggtgcccatggacgctggggccttctcgcgcgcctgctccaacgtctccgtcctcttcggctgcctcggcatcgctttcaagttcgcggagatggactacgtcgccaaggttgatgatttggtggaggcgtccaagtcaatttcaacattgccttctatggttgagcgagacattcagaccgacactgtcaggaaaccagggagccatacaaggaatctgcttagagtgaagcgcgggattgatatggttaaagtcctgtttgagcaaattcttgtcacagaaggcaactcactaagggatgcagcatcggtggcttatgctcaggtctttgctcctcaccatggatgggcaataaggaaagcagtttctgctggaatgtacgcccttccctcaaagtcccagctgttgaagaaattgaatgaagatgaggaatcagcaaaggttcaaatgcagaactttgtcaggtcatcagctccagtaatctgctatgttgatgaccttttcacctcaaggaatttgggcatagattggtgaagaaaaatatggatacgtttgtttgatgtactaatccagtcagatggtgtgctgtgtgagctgggctcagaaaacctttttctggatccgtgtttccaagtcgtaaactaatataactacttagcgatcccgttctggagttatttgtgatgtttgcgcagtataaatatacgtgtcgacaaatataactacttagcgatccctgataatactggagttaggcgatgagaaaatatacgtgtcggctgattggaaaattttctagacatgctgct

SEQ ID NO: 96257 - DNA, 209 bp, Zea Mays
caacataaaccgaatagcacagtaattctttgctttaaatgataaatctaagccccagcaccccacagggctaccaacaacatattataagtataattgcagctacaaaaaatgtaaaaataaaaataaaccacaacataaaacgaatagcagtagtcacataactaaataagcatccaggtttgcacccctaaagttaacaactcaac

SEQ ID NO: 96258 - DNA, 543 bp, Zea Mays
cgagcgatgggatgggcgacatggttcctagcgacagtgtgcttctttgccgcgaccgaactcttcgtccctgatgctctcgattccccactccggcgtaggctccatcacctagccaacctagctcacgtcctctcctttgccaccttctggggcgccgccctctggcccaccttcattagcgccgccctctagaaatccaagaaaggcagcaaccaaaacagaggaggtgtgcaggaggaggaggtggtgctggagggaaagatctcacaagtgtgtgaagaccacacagtctcgcgcactcgcaaacccagtgcacgctgcggttttcctcttcgcccaccttcttggagcggggaggttggccatgaggaggtggtgcccggctgccctgctgggctgcgtagtggcgctgtccgttctggtggccgccgtggaatgcgtcaatgcgctgtggcttatgacaagaaggcaatgctgattgatgggcagatgtggattctcttctccggatccatacactaccctaggagcacccctgat

SEQ ID NO: 96259 - DNA, 431 bp, Zea Mays
gacactcatatatagctatataaaatcacatttcatatagcgtttagactttatactttagacaaatatatcatatagaaataatagtagtaacataacctggggtctggccgtctcgctgctggtgttcgtcggcagccatggcgccatgcggttgctacccattggtgtggcctgcgctgcgggtggccggtagctggcagccggagtgctggacgccggtggctggcagcctgggatctgcccggtggctggctcctacctcggtggctcggtacctgcgctggtggccggacggcgcttggacttggacgcagccacgcaggacgcttgatgcctactgcctactgcctaggttggggtgggtggagcggtgtcgcagtgcggcagtgggcagttcacatgcgaagatgacgacatggacactatga

SEQ ID NO: 96260 - DNA, 231 bp, Zea Mays
atgctagtcaaatggtcatatcggttcaacgtcactcttatcaagacccattctgaatgccattgttgcaacaaccactcttattttattagagcaaaaaagcttatgtacacgattcctattcttcttaagaagtccattgtggtacctttattgtcctcggagtcgaatttgctagaaattagagatgttttcattaagtgtgtggggccatcctacagaatcagttag

SEQ ID NO: 96261 - DNA, 4978 bp, Zea Mays
cgtttcgcccaggagcgacaggcgcgggcgccacggagtgtgtgtgagagagagatagagagagagggagatgcgagaggaggtgaggagctcgtcgggggcggtggcagaaacgccgatggccgtcgcccggtcctcgtcgccgccgcacaccccggtagccagttccgtcggtgcctcgtcacctgctatgcaaactaatgttgcaagcatagattggttgggtggcaaacaagcttccagagttgactcgtcgtcgcaagttgctgcacatgcttatcacccttcccatagttttgatgcagctggcactgctatggattctgcaccatcatgcagaccatgggaacgtggagacttacttcgtcgactggcaacatttaagccttcaacttgggcttctaaaccgaaggctgctagttctttggcctgtgctcagagaggttgggtgaatgttgacatggacaaaattgaatgcgagtcatgtggcacacatctaatcttcaatgcattgacatcctggtcccctgttgaagttgcaaatgctggagaatcctttgccgagcagcttgatgcagcacaccagaatagttgtccctggagaggcaataactgtgctgacagcttggtccagcttcaccttacacaatcagctcttattggaggttttaaagaccgctgtgatgggcttttacagtttacctctcttcctgtgattgcaccatctgcaattgagaacatgaagcttacaaggagtgtacaaattgatcatctgttgtcccaatcaattacctttttatctggtattctgggctgcagagcagagagtacagcaggaattgatatccaccaagatttctcttgtagctactctcaagcacaaaagctcataagcctgtgtggatgggagcctaggtggcttccaaatgttcaagactgtgaagaaaattcaacgcattcagctaaaaatttaccctcagttggacctgacgaacggttatatccccattttgttgaacataacaaaaattcattttctgcatcagccaagaaagataaggggaaaggcaaattgcccgttggagattctggatgcagcatgaggtcaccgttgttagattgtaacctgtgtggagctacagtcaggatgcgggactttagacctgtattatgtccttctcgtttcagtccaaataacattgttgtgcctggaacaggcagaaagctaacactgacacatggagttagtgctgccagtggtatcaatgagtgggttactgatggggtggaaagaggtcaagatgaagggcgtgatgaagcagcaacaaatgagggaaaaccactatcacttgttggagtagacctaaacctaacaatggctggaggattaccgtcacctcaatctgccatgcctgctatgtcagagcggtttaataatggaggaatgggaagggatctgatgattggacagcctacaggcagtgaagtaggtgattgtgaaacctcatatgaatctcggggtccgagttcaaggaagcgtaaccttgaggaaggtgggagcacagctgacaatccacaagataggctgcagcatgctgatagcatacaaggaaatttcattgatcgtgatggtgaggaagttgatgatgctgcacaggattcagatgtcccgaataagaagtcccgtgggttcgatctgtttgatgcctatcgtccttcctctggagctggtcccagtagaaatttgtcctttggccctcatgaggatgctggtatgttcagtcactcaagagcaattgacctggcagctgttgagcgtccgactgctagggattcactgagagcatcttctgttattgcaatgcatactattcatacttccgaggaagattctatggagagtgttgagtattacccaggtgatggtaatgatatcgatatgccttcttctagtacacaaaggaacattgaaatgaatgatgccttggatcttaactatagcaaccaagcacagcaaagtgctaatgcacatgctggtgctggaagcgatgcaagagaaattggaggaagcagtacaaatgaaggggaggaggtcattaatgctgaaacagttcccccttttggaagggatcaacttagtttaggaattagtggtggtagtgttggcatgggggctagtcatgaggctgaaattcatggaaatgctggttctctgcacagaactgagagtgttgtaggtgatgctgaacctattgccgagcttactgagacaatgggtcagactggtgaatcagctccaggacctggattaatggatgaatttgtacctgaggtagaccgagatgaacctcatggagacagccaagatacggtgtcccggtcagttggccaagccgacagtggatcgaaaatatatggctataccaaagctgattctgttgaaagtggagaaaagataggtcatgccaccggtaatggaagcagcatgcgtccttctctttcttgcaacgcagggatgtgtgctggttttgatctgtctaaagatgatgtgacacatactggcaaaatactaactactgatgatgcattaatggggttagattatgatcctggaaatggattaggagctactaatggagaaaatgactatgaatcgggtctgctggaatttgatcctgttaagcatcacaatacttactgcccatgggtgaacgggaatgttgcagcggcttgctgcaacaacattggctccagctcaagtagttcagcgccctctggttggcagctaacaatagatgcagtcgacacgtaccaatcacttggtcaagcccaaaatcaaataatgcaatctgattctgcagcttcattatatatgcaggatgaccaaataactcataaccgcaaggtagggagacggccttctgtgagcagaagctttgggaagtgctgatcggaactcctgtagctcaagtgtttcctagacagaaacagcattacagaagttccagattggtgtaacaggagaaacaaaataatgatagtctcagtagattgttatcaccccgtgggtgtgagcttatagctgttttatgttgttgcatattgatacatcatatatatgtgtatttatattccgaaagggtttattcaacagtctttcatttgacagtaacattttcaagcgaactaggtacattattatggtgagattatgtaaacttcatattcatatatttatcgccgttcttgttgcgtccatgtacctcatctaatgatatggttgtgttcagatttttcttcttctgtttctttgtatctggctgactgtttcttcgcgcggggtgctatctgagaggccatcgccctcgtcaaatctcagcagccaatgagcaccacccagagtgccaggtcgtcagcaacgaccagataaagaagtggatgagatgccacttcacttcactccacccctgcttgtattgtatcctcgtcttttcccttctctccgtctatttccaagctttctccagatcaaatcagaaaggggaagggaagaacggcccagcaatgccgctctgcagcttctacgcctccacctccgttcccgtcgtcaagccccagcagtccgtcgcctcgtccaagccccccaccacggcggtggcctccgtggcgacaactgtgccgatgcgcagtgcagcgacggtgacgccagccgtggccacaacaacgagcctagcgctgtctctgcacctgccggagctgccgtcgcaggtgaaggacaagatcctgagcctggagctgatgggcgtggactatgggcgcgcgctggagcagaacccggcgctccgcgacgcggcgccggagtccatccacgcggtggtgtcgttcctccagtcccgcgggctccagttcaaggacctgggccgcgtcttcggcatgtgcccgtccgtgctgaccgccagcgtccgcgccgacctccgccccgtgttcgccttcctctccgcggacctgggcgtgccggagtcggcgcaccggcgcgtggtgatcaagtgcccgcgcgtgctggcctgcagcgtccgcgaccagctccgccccgcgctcatctacctccgccgcctgggcttccgggacagccgcgcgctggcgctgcaggacccgatcctcctcgtctccagcgtggagcgcaccctggcgccgaagctggagtacctggccgggctcggcatgtcccgcgacgacgcggtcgccatggtgctgcgctgcccggcgctcttcaccttcagcatcgagcggaactaccggcccaagttcgagtacctggtggacgccatgggcggcggcgtcgaggacgtcaaggccttcccgcagtacttcgccttcagcctcgagaagcggatcgcgccgcgccaccgcgccgcggaggacgccggcgtcgcgctgccgcttccggacatgctcaaggccaccgacgaggagttcagggagatgctcgacaaggagcgggagctgcacgagcaggcagcgacgacggactgatcgatcggggggctagtacagcggtttgcacctgatccgactctccgaagcatccaaccgccgtcttcgtggcgatcgagtgtcctggccatgacggtagccagcacatgtagtcatttgatttgagtaattagtagcctgtacatatatgcattgacattatttgctatagtcacgattcgtagctcatgagagaatatgcctgttctttctccattccaagtgaataagcacagagctggaagtcgtgtcttgtacacacgtgtaatgaatgaatgtaccaagttcattagatattatttgctctgagctgcacgcttgcgcaacacgtcttgtctcgtgtggttgtaattaatggtgtcaaaagctatggttgaaatccaaaggacaagcaaacaaatgctaatggagcatctccagtagacaaaaaaaagtttttcaagtc

SEQ ID NO: 96262 - DNA, 246 bp, Zea Mays
atggcaacactctatgattggtgccatgccaacacctgctttccccgtgccttgcgcagcagccagcagcgcaaaggcaaaaagcacacccacaattcgcagcccgatccggcgatagagggcagagcatgggactcgagagctcccccctatcatggtacaggtccgctttacctgcgagacgtaaccttcacggctcactcatgggaggcatttcaactttcatcatctgctggccgctgctga

SEQ ID NO: 96263 - DNA, 168 bp, Zea Mays
ataactatagctatttatagagttttgcaaaagatacttagggcctgtttgtttacccccatgaattatataatctggattatttttggaggattatataatctggattatataatctggattatataatctgagtagtcctgtttgtttacccagattatttgagtt

SEQ ID NO: 96264 - DNA, 402 bp, Zea Mays
atggatccgacgccgcaatctccattgtccagcgatgagtccgacccgagttggttctggcgtaatccagcaaggcaagcagctcgtgctgcacagcgctcggcgcacgcggccgctgcggcacgcgcggcagcggaggcgcgcgaggagctggaggagcgtgcggtggtggcggtgcgcgaggatggtgcggccgcacgctcagcagcggtggcgcgtccgactcctgctcgtgcgtcagcgtcccggcgcgtgcggcaccatccctacagccgggcgtctcgtcaaaggggtgtgaagttgcgtgttccttccgacgacgaaggtgaagtggttggtccagccaaggttgaagaaggggacaacaaggtgatgaagaacgaagatgcaatgaagccataa

SEQ ID NO: 96265 - DNA, 1601 bp, Zea Mays
atcctgtcctcccctccggccctcccggatgtgcgatggcagtcccgatcttctgtggccaccacgccctgcaactcgtgccaggcgcggttcgcgttcacgatacagaggcaaaccgtgccgtgacgtcacccgtgacaccgcaggcttgcatccccgtgcgaacttttccccgccgagacgcactagccacagcccacagacaggggagactagttgagactggactggagaccaacttccggaacctcctcgagcgtggttgaagctctgctccaccctctcgctatcggttcctataaataaagcaagagcccctcgtcgatcctcacctccacagctagcatcgatccgccattgctcaccgcacaagtgcacgctcacctcacacacgcagctaagtagctaacgccgtaggcgagaacaagaaaaggctcgacatggccgaggagaagaagcagggcctgcagctgctggacttctgggtgagcccattcgggcagcgctgccgcatcgcgctggacgagaagggcctggcctacgagtacctggagcaggacctgaggaacaagagcgagctgctcctccgcgccaacccggtgcacaagaagatccccgtgctgctgcacgacggccgccccgtctgcgagtccctcgtcatcgtgcagtacctcgacgaggcgttcccggaggcggcgccggcgctgctccccgccgacccctacgcgcgcgcgcaggcccgcttctgggcggactacgtcgacaagaagctgtacgactgcggcacccggctgtggaagctcaagggggacggccaggcgcaggcgcgcgccgagatggtcgagatcctccgcacgctggagggcgcgctcggcgacgggcccttcttcggtggcgacgccctcggcttcgtcgacgtcgcgctcgtgcccttcacgtcctggttcctcgcctacgaccgcttcggcggcgtcagcgtggagaaggagtgcccgaggctggccgcctgggccaagcgctgcgccgagcgccccagcgtcgccaagaacctctacccgcccgagaaggtctacgacttcgtctgcgggatgaagaagaggctgggcatcgagtagagcatccatcggtcggccggtggctggccgggagtaataatgacgaaccaataatctagttttggttttagtgtgctcagcagagcagttcgtgttcatgagttcgtcgtcgttgtattttctattgtcagcggtggcagcgccgtacgtgttgcctcgtacaccacaaccgaataaatggttatgaatttcttcttgttgtcttcacagttcgtcggctttggttcttgtgtgctttcgagatgcgctggcacctggcagtactcgtcgccgccaatagcgcgtcttgagcgtttggcatttgcgatacaacgatgcgacctcgttccatttcgacgggacgtggggaggagccactgacgcgtggaccccacgtgcgacggggcccacgcgcagtggcccaactgccctctgcactccaaaagtttccaacctcggtgtctgtacaggagtactcttctccgttcctcctctcgaattttccac

SEQ ID NO: 96266 - DNA, 333 bp, Zea Mays
atggcgccggagccccggtggcctggacgggaccttgctggttgctgccacctgcgcgcgctggcgctgggcccttcccgcgcgtgcgtggtccaatggtacgaacaggagtcgcggcagcgacatgggtatgggcagtgcccggcggcagcgaagagcgcagggggagccgtcggatcggatcggatcctctgcggcccgatagcaaccggaccggccgagacaccgattgagcgcggcgtgacagaaacacatgtacgcacaaggccttgcttgcctggccggcccatcagcccatgggagggtcgaaacgccagccagtgtcttggatag

SEQ ID NO: 96267 - DNA, 222 bp, Zea Mays
gcatgtcgtcgctgtgcatgctggcccgacggggggcacgcacggccaatcaatttactgatgctattggggtgcagatggccatatattttttgttcggtccgcgtcccatcttgctgggatcatgttttaaaaagcaagtggacgtgcaacagaatcccttctcgactcaacgtgttttttttattggatactatctatttattactatttttacctgaa

SEQ ID NO: 96268 - DNA, 1437 bp, Zea Mays
atccatggctatacccgtactagtttctccttgccagcagcccagcagccgcctcctctcgtagcagtgctcctagtgtactcatcgctactgcttgcaaatacagtactgcttaaaaaaagcacagcagcagtacctgaacctcccaaaaaaatcatgcgccgctgtgctgttggtctccgcctggctagttttccatatatagaaaaaccgcagctctagacgaccaccagatcggactaggtagaccacacttcccttcacctctcatcggcgctctttcccttcctcgcagtcccaggtctcggctcccctctcagtcaagccgtttcatttcctccctcctacaaatatcctgatatggacgacgacgacgactccccgcctcatgagtcggcggcggcggcggcggcagacctatcgctgacactggcgccggcgccggcgctggcgcctcccgcgccgcctccggcgctgcccgccgtcgcctccgacggaggcgtggcgacggcgcgcgtggacggcaaggacgtgcgcctgttcccgtgcctcttctgcaacaagaagttcctcaagtcgcaggcgctcgggggccaccagaacgcgcacaagaaggagcggagcgtcggctggaacccctacttctacatgaccccgccgcacccgcagcccaatgcggcgccggcgagccccaccgccccgccgcccgcctacgcggcgggcggcctcctccccgcgccgtacgcggcccacgtgtacgcccccgtgccggcggcgccgccgccgccgtcgttccccatcgcctcgcacggctccagcggggggctgcggtactacgcgccgccccacgaggcggcggcggcggcggcggcggacgcggggacgggggcgccgacgaccgcgggcgtcgtgcttgccccgcgcgcgcgctacgccacggccacgcaccagcagcaggcccagcagcccggcggcggcggccgcgatgacttgatcgacttgctcaactggaggaggggatcccacggcgcaccggccgccgccgccgccaccgcctcgccggccagcaccaccaccactctcaccacctcatacgccggcgcccccgacggcggcaccagcaccaacgacgacgacgacgctgacgacgccggggagctcgacctcaacctcagcctctagcactgcttgtatctacatctacctacgcgccaaggttattaatcgtgtgccggcctatccgtaagctacgcgtgtcacttaattagctcttagtaggcacgttaatccctctctctctatctctgctccctccctctgtatgtcctgttattattagtacgtctcgtcatctcccgtcccttctcccatggcctcatgaattgtttttttttggctcttgtttttcttgaggatttgtctgattgcgccccatca

SEQ ID NO: 96269 - DNA, 723 bp, Zea Mays
atacccgtactagtttctccttgccagcagcccagcagccgcctcctctcgtagcagtgctcctagtgtactcatcgctactgcttgcaaatacagtactgcttaaaaaaagcacagcagcagtacctgaacctcccaaaaaaatcatgcgccgctgtgctgttggtctccgcctggctagttttccatatatagaaaaaccgcagctctagacgaccaccagatcggactaggtagaccacacttcccttcacctctcatcggcgctctttcccttcctcgcagtcccaggtctcggctcccctctcagtcaagccgtttcatttcctccctcctacaaatatcctgatatggacgacgacgacgactccccgccgccaccgcctcgccggccagcaccaccaccactctcaccacctcatacgccggcgcccccgacggcggcaccagcaccaacgacgacgacgacgctgacgacgccggggagctcgacctcaacctcagcctctagcactgcttgtatctacatctacctacgcgccaaggttattaatcgtgtgccggcctatccgtaagctacgcgtgtcacttaattagctcttagtaggcacgttaatccctctctctctatctctgctccctccctctgtatgtcctgttattattagtacgtctcgtcatctcccgtcccttctcccatggcctcatgaattgttttttttt

SEQ ID NO: 96270 - DNA, 1610 bp, Zea Mays
cctgagtataggctgagttccctttccctccgaggctccgacgctgctctggccccgtctctctcgtcttcctggctctccccgcgcaccaaaccctccccaaaacccaaacgcttctcgccctcccgtcctgttctcgaccatgtcggtgtccgacggggacgacgacgaggccttcctcatcgccctcgacgccgcggaggccgccgcgctggactcctccaagcgccgccgcctctccaccacctcgtcctcaccgaccccctcaacctcacccgccgccaccgaggggccctacctggccgcgctcaagggaagccacagctccacctggaagcagcagctgcaagaccttggctatgcccacaagcggcccgacggctctaaatccttagccccgggtacgggcgcgagcggatcgtgcttcaagtgcggggaccccgggcactgggcacgggagtgccctcaatccgtgccgaacacggggggaggaggtcagatcggcggtggcggtggcggtggcggcggtggcggcggcggatatgtaaatgcgggcgtagaggtggaggacaaggcgtgcccctgcggtgtcgggagctgcctcgtgctcacgtccaacacgccgaagaaccccggtcgcaagttctacaagtgccccatgcgggatgggggttgcaacttctttgagtggtgcgatgctccatctcccgcccctgccaatgcacgaaataacatggttgtacactcagagacatcagcaacagatatgctttgcccatgcagtgctggaacttgcttaattctcaccacaaagacagggaaaaatgttgggaggcaattcttttgctgcccattaaatcagggtggtggtggtggctcttgtggctttttcaagtggtgtgacgagctacagcctagggttggtgcaccactgcaagcttcagcgcaataccaagcggattccatgccaagcatccaaaaccccagccagaggagctcgtcttcctgcttcaagtgcgggcaggagaaccactgggctcgagactgtccgaatcaaccgtcggatccttatcctgacaagggtgggagaccagtagctccagcgggctcacctggtgcgtgctacaactgtggtcggtccggccactggtcccgcgactgcccaacctcgaatagtggtggtggtggtaccggcaccagccgtgccaggtcgtcctcagccttgagctcgtggaatagtcagagatactgataggagggtcctgtgaactcaattgaactgacatggacatgctgtacgaaacttggacaattgcccccctccacgtgttgcttaggtatgtgctcacgtcgatgccttttgctgctctacgctatctctctatatgtaagagagaactgttgctgttctctgtcttcaccctcaccctgttttatgctcctatctctgtcgaacttgggtctactgtttttttatctactctaggatttttcacatataaaatattgtatgtgtgggtctaaggagaaccatatcgtccaagcatttctttccatgaacttccatgcttatatagttctgttcagttcagttctgttcagttattgtc

SEQ ID NO: 96271 - DNA, 479 bp, Zea Mays
gaaatataggctccgcatagcaaaaattactccacctttgtctttgaccatgggctgaggcatggtcaaaaataattctaacctcttctcatttctatgtgtggcccattagccaataaaaatctgtctatagaagtaaaacttccagcacatgctcgtgttgcgccgcccgccgccgccctcacaaaatcgtccgcccgcgtccccatacctcgacagcaaggctcctccccgtcggtctctgcgcatcccctgtctcctccatgggcgatctggctccccacgagtcctgcacagattcaggctgtccgcagcggttctccctaaatttttccctctatacgttactatgcagtcacgtcagtaagattctctcccctatattcaatcttcccgcaatcatttcctctatatattctcctatatatctccccacacataaaatatatatatcaatccaactaccatcaactaccatc

SEQ ID NO: 96272 - DNA, 98 bp, Zea Mays
tacaacaacaatctcgagacgattgcctgattacctcgtcaaaattacagaaaatttatcggatccatctaccactacatactacatttgcgaaatcg

SEQ ID NO: 96273 - DNA, 2106 bp, Zea Mays
cgcgccgcgacacaccacgcaggaggcagcgagcgcaataatgcgcacgcagaggagcacagcggcgtcactgctgcggcagtaatggccgcctggttccacttccaccacggtgtgcactagcgctacaccgaggccaccttttcttggttccttcaacacgcctactccggcctccggatcgggcaccacgtctgccccctgctcccggaatctttgccaagcggcgccgctactgtccggcaaggcgaccccgtctctcggccggcgttgatctgttttgtgccggtgctaacggaaaccggaaagtttgcgtctttatgttactgtggttgaggcgggcggagtggcggcgcgatgggcatctcggcgaggtggctcaagtcgttagttgggttgaggaaggtggggcggcagcagcagcagcggcgaaaggatgatgcagatgttggtcgaatgaaaaccgatgtcgccgaccagtttcattttcagattcagcactctcaagatgacaatagcattgctgcacaagaaattccagaggtttcttatggaaatgatccacctgaagatgattctaatgtaccttcatgcttcgagcctgctcgtagttcagctcatatgccattttgtcaaactgaagaagcccagaaagagatctgggctgctacaattattcagacagcatttagagctttcctggcaaggagagcccgccgagctttaaaagggttggttaggcttcaagcccttgtaagaggtcatatagtaagaaagcgagcagctacgacactccgttgtatgcaagctttggtcagggttcaggcccgtgttagagcaaggcgagttcgcatggctttggaaaaccagactgatcggcaaaatacttcaccagagcacacgatcgaggcacgtgtcagagaaatcgaggatggctggtgtgatagtatcggttctgtgggagatatccaagcaaaacttctaaagaggcaggaagcggcagctaaacgtgagcgagccatggcctatgctctagctcatcagtggcaggcaagttcaagacaacctacagcatttgaacctgacaagaacagctggggctggaattggctagagagatggatggctgttcggccttgggagagtcggttccttggcacttacgggacagatgggatttttgtagttaatgaaaccagacaacctgacagaagtgcaaccaagaccccatacagaaaacctgttaaaaagcatgattcaacccttcaatcaaacatgttgaaccagaaggtcttcccatcaaactcagagggtggtggctcctcgacaaatcgatcaagtggtttggtatcaactaaatctagactgaaggttttacccagagaaggttctgaggaagcctcatctcatccttcagtaattgtgcggtccactagtaatccgaaggagaggatttccagtattaattcaaaggagaggactggggacttggattttcaagttcataaaagatcctccttgcctggcattggtccagaagctggcaaacacctgacaaagaaaggcatggttaaccgatccctgaaggccacaaaagattcccaaatactggggtcaaggcatcatcttgccagttccattgatccagttcccaccagagttgaactggagacttgagaaggcatgttatgctcgaacatcgccatggattgcacctagcagcttggatgccgttcatgcctcaatggctgcatgaatgtgtcgcaacatctatgttatactggtggtggcggttttcgagtttcgacaccatatatgtaggctcatttcatgagataaaatcagatgcatgtgagcatgtccatatatgttaagaggattaccattggttttattgttgtatttgtaagttgccgttaggaggtgtaaatttgtgtcgtcgagtggtacttattatgtgttgtcgtatagttgtgactcgaaggttaaaggtggttttggttctactgcgaagtgtgaactgtagtgagctgtgttctgtaaaaaaataaagttgttgtgatttgtctactgtaaaaaaaatggaagtaacttggttcaagctgc

SEQ ID NO: 96274 - DNA, 2047 bp, Zea Mays
cgcgccgcgacacaccacgcaggaggcagcgagcgcaataatgcgcacgcagaggagcacagcggcgtcactgctgcggcagtaatggccgcctggttccacttccaccacggtgtgcactagcgctacaccgaggccaccttttcttggttccttcaacacgcctactccggcctccggatcgggcaccacgtctgccccctgctcccggaatctttgccaagcggcgccgctactgtccggcaaggcgaccccgtctctcggccggcgttgatctggcgggcggagtggcggcgcgatgggcatctcggcgaggtggctcaagtcgttagttgggttgaggaaggtggggcggcagcagcagcagcggcgaaaggatgatgcagatgttggtcgaatgaaaaccgatgtcgccgaccagtttcattttcagattcagcactctcaagatgacaatagcattgctgcacaagaaattccagaggtttcttatggaaatgatccacctgaagatgattctaatgtaccttcatgcttcgagcctgctcgtagttcagctcatatgccattttgtcaaactgaagaagcccagaaagagatctgggctgctacaattattcagacagcatttagagctttcctggcaaggagagcccgccgagctttaaaagggttggttaggcttcaagcccttgtaagaggtcatatagtaagaaagcgagcagctacgacactccgttgtatgcaagctttggtcagggttcaggcccgtgttagagcaaggcgagttcgcatggctttggaaaaccagactgatcggcaaaatacttcaccagagcacacgatcgaggcacgtgtcagagaaatcgaggatggctggtgtgatagtatcggttctgtgggagatatccaagcaaaacttctaaagaggcaggaagcggcagctaaacgtgagcgagccatggcctatgctctagctcatcagtggcaggcaagttcaagacaacctacagcatttgaacctgacaagaacagctggggctggaattggctagagagatggatggctgttcggccttgggagagtcggttccttggcacttacgggacagatgggatttttgtagttaatgaaaccagacaacctgacagaagtgcaaccaagaccccatacagaaaacctgttaaaaagcatgattcaacccttcaatcaaacatgttgaaccagaaggtcttcccatcaaactcagagggtggtggctcctcgacaaatcgatcaagtggtttggtatcaactaaatctagactgaaggttttacccagagaaggttctgaggaagcctcatctcatccttcagtaattgtgcggtccactagtaatccgaaggagaggatttccagtattaattcaaaggagaggactggggacttggattttcaagttcataaaagatcctccttgcctggcattggtccagaagctggcaaacacctgacaaagaaaggcatggttaaccgatccctgaaggccacaaaagattcccaaatactggggtcaaggcatcatcttgccagttccattgatccagttcccaccagagttgaactggagacttgagaaggcatgttatgctcgaacatcgccatggattgcacctagcagcttggatgccgttcatgcctcaatggctgcatgaatgtgtcgcaacatctatgttatactggtggtggcggttttcgagtttcgacaccatatatgtaggctcatttcatgagataaaatcagatgcatgtgagcatgtccatatatgttaagaggattaccattggttttattgttgtatttgtaagttgccgttaggaggtgtaaatttgtgtcgtcgagtggtacttattatgtgttgtcgtatagttgtgactcgaaggttaaaggtggttttggttctactgcgaagtgtgaactgtagtgagctgtgttctgtaaaaaaataaagttgttgtgatttgtctactgtaaaaaaaatggaagtaacttggttcaagctgc

SEQ ID NO: 96275 - DNA, 2035 bp, Zea Mays
gcgcacgcagaggagcacagcggcgtcactgctgcggcagtaatggccgcctggttccacttccaccacggtgtgcactagcgctacaccgaggccaccttttcttggttccttcaacacgcctactccggcctccggatcgggcaccacgtctgccccctgctcccggaatctttgccaagcggcgccgctactgtccggcaaggcgaccccgtctctcggccggcgttgatctggtgatgcgcttttcacggtgttttttttttttgtttcactcccccctccgtcctgtgtgattgtgctgcagttttgtgccggtgctaacggaaaccggaaagtttgcgtctttatgttactgtggttgaggcgggcggagtggcggcgcgatgggcatctcggcgaggtggctcaagtcgttagttgggttgaggaaggtggggcggcagcagcagcagcggcgaaaggatgatgcagatgttggtcgaatgaaaaccgatgtcgccgaccagtttcattttcagattcagcactctcaagatgacaatagcattgctgcacaagaaattccagaggtttcttatggaaatgatccacctgaagatgattctaatgtaccttcatgcttcgagcctgctcgtagttcagctcatatgccattttgtcaaactgaagaagcccagaaagagatctgggctgctacaattattcagacagcatttagagctttcctggcaaggagagcccgccgagctttaaaagggttggttaggcttcaagcccttgtaagaggtcatatagtaagaaagcgagcagctacgacactccgttgtatgcaagctttggtcagggttcaggcccgtgttagagcaaggcgagttcgcatggctttggaaaaccagactgatcggcaaaatacttcaccagagcacacgatcgaggcacgtgtcagagaaatcgaggatggctggtgtgatagtatcggttctgtgggagatatccaagcaaaacttctaaagaggcaggaagcggcagctaaacgtgagcgagccatggcctatgctctagctcatcagtggcaggcaagttcaagacaacctacagcatttgaacctgacaagaacagctggggctggaattggctagagagatggatggctgttcggccttgggagagtcggttccttggcacttacgggacagatgggatttttgtagttaatgaaaccagacaacctgacagaagtgcaaccaagaccccatacagaaaacctgttaaaaagcatgattcaacccttcaatcaaacatgttgaaccagaaggtcttcccatcaaactcagagggtggtggctcctcgacaaatcgatcaagtggtttggtatcaactaaatctagactgaaggttttacccagagaaggttctgaggaagcctcatctcatccttcagtaattgtgcggtccactagtaatccgaaggagaggatttccagtattaattcaaaggagaggactggggacttggattttcaagttcataaaagatcctccttgcctggcattggtccagaagctggcaaacacctgacaaagaaaggcatggttaaccgatccctgaaggccacaaaagattcccaaatactggggtcaaggcatcatcttgccagttccattgatccagttcccaccagagttgaactggagacttgagaaggcatgttatgctcgaacatcgccatggattgcacctagcagcttggatgccgttcatgcctcaatggctgcatgaatgtgtcgcaacatctatgttatactggtggtggcggttttcgagtttcgacaccatatatgtaggctcatttcatgagataaaatcagatgcatgtgagcatgtccatatatgttaagaggattaccattggttttattgttgtatttgtaagttgccgttaggaggtgtaaatttgtgtcgtcgagtggtacttattatgtgttgtcgtatagttgtgactcgaaggttaaaggtggttttggttcta

SEQ ID NO: 96276 - DNA, 1878 bp, Zea Mays
cgcgccgcgacacaccacgcaggaggcagcgagcgcaataatgcgcacgcagaggagcacagcggcgtcactgctgcggcagtaatggccgcctggttccacttccaccacggtgtgcactagcgctacaccgaggccaccttttcttggttccttcaacacgcctactccggcctccggatcgggcaccacgtctgccccctgctcccggaatctttgccaagcggcgccgctactgtccggcaaggcgaccccgtctctcggccggcgttgatctggcgggcggagtggcggcgcgatgggcatctcggcgaggtggctcaagtcgttagttgggttgaggaaggtggggcggcagcagcagcagcggcgaaaggatgatgcagatgttggtcgaatgattcagcactctcaagatgacaatagcattgctgcacaagaaattccagaggtttcttatggaaatgatccacctgaagatgattctaatgtaccttcatgcttcgagcctgctcgtagttcagctcatatgccattttgtcaaactgaagaagcccagaaagagatctgggctgctacaattattcagacagcatttagagctttcctggcaaggagagcccgccgagctttaaaagggttggttaggcttcaagcccttgtaagaggtcatatagtaagaaagcgagcagctacgacactccgttgtatgcaagctttggtcagggttcaggcccgtgttagagcaaggcgagttcgcatggctttggaaaaccagactgatcggcaaaatacttcaccagagcacacgatcgaggcacgtgtcagagaaatcgaggatggctggtgtgatagtatcggttctgtgggagatatccaagcaaaacttctaaagaggcaggaagcggcagctaaacgtgagcgagccatggcctatgctctagctcatcagtggcaggcaagttcaagacaacctacagcatttgaacctgacaagaacagctggggctggaattggctagagagatggatggctgttcggccttgggagagtcggttccttggcacttacgggacagatgggatttttgtagttaatgaaaccagacaacctgacagaagtgcaaccaagaccccatacagaaaacctgttaaaaagcatgattcaacccttcaatcaaacatgttgaaccagaaggtcttcccatcaaactcagagggtggtggctcctcgacaaatcgatcaagtggtttggtatcaactaaatctagactgaaggttttacccagagaaggttctgaggaagcctcatctcatccttcagtaattgtgcggtccactagtaatccgaaggagaggatttccagtattaattcaaaggagaggactggggacttggattttcaagttcataaaagatcctccttgcctggcattggtccagaagctggcaaacacctgacaaagaaaggcatggttaaccgatccctgaaggccacaaaagattcccaaatactggggtcaaggcatcatcttgccagttccattgatccagttcccaccagagttgaactggagacttgagaaggcatgttatgctcgaacatcgccatggattgcacctagcagcttggatgccgttcatgcctcaatggctgcatgaatgtgtcgcaacatctatgttatactggtggtggcggttttcgagtttcgacaccatatatgtaggctcatttcatgagataaaatcagatgcatgtgagcatgtccatatatgttaagaggattaccattggttttattgttgtatttgtaagttgccgttaggaggtgtaaatttgtgtcgtcgagtggtacttattatgtgttgtcgtata

SEQ ID NO: 96277 - DNA, 1066 bp, Zea Mays
cgcgccgcgacacaccacgcaggaggcagcgagcgcaataatgcgcacgcagaggagcacagcggcgtcactgctgcggcagtaatggccgcctggttccacttccaccacggtgtgcactagcgctacaccgaggccaccttttcttggttccttcaacacgcctactccggcctccggatcgggcaccacgtctgccccctgctcccggaatctttgccaagcggcgccgctactgtccggcaaggcgaccccgtctctcggccggcgttgatctggtgatgcgcttttcacggtgttttttttttttgtttcactcccccctccgtcctgtgtgattgtgctgcagttttgtgccggtgctaacggaaaccggaaagtttgcgtctttatgttactgtggttgaggcgggcggagtggcggcgcgatgggcatctcggcgaggtggctcaagtcgttagttgggttgaggaaggtggggcggcagcagcagcagcggcgaaaggatgatgcagatgttggtcgaatgaaaaccgatgtcgccgaccagtttcattttcagattcagcactctcaagatgacaatagcattgctgcacaagaaattccagaggtttcttatggaaatgatccacctgaagatgattctaatgtaccttcatgcttcgagcctgctcgtagttcagctcatatgccattttgtcaaactgaagaagcccagaaagagatctgggctgctacaattattcagacagcatttagagctttcctgcctcttttttaatgtggaagcatcgcaatgcctgtgtcttcgagggggcctcgccttgcgatcacaacatcctcacgtgcatcaaggaggatgtggggttgtggtgcttagctggggcctcaaggcttagaaggatttggccttaatctgtcagtgggtcaggttttgtttgatgtcttgtaattgtggtttataaccttttgccccttaaagggggtttgtactgacctattttggattccatttcttaatataatgatgtgcagctctcctgcgcgtccgagaaaaaaata

SEQ ID NO: 96278 - DNA, 1227 bp, Zea Mays
ggctgcgctccaaatgcaaaagtgttgcctgaagaacctgattgcccaaatgtaaatgtgctgggtggggatgaacttgagccaaaagggttgctaaaagctgaggctgaagaagctgtagaggtgctggcaaatacactcgtactggccgctgttgatgcaccagcagaagagctaggtgaagaaaatgtgaacccagtgcttgaactagagctaaatggattcgcaaaagtagctccagttccaaatggtgaattgccaaatccagtccctgatgtggaagttgctgcaccaaaagaggcagtgctaggtcctgatgaggaagttcctgccccaaaagagaaaactccaggtgcggaagatgaagctccgacaccaaaagatgcagtgcctgaaccagttgaggaagctccaagtccaaaagatagcgtcccaggtccagacgaggatgctccaactccaggagtcatgaccgggaatgcaagtgacgatgtactgaggccagtagattgggctggggagctgaacccaaaaaggttgtttccagagctcggaaatgtaaatgaaggggttgaagcagactgtaaacctggtgcagtggaagtactagatggtgcagccacagatattccagcagcatcacttgaaggtgcaactgcggtgaaagtaggcgtagatgtggcgggggaacttgaaaagcttgcaatacttgatgacacaggtgaaataaaaagttccgatgatgccttgctgcttgcatctggtgcaacagatttcacttcagcttttgtaccccctataccaaatgataaggtgctagctgccttattttcagcagttgtgccatcagatttagctgatgttaccaatgacaatccaaccggagcactggaagaaaaactaaatcccgtaaatgcaggagacgatgaaatagctggactgctactggatacggcaaatatggaagtggaaacagctgagctgatagcaggtttatcagtaggtggaggagttgtgagctttggtggtgagtatgacaagccattgctcaggctcgaagtagatgccacagatgtaaaatggagaggtgcattcagtgttgttgatgcagctgaaggcaacaccttctcagatgggttggctacatcttctgctttttctgttttatcacctctctctgaactagtgctggctaatgttgtgggcttggtgacactggaaaaataa

SEQ ID NO: 96279 - DNA, 2112 bp, Zea Mays
cacagtcgcacgcctcactctgctctctctctctctctctctctctctccatagtccatactacaaagcaggaaaaaacacacacacacaaaagaaaggctcacaatacccacctccatttagctactactactccctcgctgtcttccccaaccaacaaatcgacctagctaggcacaagagcgctagacgccgcagcgcagcacgcaccacccaccgagcggcggcggaggcagggcaatccgcagggagcagaggccgcgcgcgcaggcatgggcgcgccggtgcacggcgccctcgccttgttcctcctgctcctggtgggggcaggggcggcgcccgaggagacggcgccgcaggaacccacattgccagccaccggctccggcgctaccggcgcagcggcggtcggagtcaactccaactccgtgctggtggcgctgctggattcgcactacacggagctggcggaactggtggagaaggcgctgctcctgcagacgctggaggacgccgtcgggaagcacaacgtcaccatcttcgcgccgcggaacgaggcgctggagcgggacctggacccggagttcaagcgcttcctgctggagccgcgcaacctcaggtcgctgcaggcgctgctgctctaccacgtcctcccctcgcgcctgccctccgactcctggcccgcggcgtcccaccccacgctgtccggcgaggaggtcgagctcggcgccggcatgcgcgtcggccacgccgccgtcacgcgcccggacgccgtgctcaggcccgacggggtcatccacggcatcgagcgcctcctcgtgccgcgctccgtgcaggaggacttcaaccgccgccgcagcctcgcggcgatctcggccgtgctgcccacgggcgcgcccgaggtggaccccaggacgcaccgcctcaagaagcccgcgccgccggtggcccccggcgcgccccccgtgctcccggtctgggacgccatggcgcccggcccctccatcgcccccgcgccggcgcctggcccgggctccgggaagcaccacttcgacggccacagccaggtcaaggacttcatccagacgctgctcctctacggcggctacaacgagctcgccgacatcctcgtcaacctcacctccctcgccaccgagatgggccgcctcgtctccgagggctacgtcctcaccgtgctcgcccccaacgacgaggccatgcgcgcctcaccacggaccagctcagcgagcccggctcgcccgagaacatcctctactaccacatgatccccgagtaccagaccgaggagtccatgtacaacgccgtgcgccgcttcggcaaggtgcgctacgacacgctgcgcctgccgcacaaggtcgtggcgcgggaggccgacggctccgtcaagttcggccagggcgagggctccgcctacctcttcgacccggacatctacaccgacgggaggatctccgtgcagggcatcgacgccgtgctgttcgcgccggacgacaccaaggccacgcagacagccgaccctaacaggaagcctcccgccatcgtcacccacaagaagaagatcaagctccggcgaggcaagttgttagaggcgacgtgccagatggccgggctcttcggtcagcgatcgcgattcgcgagctgccagtagacggagaaaggatctgttgatctccacgacaccgaaagacgaacgaacgaacgaactgatgggctgccgcaggaggagggggagccgtccacattattgcttgtatttttttttccactcttttgtttattgttgagaataataatgaatcaggtgggggatgtaaactctgtgggttgttgttggtgtgtcgtccagagggagaaaaaaaaggagaaaaagaaaggcagccaaaaaaaaattgtccatacatgaatgaagaagcccaggatcgttgtctttgtataggagaaggaattgaaacgtttttgttttgttttctttttctgtcattctttgcttctgttcccgttttgacaatgagaaatatcgggtaaacacacaaccattcttacttattatccattttccttgtttttatatatggtttttcgtcgagatac

SEQ ID NO: 96280 - DNA, 1130 bp, Zea Mays
cacagtcgcacgcctcactctgctctctctctctctctctctctctctccatagtccatactacaaagcaggaaaaaacacacacacacaaaagaaaggctcacaatacccacctccatttagctactactactccctcgctgtcttccccaaccaacaaatcgacctagctaggcacaagagcgctagacgccgcagcgcagcacgcaccgagatgggccgcctcgtctccgagggctacgtcctcaccgtgctcgcccccaacgacgaggccatgcgcgcctcaccacggaccagctcagcgagcccggctcgcccgagaacatcctctactaccacatgatccccgagtaccagaccgaggagtccatgtacaacgccgtgcgccgcttcggcaaggtgcgctacgacacgctgcgcctgccgcacaaggtcgtggcgcgggaggccgacggctccgtcaagttcggccagggcgagggctccgcctacctcttcgacccggacatctacaccgacgggaggatctccgtgcagggcatcgacgccgtgctgttcgcgccggacgacaccaaggccacgcagacagccgaccctaacaggaagcctcccgccatcgtcacccacaagaagaagatcaagctccggcgaggcaagttgttagaggcgacgtgccagatggccgggctcttcggtcagcgatcgcgattcgcgagctgccagtagacggagaaaggatctgttgatctccacgacaccgaaagacgaacgaacgaacgaactgatgggctgccgcaggaggagggggagccgtccacattattgcttgtatttttttttccactcttttgtttattgttgagaataataatgaatcaggtgggggatgtaaactctgtgggttgttgttggtgtgtcgtccagagggagaaaaaaaaggagaaaaagaaaggcagccaaaaaaaaattgtccatacatgaatgaagaagcccaggatcgttgtctttgtataggagaaggaattgaaacgtttttgttttgttttctttttctgtcattctttgcttctgttcccgttttgacaatgagaaatatcgggtaaacacacaaccattcttacttattatcc

SEQ ID NO: 96281 - DNA, 2294 bp, Zea Mays
gctgacaatcggccccatacgcgtcggacccacacgtcatccacacgaacccgctgccagggacccacctcggctccgtttcattcatcggttcctccccttccgccccgcttccacgatcgattcaacttgaaggtcctgaaccacccaaccggtaacctcctcgccgcccccgcgtccaatgccaccgccaccgccgtcgccgccgtcgctgccgtccgtgtagcgtccccgcggcgatgggcaacacctgcgtcggccccagtgccgctggccgcaacggcttcctggccaacgtcaccctgtggcggccccgcggcgacgaccccgcgccagccccagccctaccgccgcccccctcccccgcctccgacaaagcgcccgatcccgtcaccatcccagaatctgagcattcctcccaccactcatcccgatccaccgacctgccaccggcccctgcctcccagccgcaggacaaccctacggcgaagaagcccgcgcccaaggtcaagcgcgtccagagcgcgggcctcctcgcggactccgtgctcaagcgcgacgttaacacggctcggctcaaggacatctacaccattggcaagaagttaggtcagggtcaattcggcacaacctacctctgcgtcgagaaggccaccggccgggagttcgcctgcaaatccattgccaaacggaagctgctcacggaggaggatgtcgaggatgtgcgccgcgagatccagatcatgcaccacctcgcgggtcatgccaacgtcgtctccatcgtcggcgcctacgaggacgccgtcgccgtgcagctcgtcatggagctctgcgctggtggggaacttttcgacaggatcatccagagggggcactattccgagaaggcggccgcgcagctgaccagggtgatcgtcggcgtcgtcgaggcgtgccactcactcggcgtgatgcacagggatcttaagccggaaaatttcttgtttgtcaatcaaaaggaggactcgcccctgaagaccatcgattttggactgtccatcttcttcaagccaggcgagatgtttacagatgtcgttggaagcccatactatgttgcacctgaggttctgctaaaatactatggccgtgaggttgatgtctggagtgctggtgtcataatctatatcctgttgagtggagtccctccattctgggatgaaagtgaacaaggaatatttgaacaagttttgaaaggtgacctggacttttcgtcggagccctggcctagcatctcagagagtgcaaaggatttggttaggaaaatgcttattcgtgatccaaaaaagagattgactgcccatgaagccttatgtcacccttgggtgtgtgttgatggagttgctcctgacaagcctcttgattccgctgttctaagccggttgaaacaattttctgcaatgaataaactaaagaaaatggcccttagggttattgctgagagcttatctgaggaagaaatcgcggggttaaaagaaatgttcaaaatgattgacagtgacaacagtggtcatatcacattggaggaactaaaaactggcttgcagagagttggtgctaatttgatggattcggaaatcaatgctctaatggaagctgcagatatcgacaacagtggcacaattgattacggggagttcattgctgcaactttgcatataaacaaagttgaaaaggaggataagctctttgctgctttctcatactttgacaaagacggcagtggttacataactcaagatgagctccaaaaggcatgtgaggagtttggtttaggggatacccgacttgaggacattattggggacatcgatcaggacaatgatggacgaatcgactacaatgagttcgttgcaatgatgcagaaaggagataatcctctggggagaaaggggcatcaaagtaatactagttttggtcttggagatgcacttaagcttcggtaaaataggagcagatgtttaccttcataacgaagttagcattcagagactaagaaaagttgaccaaacaacagccccaaaaccgtgtcccatgcctgtactctggtctccaagcttcagtggtgccctatcaaaattcgggggggtcgttgaagcaacctaggagcgtgaacttttgccggaaagcatcgacctcataaaattaacagtagggtcctcatgctcaacatggcatcttttgatttccctcctttctagttcatacgtagtggcaatgaaaccttgaggccaccgtgtaatttaagtaagcatgag

SEQ ID NO: 96282 - DNA, 627 bp, Zea Mays
atgcaacatgtggctgtgatattcaatgatagaccttcctttagtgaggttgttgctacggctaaggagaagattggttggcatgatgttgatgacattgacgttgatggggtgctaaacgtaggtcctccacccaacgtgcaaagacttatcatcccaattaagtgtcagcgagagtgggataattatgttaaatcagctatgaagatacaaaagcaagtcatggaggtagtggtacgccgtttgttagttgcctctcgccctggagatgaaaactatgatcgtggtgccgaggtcgtgccaactgtgcctgatgctcaatctgcccccaatatgatcccattaagtgatcctacaaatgattgtggcactcatgacctctacctagattctactgagggtatccctttggcaggcaccccctgcaagaagttacctcccatctgtttcgatggccctcttggtccagattattttgaggagacgatttttaactttccagttcaaagtaaaagagatttcaacaatgaggttagacttaggtattacaataacaggagagaagattggtcgaagtgcatgcatggtgaggattgcttggtgcagatgttcgtcgagggggattga

SEQ ID NO: 96283 - DNA, 1911 bp, Zea Mays
gtctgacctccctcctctcctgctggcgccctcgctttgcttccaatgggacggaaaggaaggaaacggtttgtgtttggcgtaaacggcgacgtggaaagctcacccgtatactacagtagcagaataacgcaatgcgatggaatccatctactctcaccaatgcccaatcacatctcgacttgatgctgccaccttttcctaatccagctgctccagcctagctcacgtcgcttccaacagacgccaccagccaccgcgccatcgtctcagtgtcacagcaggaagccgcgctcccgccagccgttagctgctcccaacagcggcgggatcagggcttgcgatttggcagacgcgagtccccccacccccccggccgcttacttcatgcctccatggatccggtcgcggacccgtcgccgtcgcggcggtccctgaagcggaggccgccggcgcggtcgccggagctgtcgcccaagtcgggtccgggggcaggagaggcggcggcggaggggctgatccggcgggtagaggagctggaggcggcggcggcgcggctgcgcggggagaaggaggcggcggaggacgcggcgcggggcctgcggcaggagctcgacgccgagcgggcctccgcggagacggcggccagcgaggccatgctcatgatcgagcgcctgcagcgggagaaggccgccgcgcagatggaggcccgccagttcaagcgctacgccgagagccgcgaggacagggagcgcgaggtccaggaggagctcgcctcgctctccgacctcgccgcctcctaccactcccgcctccagtcccacggcatcgacccggactccttcaccgacgacgacgatgacgagtcgtactcgtacgaggaggtgggcgccgaagacgtggagcagatcggcatggccgcgctgcaggtggagcggaacgttcgcgactcgggcagtggcatggaggtgaaagccatggtcgttggcaatgaccgcggggaggacgaggaggatgccgacgccgacgccgacgacgcggaggagccgtcgtcccccgtggagaaggaattcgagtatacggtggatgttacctgcgcgagtacaacgaagccagctacgtctgtggttgcacagtacgtgggggacggcaactcgggggggctgtatgcaagggtcgaggcgctggaggcggacagggcggccctgcggagggagatcttcgctctgcgggcggagagggcacagctggtgatggccagggagatggcgcggcggctctgctgggagatggttgctgagcagagagccattgtgaagaaagcgctagtgcctgcgagcagtttctcagtgatcaggatatgcaagtgggtgctctcaatactattttggagaaacagaagctctacagccaagtacacctttggtttgtcgactacgttccttggcctcctgctgcttcttgacagatccgcattgttgagttcctggcgacgtctgccatggccacaaagatgaatgcaaccttctccataccaacagccaaatgcccttaaattcagagatttgaacagttaagctttattgtgcatgtgtattgattctttggtgtttctttttccttttgccacgtacagtattggagctgtacgttttttttcctgaagctttgagctgccgtatagtgtgtaatttagactactaggcttgaatagtttgtaatttggggcgacatgctctgtatagagtgtacatcatagtaagttgtggaactccgatttgttttgtatcgtcgtggtgaccttgcttaatgtcagatgtcgaaggccattacgaggccttttttcgacgtttttgaagctgtagataaggtgattttgtatttttattattacatggtcccgacttgttt

SEQ ID NO: 96284 - DNA, 521 bp, Zea Mays
ctatgattcatccttgagaaaactaaataccttttctgcagtgggtgctctcaatactattttggagaaacagaagctctacagccaagtacacctttggtttgtcgactacgttccttggcctcctgctgcttcttgacagatccgcattgttgagttcctggcgacgtctgccatggccacaaagatgaatgcaaccttctccataccaacagccaaatgcccttaaattcagagatttgaacagttaagctttattgtgcatgtgtattgattctttggtgtttctttttccttttgccacgtacagtattggagctgtacgttttttttcctgaagctttgagctgccgtatagtgtgtaatttagactactaggcttgaatagtttgtaatttggggcgacatgctctgtatagagtgtacatcatagtaagttgtggaactccgatttgttttgtatcgtcgtggtgaccttgcttaatgtcagatgtcgaaggccattacgaggccttttttcg

SEQ ID NO: 96285 - DNA, 750 bp, Zea Mays
ttggtgcagctgccatgaccatgaccgtggccgccatgccttcctccgaggcgtcgtcgtctccttccaagcgagctgctcctgctaccggcctccgagggccgcggccgctgccgctgaaggtgtcgtcgtcgtcgtcgtcgcggggctcctcgccggcgccgacgacggcgtccactaccaccaccaagaagccggtgatcgtgtacgaacacacgcccaaggtcatccacgccaggccgcaggagttcatgaccgtcgtgcagcggctcaccggcaagccccctgccacgacgacgacgtcgtcctcgtccttgccgacgatctcgcccgcgacggccgaggagggcggcgccggcgaccctctcctgctcacgctcggccagcgccgggccgcgccggcgccaccaacgacggcgacgacgacgcagctgtcgtcccccatgaccgccgggacgctgctgtccccgggcatcatcttctcccccaacaccatgcagaccatccaggagctcagccccttgttctaattctaatcaagctatttagtactgtaatgtttttatacataggctgagtgtacaagaattttcagtttttttttcgcgctgttcgtgcaaaatttccacttgcatgcacacagggtgggtaaatttctcacgcacagcgcggtttgcttgccttgttgctacttgctgctgtgcatgccatgacgtcacgcagcagcaatggtaaatttcttgtttccac

SEQ ID NO: 96286 - DNA, 1939 bp, Zea Mays
gccacagctagcacagcactcataagttaagttgtatagctagagatagatcgagcgagcagctatctatctatctatcttagcggcatatatcgcgaaacatagctagctggagtgagttttgtaatcatggacgtcgccaacaaagtaggcaagcagcttaagttcgacgtctcgtcgaaggcggaccggcaacgcttcaatacgactttcatccaggagattcgccgtgagctcggtgacacaagcgtgatgcaggaggcgttccagctcccgcctcagacggacaccccgagcttccaggacctcgtgctgatcgccggcgagagcaccgccaccctgcggctgcgtaccgacaacctctacgtcgtcggcttccgcaaccaagccggccggtggttcgagttccggcacgagaacggcggacttcctccgatcataccaggggcgacgatgctgcacttcagcgggagctacgtgggcaccaacagtctagctccgctaaatcgtccacgagatgtcaatatcggtcgccacacgatcgagagtgctgtgcacagcctggcccagtcgacgggagaagaggatcaaaggctgaaagactggttgcgcacgctgatcgtgagcttcatcgagtcgatcaggttcaactcggtggccagcgcggtggccgaagcgctgcgcaacgaccaagtaaatcagctcgaggagcaccacatccaccaaatccgcaactggagtgccatctccacggcgctactcgccgccgccaacgacgtcgtccaagaccccgacaccaacctcttcagccagttcgccaacgagtgcaggatacgcaacgcctaccaagcggccatcacgctcggcctggtgctcgtcacggccaggaccaatcgccgccatccccgcgcggccgacaccgccgccctcgggctcacccttgtggaagtcgtgtcggtgcggatcctctacatcgacggggaaagacccggcgacctctacgggacggtcagagtcgtcgactccttcggcggcgtgcacgtgtacgaccagcccagaggcagcgcgcagtcggtctaccccggggacaacgccaagctcgtctggccgtctcgtgtcgtgtcggccgccgacgacttcgtcatcgacgtccacctcatggaccgggacacagacccatcgccggacgatgaggtggccaaggggatggtggcgtggaactcccgcgacgccctcagcagccaccgcaacgtcgtgacgagccagctcatcacgggcgagtacggctcggcacaggtcttctacgcggtgttgaccaacgccgtggtggccaccgtcgccgtcctgctcatcaacggcgacgacgagagcgtccccgacgtgtacggctccatcacagccaggaccgacatgtccgccgccagcaactcgctccagtaccagctgttcaaaagggggcagaaccaagatgtgggtgtgccggccaatacctacataccccttaacaggaaggtggtcgcggcggcgctgggctcgccgttcaaggtggacgccgacctgtgggacagagacagggacccctcccctgacgaccagatcgcgctaggctccgtctccttcaacccacgcttcgtcggcacggacaatgccaggatcaccgggaagtacggcgagattgaggtgcaggtcacctggtcatcctccgtcatccaaccctagctaggtcatccatcttattacaataataatgaataaaccaagatcgagcgaatccaacgattcctgcatagataagatcgatcgatcgatcgatctcgaagtgtttagtttttgtatgccaataaaccgcatgcatgcttgcggggatcaataaataaatgttctactctataattagtaccagtagttatgcacacacgttaataaaaaccagtcgatt

SEQ ID NO: 96287 - DNA, 4077 bp, Zea Mays
atggggaaggcgccggccgcggtggtggtggccgtgaacgggcagcgttacgaggccaccggtgtggatccgtcgacgacgctgctggagttcctgcgcacccagacgcccgttaggggccccaagctcggctgcggcgaaggtggctgcggtgcgtgcgtggtccttatctccaagtacaacccggccaccgacgaggcgaccgagttctcagcgagctcctgcctgacactgctccgtagcattgaccgctgctcagtgaccacgagcgagggcattggcaacaccaaggatggctaccacgcggtgcagcagcggctcgcaggcttccacgcttcccagtgcggcttctgcacgccgggcatctgcatgtcaatcttctcagcgctggccaaggccgacaaggtggccagccgccctaccccgcccacaggcttctccaagctcaccacctcggaggctgaaaaggccgtgtccggcaacctgtgccggtgcaccggatacaggcccatcgtcgacgcctgcaagagcttcgcggcggacgtggaccttgaggatctgggtctcaactgcttctggaggaagggcgatgaacctgctaccgtcagcaaactacctggctacagtagtgctgcagtctgcaccttccctgagttcctcaagtctgagatcaagtcctctagggagaatgcagatggtgctgcagtagcagtctccagtgatggctggtaccatcctcaaagcattgaagagctccacaggttgtttgattcctactggtttgatgaaagttctgtgaagattgtggctgcaaacaccgggtctggagtgtacaaggatcaggacctctatgacaagtacattgacatcaaaggaataccagagctatcagtcatcaacagcagcgttaagggaattgagcttggatcggttgtgtccatctctacagccattgaggtgttgtcagatggaaatctgatcttcagaaaaattgccgatcacctaagcaaagtggcttcgccatttgttcggaacacagcaaccataggtggcaacataatcatggcgcagaggttgccattcgagtcagacatagcaactgtgctactggctgcaggtacaacagtcacaattcagacagcttccaaaaggttgtgccttactttggaggagttcttgcagcagtctccatgtgattctaggaccctgctgatgagcatattcatcccaaagtgggattcagatggcatcacctttgagacattccgggcagcgcctcggccatttggcaatgctgcttcatatgtcaatgctgctctcttggcaaggacttcaactgatgcagcttcagggaagaacatcatggaggatatatgcttggtgttcggtgcttatggagctgaccatgccatcagagctagcaaggtagaggattttctaaagggaaaatcactgagctcttctgttatacttaaagcagttcagttgcttaaagagacggtttcaccaccagaaggcacaacacatcctgagtatagggtcagcttggctgtcagcttcttgttcaccttcttatcctccttaaccaacagcatgaatgaaacagcaaaggttaatgttatcaatggatcacttactaatagaactacaaatattagcggtgggtactcactgaaggaaaatcttgaggttgacagaaattatttaccaatacactcaagacaagaaatggttttcggtgatgaatacaagccagttggcaagccgatcaagaaagtcggggcagagctccaagcttctggggaggctgtgtacgttgatgatatccctgttcccaagggttgcttgtatggagcatttatctacagcacacgccctcatgctcatgtgaagggcatcaacttcaaatcatctttggcttcacagaaggtcatcacagtcattactgcaaaggatattcccagaggcggacaaaatataggatccagcttcccgatgttaggagaagaagtgctttttgcagatcaagttgttgaatttgctggtcaaaatattggcatcgtgatttctgaaacacaaaggtatgcttatatggctgcaaagcaagctgttgttgagtatagcacagaaaatttgcagccaccaattctgactatacaagatgccatccaacagagcagctacttccagattcccacatttttatctcctaagccagttggtgattacaaccaaggggtttctaaggctgatcacactttgtcagcagaggtaaagcttgaatcccaatactatttttacatggagacacaggtggcactggctattcctgatgaagacaactgcataaccatctattcctcgacgcaatttgttgagatcacacaagatgtagttgcaaggtgccttggcattccgttgcacaacgtccgtgtgatcacaagaagagtcggcggaggctttggtggaaaggcaatgaaagcaatacacattgcatgtgcatgcgccgttgccgcattcaagctacagcgtcctgttaagatgtaccttgatcgcaagacggacatgataatagcgggtgggcgacaccctatgaagacaaagtattctgttgggttcaaatcagatggcaagatcacagccgtgcacttggaccttggtctcaatgctggaataacaccggatctgagtgcaatattgccaaatactatcattggtagtttcaaaaagtacaattggggggctcttgcatttgacatcaagctctgcaagacgaatgtctcaccaaagtcaacaatgcgggctcctggagaggtgcagggatcatttattgcagaagccatcgttgagcatgttgcatcggtgctctcagtcgataccaacaccattaggaggaagaaccttcatgacttcaagagtcttgcagcgttctacggagagagtgcgggtgaagcacccacatacacgctggccaccatgtttgataagctggccttgtctccagactaccagcacagagctacaatggttgagcacttcaatagcagcaacaagtggaagaaacgtggcatttcttgtgtacccatcacatatgaggtgagtcttcgggctgctccaggcaaggtgtctatcatgaatgacggttcaattgctgttgagattggaggggttgagataggccagggcttgtggacgaaagtgaagcagatgacagcatttgggctgggacaactgtgtgctgatggcggggaatgcctccttgacaaggtgcggattatccaggtcgactcgttgagcatgatccagggagggttcaccggtgggagcaccacttctgaaaatagttgcgaagcggttcggcattcgtgccttcgacttgttgaaaggctcaagcctgtaaaggagagtttggaggctaagggtgccacaatggaatggggtgccttgattgctcaggcaagtatggcgagtgtgaacttatcagcgcatgcatactggaacccaacttccaggagttacttaaactatggagctggcattagtgaggtggaagttgatgtactgacaggagcaaccacgatcctacggagcgacctcattcatgactgcgggcagagcctgaaccctgcagtagaccttggccaggtggaaggcgcattcatccaaggagtgggcttcttcacgaacgaggagtacaaaacgaacaccgacggcatggtcatccatgacggcacatggacgtacaagattccaacggtcgacaccatcccgaagcagttcaacgtcgagttaatcaacagcgctggcgataggaagcgtgtcctttcatccaaagcgtcgggcgagccaccgcttcttctcgcgtcgtcggtgcactgtgcgatgagggaggccatcagggccgccaggaaggagttctctatctgcaccgggcccgcgaactccgccgtcacgttccagatggacgtgccggcgacgatgcccgtcgtcaaggagctctgcggactcgacgtcgtcgaacgttacctccagagcgtgtcagccggcccaaccaccccgagagccattagcaaataa

SEQ ID NO: 96288 - DNA, 1707 bp, Zea Mays
ccctcgtcacaccgctcccgctctcatcactccactccatcccctcctctctctccatgcactcactctcgtcactgagacagtgagactagcaaggctatcgcctagctactagctagctcgtactggagcgagcactgtcagtaattgctcgtttcaaggaaccgacctgtgccaatcaagtagcagtgccagtacgtcgtacggttagctcttagctacctcctgcgtgtgtgttcgcgatggcgtcggagtgggaaatggccgccatgggggtggagctcggcatgggaatgggcggcacgtaccaccacaacgcctccagcatcaccacggcgccgacgagcagccaccacagcggcggcgccgggtactccgcggcgcaccaccaccattactacggcatgccgcccgtgggcggcgacgccacggccatgcgcgtggacgaccttctcgagaatctcgacctctccaccggcgctggcgcccacgagttcttccccaccgcggctgctgccaacaagggacaccaccactcggggggcgccatggtcggtgagccgtcgcccacggccaactcgtcggaccaccagacgtcgctcctctccttcgccgacgagttctacatacccgtaagtaccaaaattattgaataatatgacgaatttattaatacctgtgccggcatgcatgtgctacctagctactgtgcttagagaggtttcgatttcatcagatctctaaacaattgcgatatatatatatgatgatccagagcgaggaagctgccgagctggagtggctgtccaagttcgtggacgactcctactcggacatgccgaattactcgtcggccacgcacgccgcaatggcagcagcggcagcggcagcggctgcggctgcgaacaccgccggcactagagcaggaggcacctcgggcgggcaggacagctgcgccaccgcggcgcccggccgcggcgcgcgcagcaagcggtcgtcccgcgcggccgccgcggcgtggcactccctcgtgccgcgcccgccatcgcagccgtccccgtcaacgtcctgctcgtcctcggacttcacgccggcgtcgacgaacaacaagccggcacgcccgagcaacggcggcagccgcggcaggaagagcccggggcccgccggggaggtagtggcagtgggcgtggagggcggcgtgcgccggtgcacgcactgcgcgtcggagacgacgccgcagtggcggacggggccgctgggccccaagaccctgtgcaacgcgtgcggcgtgcggttcaagtccgggcggctggtgcccgagtaccgccccgcgtccagccccaccttcgtgctcacgcagcactccaactcgcaccgcaaggtcatggagctgcgccgccagaaggagctcgtcctcatccgcggaacccaccgtgacgcttcggcggcagcggcgggatccgccgggccggagctcatgttccgtgactacggcgtgtgttgattagctgcctgcccggcaaggcaaccggcacggaggaagctctcgcgtcgtgcatttgcgtgcatggatcggagcttgctagatctttctgcgaaatattccagatatttccattatttctcttttttttgttaattattactattaaaattgttattgcctacctagctccccgccctgctttttttttctaagctctatga

SEQ ID NO: 96289 - DNA, 2115 bp, Zea Mays
gcttcggcagacagttgcgcaggctacagctcatgggagtcacgtggtcgtgtgcattcattgcggttaaagtaaccggattctttctccaccccctctgtttcttcagttttttttttcttcttttaatagttttgtaaagtactgggggactgctggtactggtaatggtacagccagtagctaacggaattatgccatggagagggagagtagtgtgtgaatgactgcgtgtgagacgagtggtggtggtggtggagcatatgaatgtgggtgcatgcgacggagcacgttgggggggggggtctctgctgcactgcagcttcctcgcccctctgcgctaatctaatcctatgtttaccccccgtaatgcacagcacaacttttgtcaaacacacacacacatgccactagctccatctctctcctcacatcacctctatattaattactactccgcatcaacccctttccctctgttactactggtgaatggtgatcaagtgactggagccccccgatcgagagcacagcacagcactatttcttccccctcgtcacaccgctcccgctctcatcactccactccatcccctcctctctctccatgcactcactctcgtcactgagacagtgagactagcaaggctatcgcctagctactagctagctcgtactggagcgagcactgtcagtaattgctcgtttcaaggaaccgacctgtgccaatcaagtagcagtgccagtacgtcgtacggttagctcttagctacctcctgcgtgtgtgttcgcgatggcgtcggagtgggaaatggccgccatgggggtggagctcggcatgggaatgggcggcacgtaccaccacaacgcctccagcatcaccacggcgccgacgagcagccaccacagcggcggcgccgggtactccgcggcgcaccaccaccattactacggcatgccgcccgtgggcggcgacgccacggccatgcgcgtggacgaccttctcgagaatctcgacctctccaccggcgctggcgcccacgagttcttccccaccgcggctgctgccaacaagggacaccaccactcggggggcgccatggtcggtgagccgtcgcccacggccaactcgtcggaccaccagacgtcgctcctctccttcgccgacgagttctacatacccagcgaggaagctgccgagctggagtggctgtccaagttcgtggacgactcctactcggacatgccgaattactcgtcggccacgcacgccgcaatggcagcagcggcagcggcagcggctgcggctgcgaacaccgccggcactagagcaggaggcacctcgggcgggcaggacagctgcgccaccgcggcgcccggccgcggcgcgcgcagcaagcggtcgtcccgcgcggccgccgcggcgtggcactccctcgtgccgcgcccgccatcgcagccgtccccgtcaacgtcctgctcgtcctcggacttcacgccggcgtcgacgaacaacaagccggcacgcccgagcaacggcggcagccgcggcaggaagagcccggggcccgccggggaggtagtggcagtgggcgtggagggcggcgtgcgccggtgcacgcactgcgcgtcggagacgacgccgcagtggcggacggggccgctgggccccaagaccctgtgcaacgcgtgcggcgtgcggttcaagtccgggcggctggtgcccgagtaccgccccgcgtccagccccaccttcgtgctcacgcagcactccaactcgcaccgcaaggtcatggagctgcgccgccagaaggagctcgtcctcatccgcggaacccaccgtgacgcttcggcggcagcggcgggatccgccgggccggagctcatgttccgtgactacggcgtgtgttgattagctgcctgcccggcaaggcaaccggcacggaggaagctctcgcgtcgtgcatttgcgtgcatggatcggagcttgctagatctttctgcgaaatattccagatatttccattatttctcttttttttgttaattattactattaaaattgttattgcctacctagctccccgccctgctttttttttctaagctctatga

SEQ ID NO: 96290 - DNA, 934 bp, Zea Mays
gcgcaattagcaagcgattttgttggaggttgcagatttgcagctaaagttctttaaacctgacatttcattgggattttgcaaatggtcatcgcaggtggaagttgatatcctaacaggagcaaccacaattctgcgaagcgacctggtgtatgactgcgggcagagcctaaaccctgctgtagacttgggccagatcgagggctgctttgtccaaggaatagggttcttcacgaacgaggactacaagacgaattccgacggcttggtcatccacgacggcacatggacgtacaagatccccacggtggataatatcccgaaggagttcaatgttgagatgtttaacagcgcccctgacaagaagcgtgtcctatcttccaaagcgtcgggcgagccgccgctggttctcgcagcctcggtgcactgcgcgatgagggaggccatcagggcggcgaggaaggagttctcggtcagcaccagccccgcgaaatccgccgtcacattccagatggacgtgccggcgacgatgcccgtcgtcaaggagctctgcggcctcgacgtcgtggagaggtacctcgagaacgtgtctgccgccagtgccggcccaaacacagcgaaagcatagatccagcaggcctcagggtgcagtcggcgcactgccagagatgatgtgtgctgccctgatgtacagacagtacagtacagaggagagagaattgggggaactcaggaactgcgaggagcgatgaacagtatatagagtgaaaaataaaagtgcttcgtactaataatcactagaaaaaattatgcacatctcccacgcactaccggcacgactgttgaatattttgtaaaataagatgtcataagctatttattttctgtatgattagatcagcaaataatttaattcaagtataaatcacagaaa

SEQ ID NO: 96291 - DNA, 4428 bp, Zea Mays
gtgttgtgttgtgttgtgttgcgtgctgtggagggggaggaggagatggggaagggggcaggagcagcggagccgtcgacggtggtgctggccgtcaacggcaagcgctacgaggcggccggcgtggctccgtccacgtcgctgctggagttcctccgcagccagacgcccgtcagaggccccaagctcggatgcggcgaaggtggctgcggtgcatgcgtggtcctcgtctccaagtacgacccggccacggacgaggtgaccgagttctctgccagctcctgcctgacgctgctccacagcgtggaccgctgctcagtgaccaccagcgagggaatcggcaacaccagggatggctaccaccccgtgcagcagcgcctctccggcttccacgcctcgcagtgcggcttctgcacacccggcatgtgcatgtccatcttctccgcccttgtcaaggccgacaacaagtccgatcgcccggaccctcctgctggcttctccaagatcactacctcggaggcagagaaggctgtctcgggcaacctttgtcgttgcaccggatacagacccattgttgacacctgcaaaagctttgcctctgatgttgacctcgaggacctaggcctcaactgtttctggaagaagggcgaagaacctgcagaagtcagcaggctgccggggtacaacagcggtgccgtctgcacctttccagagtttctcaaatccgaaatcaagtctactatgaagcaggtgaacgatgtccccattgcagcctcaggtgatggctggtaccatcctaagagcattgaagagcttcacaggttgtttgattccagctggtttgatgacagttctgtgaagattgttgcttcaaacactgggtctggagtgtacaaggatcaggacctctacgacaagtacattgacatcaaaggaatcccagagctttcagtcatcaataaaaacgacaaaggaattgagcttggatcagttgtgtccatctctaaagctattgaagtgctgtcagatggaaatttggtcttcagaaagattgctgatcacctcaacaaagtggcttcaccgtttgttcggaacactgcaaccataggaggaaacataatgatggcacaaaggttgccatttgaatcggatgttgcaaccgtgctcctagctgcgggttcgacagtcacagtccaggtggcttccaaaaggctgtgcttcactctggaggaattcttggaacaacctccatgtgattctaggaccctgctgctgagcatatttatcccagaatggggttcagactatgtcacctttgagactttccgagccgccccacgaccatttggaaatgctgtctcttatgtaaactctgctttcttggcaaggacatcaggcagccttctaattgaggatatatgcttggcatttggtgcctacggagtcgatcatgccatcagagctaagaaggttgaagatttcttgaagggaaaatcgctgagctcatttgtgatacttgaagcaattaaactactcaaagataccgtttcaccatcagaaggcactacacatcatgaatacagggtcagcttggctgtcagtttcttgttcagtttcttatcttcccttgccaacagttcgagtgcaccatcaaatattgatactcccaatgggtcatatactcatgaaactggtagcaatgtggactcacctgagaggcatattaaggttgacagcaatgatttgccaattcgttcaagacaagaaatggttttcagcgatgagtacaagcctgttggcaagccgatcaagaaagtcggggcagagatccaagcatcaggggaggctgtgtacgttgatgatatccctgctcccaaggattgcctctatggagcatttatctacagcacacatcctcatgctcatgtgagaagtatcaacttcaaatcatccttggcttcacagaaggtcatcacagttataaccgcaaaggatattccaagcggtggagaaaatattggaagcagcttcctgatgcaaggagaagcactatttgcagatccaatcgctgaatttgctggtcaaaatattggtgtcgtgattgctgaaacacaaagatatgctaatatggctgcaaagcaagctgttgttgagtatagcacagaaaatctgcagccaccaattctgacaatagaagatgccatccaaagaaacagctacatccaaattcccccatttttagctccaaagccagttggtgactacaacaaagggatggctgaagcagaccacaagattctatcagcagaggtaaaacttgaatcccagtactacttctacatggaaactcaagcagcactagcgattcctgatgaagataactgcataacaatctattcctcgacacaaatgcctgagctcacacaaaatttgatagcaaggtgtcttggcattccatttcacaatgtccgtgtcatcagcagaagagtaggaggaggctttggtggaaaggcaatgaaagcaacgcatactgcatgtgcatgtgcccttgctgccttcaagctgcggcgtccagttaggatgtacctcgatcgcaagacggacatgataatggctggagggagacatccaatgaaggcgaagtactctgttgggttcaagtcagatggcaagatcacagccttgcacctagatcttggaatcaatgctggaatatcaccagatgtgagtccattgatgccacgtgctatcataggagctctcaaaaagtacaactggggcactcttgaatttgacaccaaggtctgcaagacaaatgtctcatcaaagtcagcaatgcgagctcctggagatgtgcagggctctttcatcgctgaagccatcatcgagcatgttgcctcagcactcgcactagacactaacaccgtcaggaggaagaaccttcatgattttgaaagccttgaagttttctatggagaaagtgcaggtgaagcttctacatacagcctggtttccatgtttgacaagctggccttgtctccagaataccagcacagggctgcaatgattgagcagttcaatagcagcaacaaatggaagaaacgcggcatttcttgtgtgccagccacttatgaggttaatcttcgaccaactccaggcaaggtgtcaatcatgaatgatggttccatcgctgtcgaggttggaggaattgagataggtcaaggattgtggactaaagtgaagcagatgacggcctttggactgggacagctgtgtcctgatggtggcgaatgccttctggacaaggttcgggttatccaggcagacacattaagcctgatccaaggaggtatgactgctgggagcaccacttctgaaactagctgtgaagcagttcggcaatcgtgtgttgcacttgttgagaggctgaagcctatcaaggagagtctcgaagctaagtccaacacagtggaatggagtgccttgattgctcaggcaagcatggcgagtgtgaacctatcagcacaggcgtactggactcctgatccatctttcaagagctacttgaactacggagctggcaccagtgaggtggaagttgatatcctaacaggagcaaccacaattctgcgaagcgacctggtgtatgactgcgggcagagcctaaaccctgctgtagacttgggccagatcgagggctgctttgtccaaggaatagggttcttcacgaacgaggactacaagacgaattccgacggcttggtcatccacgacggcacatggacgtacaagatccccacggtggataatatcccgaaggagttcaatgttgagatgtttaacagcgcccctgacaagaagcgtgtcctatcttccaaagcgtcgggcgagccgccgctggttctcgcagcctcggtgcactgcgcgatgagggaggccatcagggcggcgaggaaggagttctcggtcagcaccagccccgcgaaatccgccgtcacattccagatggacgtgccggcgacgatgcccgtcgtcaaggagctctgcggcctcgacgtcgtggagaggtacctcgagaacgtgtctgccgccagtgccggcccaaacacagcgaaagcatagatccagcaggcctcagggtgcagtcggcgcactgccagagatgatgtgtgctgccctgatgtacagacagtacagtacagaggagagagaattgggggaactcaggaactgcgaggagcgatgaacagtatatagagtgaaaaataaaagtgcttcgtactaataatcactagaaaaaattatgcacatctcccacgcactaccggcacgactgttgaatattttgtaaaataagatgtcataagctatttattttctgtatgattagatcagcaaataatttaattcaagtataaatcacagaaa

SEQ ID NO: 96292 - DNA, 4649 bp, Zea Mays
gcgcgcgggcaggcgtgtggcgcggctgtgtcgtctgtgagtgcatgcgaggcctccggttccggctctctctctcggtgcagttcgtccgggagggggagagcgaggtggagtggtgctaagccaagccaactagatcgagtcgtcaagaaggttggagaggagagatcgagatggggaagcaggcggcggtggtgctggccgtgaacggcaagcggtacgaggccgccggcgtggacccgtcgacgacgctgctggagtacctgcgcacccagacgcccgtcaggggccccaagctcggctgcggcgaaggtggctgcggtgcatgtgtcgtccttgtctccaagtatgacccggccaccgacgaggtgaccgagttctcagcgagctcctgcctgacgcttctccacagcgtggaccgctgctcggtgaccaccagcgagggcattggcaacaccaaggatggctaccaccctgtgcagcagcgcctctccggcttccacgcctcccagtgcgggttctgcacgcccggcatgtgcatgtccatcttctccgcgcttgtcaaggctgacaaggcggccgaccgcccagccccgcctgccggcttctccaagctcacttcctccgaggctgagaaggccgtctccggcaacctgtgccggtgcaccgggtacaggcccatcgtcgacgcctgtaagagcttcgcggccgacgttgatctcgaggacctgggcctcaactgcttctggaagaaaggtgacgagcctgcagatgtcagcaagctgccaggctacgacagtggtgccgtctgcactttccccgagtttctcaaatctgagatcaagtcctcagtcgagcaggttaacggcgctccagttcctgtttctgacgacggctggtaccgtcccaagagcattgacgagcttcacaggctgtttcaatctgagtccttcgatgaaaattctgtcaagatagtagcttcaaacactgggtccggggtgtacaaggatcaagaccttcatgacaagtacattgacatcaaagaggtcccagagctttcagtcatcaacagaagcaacaagggggtcgagcttggatcagttgtgtccatctctaaagcgattgaggtgctgtcagatggaaatgtggttttcgaaaagattgcagatcacctgaacaaagtggcctctccgtttgttcggaacacagcaaccattggtggaaacatcattatggcgcaacggttgcaatttccctcggacattgtgactgtactactagctgcaggtacaactgtcactatccaggtggtttccaaaaggctttgcctcaccttggaggagttcttgcagcagcctccatgtgattctagaaccctgttgctgagtatatttatcccctattggagttcagatggcatcacctttgagaccttccgagcagcacctcgtccacttggcaatgctgtcgcatacgtcaattcagctttcttggcaaggacttcagtggatgcagcatcaagggaccatctcattgaggatacatgtttggtgttcggtgcatatgggactgatcatgctattagagctagcaaggttgaggattacctgaagggcaaaacagtgagctcgactgttatacttgaagctgttcggttgcttaaagcgactgtcaaaccatcagaaggcacaacacatcctgagtatagaatcagcttggccgtcagcttcttgtttaccttcctatcttcccttgtcaacaatgagtcaacaaaggttaatggtcccaacgggtcatgtagtaatggagccacaaacggtgcccttgagcactcaccagagaagcatcttaagtttgacagcaacgatttgccgatacggtcaagacaagaaatatttttaactgatgaatacaagccagttggaaaaccaattaagaaagcaggtgcagagatccaagcttcaggggaagctgtgtacgttgatgatatccccgctcccaaagattgcctctatggagcatttatctacagcacccaccctcatgcccatgtaaaggctatcaactttaaatcatctttggcctcgcagaaggtcatcacagttatcaccgcaaaggatattcccagtggtggacaaaatattggttccaccttcccgatgatgggagacgaagcactttttgcagatccagttactgaatttgctggtcagaatattggtgttgtgattgctgaaacacagaagtatgcctacatggctgcaaagcaagccattattgagtatagcacagaaaatctgcagccaccaattctgacgatagaagatgcgatccaacgaaacagctacttccaagtccccccatttttagctcctaagccagttggtgattacaacaaagggatggctgaagctgatcaaaagattctatcagcggaggtaaaacttgaatcccaatactatttctacatggagacacaagtggcgctagctattcctgatgaagataactgtataaccatctattcttcgacacaaattcccgaggtcacacaaaatgtggttgcaaagtgccttggcattccatttcacaatgtccgcctcatcagcagaagagtcggaggaggctttggtggaaaggcaatgaaagcaatacatgttgcatgtgcatgtgcggttgctgcattcaagctgcggcgtccagttcggatgtacctggatcgcaagacagacatgataatggcaggcggtcggcatcctatgaaggtgaagtactctgttgggttcaagtcagatggcaagatcacagccttgcacattgatcttgggatcaatgctggaatatcaccggatgtgagcccaatgttgccacctgctatcataggtgctctcaaaaagtacaactggggcaatcttgcatttgataccaaggtctgcaagacaaatgtctcatcaaaatcagcaatgaggggtcctggagatgttcagggctctttcatcgctgaagccatcattgagcatgttgcctcagcactttcagtcgacactaacaccataaggaggaagaaccttcatgactttgagagccttgtggtgttcttcgaagatgctgcaggtgaagcttctacctacagcttagttacgatgttcgataagctggcctcctctccagaataccagcgccgagctgcaatggtggagcacttcaacagaagcaacaagtggaagaagcgtggcatttcttgtgtgccaattacatatgaggtcaatcttcggccaactccaggcaaggtgtctatcatgaatgatggttccatcgttgttgaggtcggaggggttgagataggccaagggttgtggacaaaagtgaagcagatgacggcattcggattgggacagctgtgccctgacggcggcgaaagcctcctggacaaggtccgggtcatccaggccgatacattgagcatgatccagggagggttcaccggtgggagcaccacttctgaaactagctgcgaagctgttcgacagtcgtgtgttgcgctggttgagagactgaagcccatcaaggagaatctggaagctgaggcaggcacagtggaatggagttccttgattgctcaggcaagtatggcgagtgtgaacttatcggcacatgcatactggaccccagatccaactttcagaagctatttaaactacggagctggcattagtgaggtggaaattgatgtgctgacaggagcaacaacaattctaaggagtgaccttgtctacgattgcgggcaaagcttgaaccctgctgtcgacttgggccaggtggaaggcgcattcatccaaggagtaggcttctttacaaacgaggagtacacaacaaactctgaggggttggtcatccacgatggcacatggacgtacaagatccccacagtcgacaccatcccaaagcagttgaacgttgagctgatcaacagcgcccgtgaccagaagcgtgtcctctcttccaaagcatccggcgagcctccgcttcttctagctgcctcggtgcactgcgcaatgagggaggccatcagagccgccaggaaggaattctcggtctgcactggtccagcaaactctgccatcacgttcgagatggacgtgccggcgacgatgcccatcgtcaaggagctctgcggcctggatgttgtggagaggtacctggagagcatgtccactgccggaccaacaaccactgccaaagcatagatccagcaggtgcaccgcccatggtgagagagcttaataggtctgtgtaaaacactgaacagcatgacatgccaagcttacatgtgttagctctgatgtacagaagacgaggtagcaatgggagctgtggtcttgtgaatcaggatccatgaacattagaggaaaaaataaagtaaataagtgtcgggcagacaaatgtgtggatgaaatcatgtggttttgattggattttgaagaaatttttgcaatgaatctccgttcatactcctaggtgtgtacctgcctactgggtacatgggggataggattgtaccatccagctaggtttggccttgctgtctcgttgtgaccttcaccggtagctactccctgcgcacctatttgaactagcagagcagtgtt

SEQ ID NO: 96293 - DNA, 1876 bp, Zea Mays
agctggcattgtcccgtcccctgtcgacttcctctccatttcatttccgttccaggtctcctgtttccatcctcttccacggttccacttccacccccatctcctcgccctcggcaagcccagcaaccccaatccccaatcccgtccgcttctttccccgtccccgaccttgccgaggaacctcccgctcccaaatcctagcctctcctccctcgccgctcccctccccatggaggacgaggacgccggcctcggcgacgggggcgaggcctcccctccgcaccatgccgcggcgtcgggcgaccgggcgcgggacttggcggcgtccccgaccagctcgcgctccgtgacgcagacggtgaacgggtcccaccgcttcgtgatccagggctactcgctcgccaagggcatgggcgtggggaagcacatcgccagcgacaccttcaccgtcggcggctaccagtgggcgatctacttttacccagacgggaagaaccccgaggacaactccggctacgtctcggtcttcatcgcgctcgcgtccgacggcaccgacgtgcgcgcgctcttcgagctcacgcttctagaccagagtggcaagggcaagcacaaggtgcactcgcactttgaccgctccctagagtccggaccgtacactctcaagtaccgcggatccatgtggggctataaaaggttctttcggcgtaatgctcttgagcaatcagattttcttaaagatgattgcttgaagataaactgtactgtgggtgttgtagtatcaactatggattattccaggccacattcaatagaggttccagagtctgacataggctatcattttggaactcttttggacactctggaaggtgtagatgtcatttttagtgtagcaggagagaagtttcatgcccataagttggtattggctgcccgatcttccttttttagatctgaatttttcgaccatgaatctgatgaagagaagaacgaaactggtacaggggatgaaatcaaggagatcgttattgatgatatggatcctgtagtgttcaaggcggtgcttcactttatgtacagggacaatcttgttaatgatgatgagttgatggcatcaagctctgactgctctatatttgatagtttagctgggaagttaatggctgctgcagacaaatatgagttgccaaggctaagattgttgtgtgaatcttacttgtgcaagcatgtttctgtaaactccgtggcaactactctagcattggctgatcgataccatgctatcgagcttaaatctgtttgcctaaaatttgctgctgaaaacctttcggctgtgatccggaccgaggggttcgactatctcaaagacaactgcccatccctgcagtcagagatactgcggacagttgccggatgtgaggaacaatgtagcagcggcgtgaaaagccagagcgtatgggcgcagctctctgacggcggcgacaccagcggtcgcagggatgttttttcttaaccaagcaaaaactactagtcgttcacaacttctgatcgtgtcgtcatcaacgaccacgtgcaggcggacgcgatgaactcacagaagggcgacccgagttgacggtggtttaaacagacacaatgaagctaatcgttcacaacttcagtacaaaactacacaggcaagacactgcctgatacagtgcgatagccgctgccatcctctcttcgcttcgcgggtggcaacccaatgccttgaggttttgctcaaccaaatgtcgccaccaggaactccttgtaaacgctcatgaacttggccacgaaagctgtagagtggaatgggggaataagttaagtatatatggcttctgtattaataatc

SEQ ID NO: 96294 - DNA, 1933 bp, Zea Mays
agctggcattgtcccgtcccctgtcgacttcctctccatttcatttccgttccaggtctcctgtttccatcctcttccacggttccacttccacccccatctcctcgccctcggcaagcccagcaaccccaatccccaatcccgtccgcttctttccccgtccccgaccttgccgaggaacctcccgctcccaaatcctagcctctcctccctcgccgctcccctccccatggaggacgaggacgccggcctcggcgacgggggcgaggcctcccctccgcaccatgccgcggcgtcgggcgaccgggcgcgggacttggcggcgtccccgaccagctcgcgctccgtgacgcagacggtgaacgggtcccaccgcttcgtgatccagggctactcgctcgccaagggcatgggcgtggggaagcacatcgccagcgacaccttcaccgtcggcggctaccagtgggcgatctacttttacccagacgggaagaaccccgaggacaactccggctacgtctcggtcttcatcgcgctcgcgtccgacggcaccgacgtgcgcgcgctcttcgagctcacgcttctagaccagagtggcaagggcaagcacaaggtgcactcgcactttgaccgctccctagagtccggaccgtacactctcaagtaccgcggatccatgtggggctataaaaggttctttcggcgtaatgctcttgagcaatcagattttcttaaagatgattgcttgaagataaactgtactgtgggtgttgtagtatcaactatggattattccaggccacattcaatagaggttccagagtctgacataggctatcattttggaactcttttggacactctggaaggtgtagatgtcatttttagtgtagcaggagagaagtttcatgcccataagttggtattggctgcccgatcttccttttttagatctgaatttttcgaccatgaatctgatgaagagaagaacgaaactggtacaggggatgaaatcaaggagatcgttattgatgatatggatcctgtagtgttcaaggcggtgcttcactttatgtacagggacaatcttgttaatgatgatgagttgatggcatcaagctctgactgctctatatttgatagtttagctgggaagttaatggctgctgcagacaaatatgagttgccaaggctaagattgttgtgtgaatcttacttgtgcaagcatgtttctgtaaactccgtggcaactactctagcattggctgatcgataccatgctatcgagcttaaatctgtttgcctaaaatttgctgctgaaaacctttcggctgtgatccggaccgaggggttcgactatctcaaagacaactgcccatccctgcagtcagagatactgcggacagttgccggatgtgaggaacaatgtagcagcggcgtgaaaagccagagcgtatgggcgcagctctctgacggcggcgacaccagcggtcgcagggtgaggccaagggtctgagacgcgatcctgcaagcactaacctttgtaatcaaactgtggtagtgtaaaatggatacagctatttgaattttaatctgggacgactcttgcaaattgcaatagcatgattggcatctgcttgtttcgtttttcttgttacggttccgttcacagactgttacttttttacttttcaggatgttttttcttaaccaagcaaaaactactagtcgttcacaacttctgatcgtgtcgtcatcaacgaccacgtgcaggcggacgcgatgaactcacagaagggcgacccgagttgacggtggtttaaacagacacaatgaagctaatcgttcacaacttcagtacaaaactacacaggcaagacactgcctgatacagtgcgatagccgctgccatcctctcttcgcttcgcgggtg

SEQ ID NO: 96295 - DNA, 1647 bp, Zea Mays
gacagacctaccattatttgtgctcgctgccagtagtatttatcctgtgtggttagttcaggtatcaggtttctagttacaagggagtactcactaattttttttagagatatctagttgttcttctaattgctttgaatggttgatcagtgttacaaatgagaatatgagatctcttaaagtgcattagtttcagtttccacattacttagatgttctagataagctacatgctgtatcatggagccaatgcattgatgggatgggtcttctctgacaaagggaacttctggtgaaggtggtagggactagagaatctgtaacctatatgcttacatgtgggcttgaaaagtggggactctgtgcgcctgctgtctattagaataactctatgttggtgggttctctcatcctatgataactagttgtctatcagcccctcccaaaggtgcagctgtgcaagtatattaatatcgtcctttttctggcggctcttctatgcccaagtaattcataaatagtaaacatatcttttccagattgtttagttttttttaataaaatgtgcctgcctgtttgcttttacttagacttttactccctgcatttgaccaagtttgcttctgaaaagtacccatgtttaattgtccttatttaaattttcaggggctataaaaggttctttcggcgtaatgctcttgagcaatcagattttcttaaagatgattgcttgaagataaactgtactgtgggtgttgtagtatcaactatggattattccaggccacattcaatagaggttccagagtctgacataggctatcattttggaactcttttggacactctggaaggtgtagatgtcatttttagtgtagcaggagagaagtttcatgcccataagttggtattggctgcccgatcttccttttttagatctgaatttttcgaccatgaatctgatgaagagaagaacgaaactggtacaggggatgaaatcaaggagatcgttattgatgatatggatcctgtagtgttcaaggcggtgcttcactttatgtacagggacaatcttgttaatgatgatgagttgatggcatcaagctctgactgctctatatttgatagtttagctgggaagttaatggctgctgcagacaaatatgagttgccaaggctaagattgttgtgtgaatcttacttgtgcaagcatgtttctgtaaactccgtggcaactactctagcattggctgatcgataccatgctatcgagcttaaatctgtttgcctaaaatttgctgctgaaaacctttcggctgtgatccggaccgaggggttcgactatctcaaagacaactgcccatccctgcagtcagagatactgcggacagttgccggatgtgaggaacaatgtagcagcggcgtgaaaagccagagcgtatgggcgcagctctctgacggcggcgacaccagcggtcgcagggtgaggccaagggtctgagacgcgatcctgcaagcactaacctttgtaatcaaactgtggtagtgtaaaatggatacagctatttgaattttaatctgggacgactcttgcaaattgcaatagcatgattggcatctgcttgtttcgtttttcttgttacggtt

SEQ ID NO: 96296 - DNA, 1682 bp, Zea Mays
agctggcattgtcccgtcccctgtcgacttcctctccatttcatttccgttccaggtctcctgtttccatcctcttccacggttccacttccacccccatctcctcgccctcggcaagcccagcaaccccaatccccaatcccgtccgcttctttccccgtccccgaccttgccgaggaacctcccgctcccaaatcctagcctctcctccctcgccgctcccctccccatggaggacgaggacgccggcctcggcgacgggggcgaggcctcccctccgcaccatgccgcggcgtcgggcgaccgggcgcgggacttggcggcgtccccgaccagctcgcgctccgtgacgcagacggtgaacgggtcccaccgcttcgtgatccagggctactcgctcgccaagggcatgggcgtggggaagcacatcgccagcgacaccttcaccgtcggcggctaccagtgggcgatctacttttacccagacgggaagaaccccgaggacaactccggctacgtctcggtcttcatcgcgctcgcgtccgacggcaccgacgtgcgcgcgctcttcgagctcacgcttctagaccagagtggcaagggcaagcacaaggtgcactcgcactttgaccgctccctagagtccggaccgtacactctcaagtaccgcggatccatgtggggctataaaaggttctttcggcgtaatgctcttgagcaatcagattttcttaaagatgattgcttgaagataaactgtactgtgggtgttgtagtatcaactatggattattccaggccacattcaatagaggttccagagtctgacataggctatcattttggaactcttttggacactctggaaggtgtagatgtcatttttagtgtagcaggagagaagtttcatgcccataagttggtattggctgcccgatcttccttttttagatctgaatttttcgaccatgaatctgatgaagagaagaacgaaactggtacaggggatgaaatcaaggagatcgttattgatgatatggatcctgtagtgttcaaggcggtgcttcactttatgtacagggacaatcttgttaatgatgatgagttgatggcatcaagctctgactgctctatatttgatagtttagctgggaagttaatggctgctgcagacaaatatgagttgccaaggctaagattgttgtgtgaatcttacttgtgcaagcatgtttctgtaaactccgtggcaactactctagcattggctgatcgataccatgctatcgagcttaaatctgtttgcctaaaatttgctgctgaaaacctttcggatgcccttatgtatctgcagctgtgatccggaccgaggggttcgactatctcaaagacaactgcccatccctgcagtcagagatactgcggacagttgccggatgtgaggaacaatgtagcagcggcgtgaaaagccagagcgtatgggcgcagctctctgacggcggcgacaccagcggtcgcagggtgaggccaagggtctgagacgcgatcctgcaagcactaacctttgtaatcaaactgtggtagtgtaaaatggatacagctatttgaattttaatctgggacgactcttgcaaattgcaatagcatgattggcatctgcttgtttcgtttttcttgttacggtt

SEQ ID NO: 96297 - DNA, 2143 bp, Zea Mays
cctcccccttcctcccgtcccccgtcgacagtcgcatcgcaccctatcctccccagtccccaccagtccaccaccctctccccgcctcccgctgcgaccaccgcaccggcgaacttggagggccgctcggcgctgcacaccaagccggggatggccgccgcgcttgcgagctcgccgcttgttcacctaactacctcccgcctccgcctccccaggccccaggcctccgcttctagttcgggtccagtctgctcgatcggcgtgtgcttgggatggaggctgaaggtcgggtggagggccctgaggcggcgcgaccggcttcgatgcttctccaccgacgggggcggcggggaggagggggaaaagcgtggcgaggaggagacatcggcaacggcggcggcatccccggcctcggttccagcggagacacaggtgggcgctggggaggagctggcgtccgagcggagtcggtcagggagcttttcttcctcatcctcgtcgtccgggactcctggtgtatcaagcgagccaccgctgttgagttttagtgttgataatatcgatacagttaaactgttggaacttctaggcccagaaaaggttgatccagttgatgtcaaggcaattaaggaaaaactctttggttatacgacattctggttgacaaaagaagaaccttttggtgatcttggtgaaggagttcttttcattgggaacctccgtgggaagagagaggaaatctttgcaaaacttcaacggcaagtacgtgaacttaccggtgataaatacaatctttttatggtggaggaacccaattcagaaggggatgacccacgtgggggaccacgtgttagttttggtttgcttaggaaggaagttttctgagccaggacctactacgctatggcagtatgtcatttctctgttacttttccttctcactatgttctcctgcattgagctaggaattgcatcaaagattagcagtcttccaccagaaattgtttcatatttcactgatccaaatgctaccggaccccctcctgacatgcaacttctgctcccatttgtggagtcggctttgccagtggcttacggtgtcttgtctatccaactatttcatgaaattgggcactttttggcagcatttccaaaaaatgttaaactgggaattcctttctttattccgaacttcacccttggaacttttggtgcaattactcagttcaagtccattcttccggatcgaaagacaatgtttgacatatcaatggctggtcctgtggctggagctgcactttccttttcaatgttctttgttggcttattactctcttcaaatcctgttggggcaagtgatttagtggaagtacctagtcagctgttccagggttcattgttgcttggacttattagtagagcaacgcttggatacagagctatgcatgctgctacagtttcgatccaccctcttgtgattgcaggctggtgcggtttaactactagtgcatttaatatgcttcctgttggttgtcttgatggtggaagagcattacagggtgcttttggcaaggatgctttgtttggatttggcctcacaacatattcgttgcttggactaggagtgcttggagggccactgtctcttccttggggtttgtacgtgctaatatgtcagagaacacccgagaaaccatgcttgaacgacgtgagcgatgttggaagttggaggagggcggccttgatagcttcagtatttcttgttgttttgacgctcattccgttgtgggatgaacttgcggaggaactaggtgtagggcttgtttcttcgttctgagatgcggtgcttaccgatagaattaggccgtgatgtagttcagttttgtgttgaaatgtagcttcccacggtggaattgttgtaaaggtatgtggaatttccggattaggtgagcaatgatatcgcttatgcgagtgtaatgaaattgtgccaagtatagacgctaacgattaccaattacatacatgtatgctcacttaaccatacagttttgtgttgtaaactagaatgtatggatttataaaaatgagaataggcatgtcaagtccaggacttgaaatctggctaggcaggttatgctgaatc

SEQ ID NO: 96298 - DNA, 2111 bp, Zea Mays
aaatccagcacctctctcccctcccccttcctcccgtcccccgtcgacagtcgcatcgcaccctatcctccccagtccccaccagtccaccaccctctccccgcctcccgctgcgaccaccgcaccggcgaacttggagggccgctcggcgctgcacaccaagccggggatggccgccgcgcttgcgagctcgccgcttgttcacctaactacctcccgcctccgcctccccaggccccaggcctccgcttctagttcgggtccagtctgctcgatcggcgtgtgcttgggatggaggctgaaggtcgggtggagggccctgaggcggcgcgaccggcttcgatgcttctccaccgacgggggcggcggggaggagggggaaaagcgtggcgaggaggagacatcggcaacggcggcggcatccccggcctcggttccagcggagacacaggtgggcgctggggaggagctggcgtccgagcggagtcggtcagggagcttttcttcctcatcctcgtcgtccgggactcctggtgtatcaagcgagccaccgctgttgagttttagtgttgataatatcgatacagttaaactgttggaacttctaggcccagaaaaggttgatccagttgatgtcaaggcaattaaggaaaaactctttggttatacgacattctggttgacaaaagaagaaccttttggtgatcttggtgaaggagttcttttcattgggaacctccgtgggaagagagaggaaatctttgcaaaacttcaacggcaagtacgtgaacttaccggtgataaatacaatctttttatggtggaggaacccaattcagaaggggatgacccacgtgggggaccacgtgttagttttggtttgcttaggaaggaagttttctgagccaggacctactacgctatggcagtatgtcatttctctgttacttttccttctcactatgttctcctgcattgagctaggaattgcatcaaagattagcagtcttccaccagaaattgtttcatatttcactgatccaaatgctaccggaccccctcctgacatgcaacttctgctcccatttgtggagtcggctttgccagtggcttacggtgtcttgtctatccaactatttcatgaaattgggcactttttggcagcatttccaaaaaatgttaaactgggaattcctttctttattccgaacttcacccttggaacttttggtgcaattactcagttcaagtccattcttccggatcgaaagacaatgtttgacatatcaatggctggtcctgtggctggagctgcactttccttttcaatgttctttgttggcttattactctcttcaaatcctgttggggcaagtgatttagtggaagtacctagtcagctgttccagggttcattgttgcttggacttattagtagagcaacgcttggatacagagctatgcatgctgctacagtttcgatccaccctcttgtgattgcaggctggtgcggtttaactactagtgcatttaatatgcttcctgttggttgtcttgatggtggaagagcattacagggtgcttttggcaaggatgctttgtttggatttggcctcacaacatattcgttgcttggactaggagtgcttggagggccactgtctcttccttggggtttgtacgtgctaatatgtcagagaacacccgagaaaccatgcttgaacgacgtgagcgatgttggaagttggaggagggcggccttgatagcttcagtatttcttgttgttttgacgctcattccgttgtgggatgaacttgcggaggaactaggtgtagggcttgtttcttcgttctgagatgcggtgcttaccgatagaattaggccgtgatgtagttcagttttgtgttgaaatgtagcttcccacggtggaattgttgtaaaggtatgtggaatttccggattaggtgagcaatgatatcgcttatgcgagtgtaatgaaattgtgccaagtatagacgctaacgattaccaattacatacatgtatgctcacttaaccatacagttttgtgttgtaaactagaatgtatggatttataaaaatgagaata

SEQ ID NO: 96299 - DNA, 1272 bp, Zea Mays
gaaccaaatccagcacctctctcccctcccccttcctcccgtcccccgtcgacagtcgcatcgcaccctatcctccccagtccccaccagtccaccaccctctccccgcctcccgctgcgaccaccgcaccggcgaacttggagggccgctcggcgctgcacaccaagccggggatggccgccgcgcttgcgagctcgccgcttgttcacctaactacctcccgcctccgcctccccaggccccaggcctccgcttctagttcgggtccagtctgctcgatcggcgtgtgcttgggatggaggctgaaggtcgggtggagggccctgaggcggcgcgaccggcttcgatgcttctccaccgacgggggcggcggggaggagggggaaaagcgtggcgaggaggagacatcggcaacggcggcggcatccccggcctcggttccagcggagacacaggtgggcgctggggaggagctggcgtccgagcggagtcggtcagggagcttttcttcctcatcctcgtcgtccgggactcctggtgtatcaagcgagccaccgctgttgagttttagtgttgataatatcgatacagttaaactgttggaacttctaggcccagaaaaggttgatccagttgatgtcaaggcaattaaggaaaaactctttggttatacgacattctggttgacaaaagaagaaccttttggtgatcttggtgaaggagttcttttcattgggaacctccgtgggaagagagaggaaatctttgcaaaacttcaacggcaagtacgtgaacttaccggtgataaatacaatctttttatggtggaggaacccaattcagaaggggatgacccacgtgggggaccacgtgttagttttggtttgcttaggaaggaagttttctgagccaggacctactacgctatggcagtatgtcatttctctgttacttttccttctcactatgttctcctgcattgagctaggaattgcatcaaagattagcagtcttccaccagaaattgtttcatatttcactgatccaaatgctaccggaccccctcctgacatgcaacttctgctcccatttgtggagtcggctttgccagtggcttacggtgtcttgtctatccaactatttcatgtaatttgtaccctaaatatgttgagcatctttttgtccattaatttatatttgcttattagttccttttaacctgtaaagaagctacgtgaacagcatatgatcttttcgatcaattcaatgtt

SEQ ID NO: 96300 - DNA, 1095 bp, Zea Mays
atgggccagggtaatatggtggtggcggtggccatggatgcgttggggtgcagggcagcggtggcggcaagacggggcatggcgggtgatagactggcgcgggaggaggcgtggatggtggaggtggggaatgcggtagtggtggtgacggtagaagttgaggtggtggtggtgaaggccgcgacagtggcggcagaggaggaggcagaagtggcggaggtggagatggcggcggcggcgatggtggaggtggcgaaggcgggggcggtgaaggaagccaccgcagtggtagtgatggaagccgcgacggtggcatgcgcgggacgaacggcgcgcacaagacggcgcctcgcccgtgaagaagttgtaggccaacgtgaagttcttgaggcgcggcaggtcgcatatccccgacggtaccgcgccggtgagcaggttgtgcgcgacgtccagctgctccagcttcctcatcagggcgagcttcagcggcagcgggccggcgagctggttgaagctgacgtcgagcacggaagacagccatcgagcaggcgatcgaagaggcagggcgggacgacgccctcgaagtcgttgaagcagaggtccaggaagtgcagcgccgggaggtccaggacgacgtccgggaacgggcccgacgaagcggttgttgctgaggtcgagctcgtggaggatgcggaggcggcaaagcgcgcgggggaggacgtcgcagaagcggttggagttgaggtggagcagggcgaggtcggcgaggagggcgagctcctacgggaggaagcccacgatgtcaccatggttaaggttgacctcggcgacgacgagcgcgccgcggcggtcggggccggaggggagcgacgcgcaatagacgctcgtgtagttgcacacccccgggcctacccaatcggcggtgaggttgttggggtcggagaagatggcctgccgctttcgcgtcccgcaggcgccggctcgggaaccgccatgacgggtccacctccaccgccgccgtcggccacccctctgaagctgtggccgtcgcgccaaagaaggaggaggaggcaacggcaaggagcgccagaataa

SEQ ID NO: 96301 - DNA, 2987 bp, Zea Mays
ccaagggggaggagacgagctcgttatcgttagtctggcttgctgatggtagttacccacgtttggctattccttatgctcaccgttcttggtcacagaaggaggaaaccaatccaagatcaggcaaagacaggcctaactccaccgataagcttcttgtgctccattgcatagcagtgtcgttccacacggtgtctctcctctcatcgagaaatcgtctccaacgacgacaatggctacgccgagccacctcctgctcgtcgtcttcacggcgcttcttgcgttgctcccggggacgacgcagctccagccttcgcaggtgtggactctgatcaagatccagcagctcctgaacgcccccccgatgctcagccactggcgccgcagcaccgacttctgcggcggcggcggcggcgccatgggcccggcgggctcggccgccgtcctgtgctacggggacaccgtgacgcagctccacatcgcgggcgcgggcgcgccgcctctgcccaggaacttctccatcggggccgtggtcacgacgctgtccaggctccccgacctcaaggtgctcacgctgtccgggctcggcctctggggccccctgccgggcaagctcggccgcctcgcgtcgctggagatcgtcaacatgagcggcaactacctcttcggcgaggtcccgcggggcgtgtcgcgcctcgccggcctccagacgctggtcctcgacgacaacatgctgggcggcgaggtgccggcctggatcggcgccctgccgtcgctggccgtcctgagcctgcggaacaacacgttccagggagccgtgccggagtccctgggaagcgcaccctcgctgcggtcgctcgtgctcgcgtccaacaacctgtccgggaacctgccggacatgagccggcaggccaacctccaggtgctcgacgtcggcggcaactcgctcggcccggcgttccccaagctcgggaggaaggtggtcaccgtggtcctcggcaggaaccggttcggcggcggcctccccgcggagctgagctccttttacctgctggagcggctcgacgtgtcgtggaaccgcttcgtcgggccgttcgcgcccgcgctgctctccctgccgtccatccggtacctgaacatcgccgggaacaggttcaccgggaccctatccgacaaggcgccgtgcggcgacaacctccggttcgtcgacctgtcgctgaacctcctcatggggagcgtgccgacctgcctgaggtcgccgggcaggaagccggacacggtggtgctcgtgtccaccaactgcctggacgacagcgacggctcgcagcacccgtcgccgttctgccagaaccaggccctggccgtggggatagtgcccggcaaggagaggaagagcgtcgcaggccaggcaggcttcgtggccggcgttgtggtggcgatccttgtcgccatctcggctgtgggcctcatcgccttcttcgccgtgaggaaggcggccatgaaacgttgggaggcgagggcgcccacggtttcggaggaggagagttcttcgactgggtacccttccaagatgctcgctgatgcacgatacatatcgcagacgctgaagctgggcgccctggggatcccgtcatacagagcattttctctggtcgagcttgaagctgcaactaataacttcgagaactctcacctgctggggcaggactctcacggcgagatgtaccgaggaaggttaggcaatggcaccccagtgacgatcaggactctgaagatgaagaggagccagaccgcccagagcttcaaccgtcacatcgagacgatctccaggctgaggcaccagaacctggtcagcgctctgggacactgctttgagtacaatctcgacgagtccacagtcacccagctgtacatcgtgttcgagtacgtgcagaatgggaacctgaggagcaggatctcgcaagggaccgaagggtgcaggctgacgtggtcgcagaggatctcggccgccatcggcgtcgccaagggcatccagttcctgcacggggggatcatacctggcctggtcggaaacgatctgcggatcacgaacgtccttgtggaccagaaccatgtcgccaagatcggcagctacaacatcccgatcctggcggaggccatgaggtccgagcagggaggagctgggaacaagttccaggctgacagtcgggtgaagagcgataagacggacatcttcgacttcggggtgatcctgcttgaggttgtgtccgggaagaccatcacgtccatgtatgaagtggagatactgaaagaattgcttgcatgggcgattgccgacgaggaccgggtgaggaggaggagcttcgcagaccccgcggtgagcaaagggtgctcggacgagtcgctgaggacggtcatggagatctgtcagaggtgcctggcgaaggaggcgtcgcagcggccctcggtggaggacgtgctgtggaacctgcagttcgccgcccaggtgcaggacgactgggagacggatgcctggagcagcggcggaggaagcccagtgtcgtcgtcgtccagagccaccaggccgtctcggctacacttgagcagatagatgatcaggtgcttcaccaatctccagtaaagcggtcacatgatctacccatagtctaccggggacaaggacaaggatctaaagatgggaaatgctggtcagcctacagtacagcatctgcctctgatgggatgctgaaaaccacagcagtatcagctcgctgaaaactgtcctccctgtggtgcagactaatgtgctttgcgccactgtagagttcttttttggtttctctttatcatcacgtccctatctacgagtacaataatggtgtgccttttgtccattttcccccattggtattggtagcacaataatgatgtaacaggcattgccttctacgtcctgagttttgtgatcatcgtattactgctggagc

SEQ ID NO: 96302 - DNA, 1836 bp, Zea Mays
ccaagggggaggagacgagctcgttatcgttagtctggcttgctgatggtagttacccacgtttggctattccttatgctcaccgttcttggtcacagaaggaggaaaccaatccaagatcaggcaaagacaggcctaactccaccaactgcctggacgacagcgacggctcgcagcacccgtcgccgttctgccagaaccaggccctggccgtggggatagtgcccggcaaggagaggaagagcgtcgcaggccaggcaggcttcgtggccggcgttgtggtggcgatccttgtcgccatctcggctgtgggcctcatcgccttcttcgccgtgaggaaggcggccatgaaacgttgggaggcgagggcgcccacggtttcggaggaggagagttcttcgactgggtacccttccaagatgctcgctgatgcacgatacatatcgcagacgctgaagctgggcgccctggggatcccgtcatacagagcattttctctggtcgagcttgaagctgcaactaataacttcgagaactctcacctgctggggcaggactctcacggcgagatgtaccgaggaaggttaggcaatggcaccccagtgacgatcaggactctgaagatgaagaggagccagaccgcccagagcttcaaccgtcacatcgagacgatctccaggctgaggcaccagaacctggtcagcgctctgggacactgctttgagtacaatctcgacgagtccacagtcacccagctgtacatcgtgttcgagtacgtgcagaatgggaacctgaggagcaggatctcgcaagggaccgaagggtgcaggctgacgtggtcgcagaggatctcggccgccatcggcgtcgccaagggcatccagttcctgcacggggggatcatacctggcctggtcggaaacgatctgcggatcacgaacgtccttgtggaccagaaccatgtcgccaagatcggcagctacaacatcccgatcctggcggaggccatgaggtccgagcagggaggagctgggaacaagttccaggctgacagtcgggtgaagagcgataagacggacatcttcgacttcggggtgatcctgcttgaggttgtgtccgggaagaccatcacgtccatgtatgaagtggagatactgaaagaattgcttgcatgggcgattgccgacgaggaccgggtgaggaggaggagcttcgcagaccccgcggtgagcaaagggtgctcggacgagtcgctgaggacggtcatggagatctgtcagaggtgcctggcgaaggaggcgtcgcagcggccctcggtggaggacgtgctgtggaacctgcagttcgccgcccaggtgcaggacgactgggagacggatgcctggagcagcggcggaggaagcccagtgtcgtcgtcgtccagagccaccaggccgtctcggctacacttgagcagatagatgatcaggtgcttcaccaatctccagtaaagcggtcacatgatctacccatagtctaccggggacaaggacaaggatctaaagatgggaaatgctggtcagcctacagtacagcatctgcctctgatgggatgctgaaaaccacagcagtatcagctcgctgaaaactgtcctccctgtggtgcagactaatgtgctttgcgccactgtagagttcttttttggtttctctttatcatcacgtccctatctacgagtacaataatggtgtgccttttgtccattttcccccattggtattggtagcacaataatgatgtaacaggcattgccttctacgtcctgagttttgtgatcatcgtattactgctggagc

SEQ ID NO: 96303 - DNA, 3178 bp, Zea Mays
gcgcctgcagcacaactaggcgacactctcagacacagagtgagctctccactccgagtgagtgagcgagcgagcgcgcgctccgacatcacatataacaccggcagggcaagcgagcatggacagcaaaggaggaacacggaatccgttcttcctaccgttcgtctatcatccatccgttgctgtcctgatgcctttaccgcttcaccattgatctgagttctgaagaaggtcgtttccctggccgactccttcgccgctgcttcggcgactgcactctcactgcaagaaggaggaaaccaatccaagatcaggcaaagacaggcctaactccaccgataagcttcttgtgctccattgcatagcagtgtcgttccacacggtgtctctcctctcatcgagaaatcgtctccaacgacgacaatggctacgccgagccacctcctgctcgtcgtcttcacggcgcttcttgcgttgctcccggggacgacgcagctccagccttcgcaggtgtggactctgatcaagatccagcagctcctgaacgcccccccgatgctcagccactggcgccgcagcaccgacttctgcggcggcggcggcggcgccatgggcccggcgggctcggccgccgtcctgtgctacggggacaccgtgacgcagctccacatcgcgggcgcgggcgcgccgcctctgcccaggaacttctccatcggggccgtggtcacgacgctgtccaggctccccgacctcaaggtgctcacgctgtccgggctcggcctctggggccccctgccgggcaagctcggccgcctcgcgtcgctggagatcgtcaacatgagcggcaactacctcttcggcgaggtcccgcggggcgtgtcgcgcctcgccggcctccagacgctggtcctcgacgacaacatgctgggcggcgaggtgccggcctggatcggcgccctgccgtcgctggccgtcctgagcctgcggaacaacacgttccagggagccgtgccggagtccctgggaagcgcaccctcgctgcggtcgctcgtgctcgcgtccaacaacctgtccgggaacctgccggacatgagccggcaggccaacctccaggtgctcgacgtcggcggcaactcgctcggcccggcgttccccaagctcgggaggaaggtggtcaccgtggtcctcggcaggaaccggttcggcggcggcctccccgcggagctgagctccttttacctgctggagcggctcgacgtgtcgtggaaccgcttcgtcgggccgttcgcgcccgcgctgctctccctgccgtccatccggtacctgaacatcgccgggaacaggttcaccgggaccctatccgacaaggcgccgtgcggcgacaacctccggttcgtcgacctgtcgctgaacctcctcatggggagcgtgccgacctgcctgaggtcgccgggcaggaagccggacacggtggtgctcgtgtccaccaactgcctggacgacagcgacggctcgcagcacccgtcgccgttctgccagaaccaggccctggccgtggggatagtgcccggcaaggagaggaagagcgtcgcaggccaggcaggcttcgtggccggcgttgtggtggcgatccttgtcgccatctcggctgtgggcctcatcgccttcttcgccgtgaggaaggcggccatgaaacgttgggaggcgagggcgcccacggtttcggaggaggagagttcttcgactgggtacccttccaagatgctcgctgatgcacgatacatatcgcagacgctgaagctgggcgccctggggatcccgtcatacagagcattttctctggtcgagcttgaagctgcaactaataacttcgagaactctcacctgctggggcaggactctcacggcgagatgtaccgaggaaggttaggcaatggcaccccagtgacgatcaggactctgaagatgaagaggagccagaccgcccagagcttcaaccgtcacatcgagacgatctccaggctgaggcaccagaacctggtcagcgctctgggacactgctttgagtacaatctcgacgagtccacagtcacccagctgtacatcgtgttcgagtacgtgcagaatgggaacctgaggagcaggatctcgcaagggaccgaagggtgcaggctgacgtggtcgcagaggatctcggccgccatcggcgtcgccaagggcatccagttcctgcacggggggatcatacctggcctggtcggaaacgatctgcggatcacgaacgtccttgtggaccagaaccatgtcgccaagatcggcagctacaacatcccgatcctggcggaggccatgaggtccgagcagggaggagctgggaacaagttccaggctgacagtcgggtgaagagcgataagacggacatcttcgacttcggggtgatcctgcttgaggttgtgtccgggaagaccatcacgtccatgtatgaagtggagatactgaaagaattgcttgcatgggcgattgccgacgaggaccgggtgaggaggaggagcttcgcagaccccgcggtgagcaaagggtgctcggacgagtcgctgaggacggtcatggagatctgtcagaggtgcctggcgaaggaggcgtcgcagcggccctcggtggaggacgtgctgtggaacctgcagttcgccgcccaggtgcaggacgactgggagacggatgcctggagcagcggcggaggaagcccagtgtcgtcgtcgtccagagccaccaggccgtctcggctacacttgagcagatagatgatcaggtgcttcaccaatctccagtaaagcggtcacatgatctacccatagtctaccggggacaaggacaaggatctaaagatgggaaatgctggtcagcctacagtacagcatctgcctctgatgggatgctgaaaaccacagcagtatcagctcgctgaaaactgtcctccctgtggtgcagactaatgtgctttgcgccactgtagagttcttttttggtttctctttatcatcacgtccctatctacgagtacaataatggtgtgccttttgtccattttcccccattggtattggtagcacaataatgatgtaacaggcattgccttctacgtcctgagttttgtgatcatcgtattactgctggagc

SEQ ID NO: 96304 - DNA, 3175 bp, Zea Mays
gcgcctgcagcacaactaggcgacactctcagacacagagtgagctctccactccgagtgagtgagcgagcgagcgcgcgctccgacatcacatataacaccggcagggcaagcgagcatggacagcaaaggaggaacacggaatccgttcttcctaccgttcgtctatcatccatccgttgctgtcctgatgcctttaccgcttcaccattgatctgagttctgaagaaggtcgtttccctggccgactccttcgccgctgcttcggcgactgcactctcactgcaaggaggaaaccaatccaagatcaggcaaagacaggcctaactccaccgataagcttcttgtgctccattgcatagcagtgtcgttccacacggtgtctctcctctcatcgagaaatcgtctccaacgacgacaatggctacgccgagccacctcctgctcgtcgtcttcacggcgcttcttgcgttgctcccggggacgacgcagctccagccttcgcaggtgtggactctgatcaagatccagcagctcctgaacgcccccccgatgctcagccactggcgccgcagcaccgacttctgcggcggcggcggcggcgccatgggcccggcgggctcggccgccgtcctgtgctacggggacaccgtgacgcagctccacatcgcgggcgcgggcgcgccgcctctgcccaggaacttctccatcggggccgtggtcacgacgctgtccaggctccccgacctcaaggtgctcacgctgtccgggctcggcctctggggccccctgccgggcaagctcggccgcctcgcgtcgctggagatcgtcaacatgagcggcaactacctcttcggcgaggtcccgcggggcgtgtcgcgcctcgccggcctccagacgctggtcctcgacgacaacatgctgggcggcgaggtgccggcctggatcggcgccctgccgtcgctggccgtcctgagcctgcggaacaacacgttccagggagccgtgccggagtccctgggaagcgcaccctcgctgcggtcgctcgtgctcgcgtccaacaacctgtccgggaacctgccggacatgagccggcaggccaacctccaggtgctcgacgtcggcggcaactcgctcggcccggcgttccccaagctcgggaggaaggtggtcaccgtggtcctcggcaggaaccggttcggcggcggcctccccgcggagctgagctccttttacctgctggagcggctcgacgtgtcgtggaaccgcttcgtcgggccgttcgcgcccgcgctgctctccctgccgtccatccggtacctgaacatcgccgggaacaggttcaccgggaccctatccgacaaggcgccgtgcggcgacaacctccggttcgtcgacctgtcgctgaacctcctcatggggagcgtgccgacctgcctgaggtcgccgggcaggaagccggacacggtggtgctcgtgtccaccaactgcctggacgacagcgacggctcgcagcacccgtcgccgttctgccagaaccaggccctggccgtggggatagtgcccggcaaggagaggaagagcgtcgcaggccaggcaggcttcgtggccggcgttgtggtggcgatccttgtcgccatctcggctgtgggcctcatcgccttcttcgccgtgaggaaggcggccatgaaacgttgggaggcgagggcgcccacggtttcggaggaggagagttcttcgactgggtacccttccaagatgctcgctgatgcacgatacatatcgcagacgctgaagctgggcgccctggggatcccgtcatacagagcattttctctggtcgagcttgaagctgcaactaataacttcgagaactctcacctgctggggcaggactctcacggcgagatgtaccgaggaaggttaggcaatggcaccccagtgacgatcaggactctgaagatgaagaggagccagaccgcccagagcttcaaccgtcacatcgagacgatctccaggctgaggcaccagaacctggtcagcgctctgggacactgctttgagtacaatctcgacgagtccacagtcacccagctgtacatcgtgttcgagtacgtgcagaatgggaacctgaggagcaggatctcgcaagggaccgaagggtgcaggctgacgtggtcgcagaggatctcggccgccatcggcgtcgccaagggcatccagttcctgcacggggggatcatacctggcctggtcggaaacgatctgcggatcacgaacgtccttgtggaccagaaccatgtcgccaagatcggcagctacaacatcccgatcctggcggaggccatgaggtccgagcagggaggagctgggaacaagttccaggctgacagtcgggtgaagagcgataagacggacatcttcgacttcggggtgatcctgcttgaggttgtgtccgggaagaccatcacgtccatgtatgaagtggagatactgaaagaattgcttgcatgggcgattgccgacgaggaccgggtgaggaggaggagcttcgcagaccccgcggtgagcaaagggtgctcggacgagtcgctgaggacggtcatggagatctgtcagaggtgcctggcgaaggaggcgtcgcagcggccctcggtggaggacgtgctgtggaacctgcagttcgccgcccaggtgcaggacgactgggagacggatgcctggagcagcggcggaggaagcccagtgtcgtcgtcgtccagagccaccaggccgtctcggctacacttgagcagatagatgatcaggtgcttcaccaatctccagtaaagcggtcacatgatctacccatagtctaccggggacaaggacaaggatctaaagatgggaaatgctggtcagcctacagtacagcatctgcctctgatgggatgctgaaaaccacagcagtatcagctcgctgaaaactgtcctccctgtggtgcagactaatgtgctttgcgccactgtagagttcttttttggtttctctttatcatcacgtccctatctacgagtacaataatggtgtgccttttgtccattttcccccattggtattggtagcacaataatgatgtaacaggcattgccttctacgtcctgagttttgtgatcatcgtattactgctggagc

SEQ ID NO: 96305 - DNA, 698 bp, Zea Mays
aaacccaacaactccaaacccgaagcccccacggcgcaggcctaggtgtaggcggcgcggaccagggccgggccgccggaggcgcgctacttggcggcggcgcaggggagatgtgcgaggggaggcggccggtggacgcgagccgggcggggtgggcggcggcggcggagctgcggcggagagaggcggcggcgcgggcgcgcctggcggaggcgctggcggagctggagcgcgcgcgggcgcgcgccgccgagctgcagcggcgcatcgagcagacatacggcaagcgccggcgcctcctcgaggagacccgcggccggatccacgagatccacgcgcgcctccaccaggaccaggaccgggatcaggagcaggagcaggagccctccgccagcggcacttcctctccgtcctcgtcgtcgtagggaacaagcgagttggcgctggatcatcgatggtttctactgctacgccgcgcgcttctttcccgtttcctcttgtcttatcgttagcttgcaagcttgactttggccatgtaccgtagctgtagtatacacgactctctctgacctacagaacgtcagaaaattgctcagtgactgaattggattgggagttagttctagaaacactctaatcagactaataaaattcgttcactgctgtgttggctcgtgactgaattcgtcacgagataa

SEQ ID NO: 96306 - DNA, 1139 bp, Zea Mays
aaagaagttgctgagattgatcttgattattatgtatcggttcttatgatgggtgaataccggaagagaaagaatgaaggtcaacgtaaaagacgtcgaggttcaatatttggacacgaggtatatgatcgcagtagaggagaacatgatttaaaattatttaatgactactttgctgagcgtccaacatatcctgagaagtatttccgacgacggtttcggatgagtcgtcctcttttcatgcggattgctcaaggtgttaaacaacatgataactacttccatcagaaaagaaatgttgtcggtgctcttgggttttcctatcttctaaaggtgactgcagcttttagacaacttgcttatggtgttccagcagattacgttgatgagtatttacggattggagaaagcactgctatcgagagcctacggaaatttgtcatggcagtgtgtgaggtttttggaccagagtatctgagagctccaaatgaaaatgatacaagtagattacttactattgctgaacatcttggctttcctggaatgtttggtagtgttgattgtatgcattggaagtggaaaaattgtcctatagcttatcaaggcatgtactgtggtcatgtcaaagaaccaacaattgtactagaggcagtggcgtctaccgatttatggatatggcatgccttctttggtctaccagggtcttttaatgatatcaatgttttgccattgttcgaggtccagctaggttctgggataaagcaacactgacagacattatgaatgcttgcataataatgcacaatatgataattgaagatgatcgagataaaggtcgtgtggagccactttatgataacagtgatgttgaaacaagggtatgggtttctcgtgaagggacttcgaattttttatcatttgtagacaagcataaagaaatccgagatcctcacattcacaatcaactacaacaagacctagttgaacatttatgggagcgtcaaggtcaacgaactaggcagaagtagaatagaaccatctttgtttatgagttagcttgtttgtcgatcttctttaattttgttttctgaataatccgtgatggatgaatgatttaataaagaaatttgtgtcttttg

SEQ ID NO: 96307 - DNA, 203 bp, Zea Mays
accgccgctttacctttcactgtctctgcagcttctcttcttgcacagatctatcgattccccgtctcatcttttctttttgcttttctatgttcctgataacccacatgaacgtttaccagcgaaattgccagctgcacatttcatattactaatccatgccggaccagatccaactgaatacgtgtacggattcaccttcc

SEQ ID NO: 96308 - DNA, 1765 bp, Zea Mays
gcatcgaacgcacactcgcactcgcacgtacaccacactagttaccacagacgacgggcgccatgaaagtcccggtgcttctcctcctggtctccctgtgcttctcgctcgcgctcgcgtggcaaacggacacggaatcgggctcaggcaggccgtaccactacggcgaggagagtttccggcactggacgcgctcccggcagggccggttcagggtgctggaacggttcacccacgagctgctggaggacgccgtcggcaactaccgcgtcgccgagctggaggccgcgccgcgcgcgttcctgcagcccagccactacgatgccgacgaggtgatgttcgtgaaggaaggcgagggcgtcatcgtgctgctccgcggcgggaagagggagtcgttctgcgtcagggagggcgacgtcatggtcatccccgcgggcgccgtcgtgtactcggccaacacgcaccagtcggagtggttccgcgtcgtcatgctcctcagccccgtcgtctccacgtctggacgcttcgaggagttcttccccatcggaggcgagagccccgagtccttcctcagcgtcttcagcgacgacgttatccaggcgtcgttcaacactcgccgggaggagtgggagaaagtgttcgagaagcagagcaagggggagatcacgacggcgtccgaggaacagatccgggagctgagcaggtcctgctcacgtggtggccgcagcagccgcagcgagggtggcgactcgggttcttcttcttccaagtgggagatcaagccgtccagcctcacggacaagaagccgacccattccaacagccacggcaggcactacgagatcaccggcgacgagtgcccgcacctccggctgctcgacatggacgtcggcctggcaaacatcgcccgcggttctatgatggcgccgagctacaacacccgcgccaacaagatagctatcgtcctcaagggccagggctacttcgagatggcgtgcccgcacgtctccggcggccggtcgtcgccgcgccgggagcgtgggcacggccgagaggaagaggaggagcgggaagaggagcaaggcggtggcggtgggcaaaagtcgaggagctacaggcaggtgaaatcccgcatcagagagggctccgtcatcgtgatcccggcggggcacccgaccgcgctggtcgccggcgaagacaagaacctcgccgtcctctgcttcgaagtgaacgccagcttcgacgataaggtgttcctcgcgggcacgaacagcgcgcttcagaagatggataggccggcgaagctgctggcgttcggggcggacgaggagcagcaggtggaccgtgtcataggagcacagaaggacgccgtcttcctgcgcgggccccagagccacagggtctcgtcggtgtaagtagtgcatgcttgagatgtagcggccgctcatcggcctcgagacctcgacggtcgcggccaccccggtggtgaggttaagaagtggaataaagtaggtgatggctcgccggcgtcgcgttacgtatgaacagtagtatgtacgtccagtggagggtgacgcccggccgtacgggagtatgtaatctacctacctacctatgcaggtgaaataacgttgttgagacttgagacatcctgtctgctcttggaaaatgtaaagacagtcgtgctgccttccattccataaaaaatattgttctaaaaaaactattattatatctttctgaaaggaattaaaaaaatatataa

SEQ ID NO: 96309 - DNA, 1091 bp, Zea Mays
acacaactcaagcacacgaatccaaacaacacgaaccggcagttcagcttcctgtccgagacctcggggaggcctgccctctcggctctcgcgttaacgatcgacgcgtggagagaaatggcggcggcagcagcagcaagagcaggagcgtcgggcgtggcgtggctcctggcggccgccgtggcggcggcgctggtggcctcggcgtcggcgcagtccgggtgcacgaccacgctgatcagcctgtacccgtgcctcaactacatcagcggcaacgtgtcggcgccgccgtcctcgtgctgctcgcagctcgccagcgtcgtgcagaccaacccgcagtgcctctgcgccgcgctcagcggcgactcctcgtccctcggcggtgtcaccgtcgacaagacgcgcgcgctccagctcccccaggcgtgcaacgtcaagaccccgccggcgagcaagtgcaactctgctggcggcggcagcgctccgggcgctgcgacgccggccacgccgtcggctggcgtaccagcgaccgcaggtaaggcgacgaacaactgtgctcatcaatcatcatacggttcagctgtccacggcttctctcttacacgacacgaaccgatgcaggaaccggcactggatcgaaggcgacgccgacggccccgttcctgacgtccggcgccgcgtcgacccggggggcggtgagcctggtgctggcatttgcggctgttactgtctacggcatctcggccgcgtgacaatcttggctcctctagctctgttgcccacggcgttggggatccagacattcgacattcaggatttgtggtgtcactgttccgcattggttgagcattgtcgagtatagataattgggcgtcgcatttgtattattgcttgtatttggctgtcacaataaagaacaccgttttttccttgtttgtacaaatcgttttaagaagatgtccactactccgttgtctggaaaatctccctcgtgaatggacattaacccctaaatatgcccattttaaaacctttgttagttccttgttaagctcaaatacgaaattgaccaacatatcactatttttaga

SEQ ID NO: 96310 - DNA, 851 bp, Zea Mays
acacaactcaagcacacgaatccaaacaacacgaaccggcagttcagcttcctgtccgagacctcggggaggcctgccctctcggctctcgcgttaacgatcgacgcgtggagagaaatggcggcggcagcagcagcaagagcaggagcgtcgggcgtggcgtggctcctggcggccgccgtggcggcggcgctggtggcctcggcgtcggcgcagtccgggtgcacgaccacgctgatcagcctgtacccgtgcctcaactacatcagcggcaacgtgtcggcgccgccgtcctcgtgctgctcgcagctcgccagcgtcgtgcagaccaacccgcagtgcctctgcgccgcgctcagcggcgactcctcgtccctcggcggtgtcaccgtcgacaagacgcgcgcgctccagctcccccaggcgtgcaacgtcaagaccccgccggcgagcaagtgcaactctgctggcggcggcagcgctccgggcgctgcgacgccggccacgccgtcggctggcgtaccagcgaccgcaggaaccggcactggatcgaaggcgacgccgacggccccgttcctgacgtccggcgccgcgtcgacccggggggcggtgagcctggtgctggcatttgcggctgttactgtctacggcatctcggccgcgtgacaatcttggctcctctagctctgttgcccacggcgttggggatccagacattcgacattcaggatttgtggtgtcactgttccgcattggttgagcattgtcgagtatagataattgggcgtcgcatttgtattattgcttgtatttggctgtcacaataaagaacaccgttttttccttgtttg

SEQ ID NO: 96311 - DNA, 993 bp, Zea Mays
agcacagtgccttcactgcacttcgcttggctgcctcgagaaaagctccactccaaaaaaaacctcgcgtcccttttctgaatccagactacagaggggcgggcgtgtcctgtcggatgacgagccggcgtgacaggttggagccgtcgccggcggcggccgcggtggcgctgctgctggtggtggtggtggccggcgcgccggcgtctgggcaggtggcgacgtcgtgcacggcgtcgctgatatcgacgttcacgccgtgcctcaacttcgtgacggggagcacaaacggcggcggctcgccgacgaagcagtgctgcggggtgctggcggagatggtgcgcacgggcgccgactgcgcctgcctcatcctcacgggcaacgtgcccttcagcctccccatcaaccgcacgctcgccgtctccctccccaagctctgcagctccacctccgtcccgctccagtgcagagacacggcgacgcaaatcccagctccaggacctatcgcgttcgctccggctctgcctccactgccacccatcccaccggaatcgtccgaccctccggcggatcccacggcgatccctccggcggtggactcgccgccgttctcccagaggccagtggtggtgcccagctccgctgttaggaggtctcacgtatccgtggcggctgtcgccgctgtgctgcccatagttgctgccgcgtccattttcgtttgatcaggatgtggtgctgtaggatgcatgcgttgtggtgtgcggtttgagaaggaactatctgtgtttccgggattttgagttggcttgtgatcatgattttgtacagggtattataaacagcacagtgagaaatacggctccaggagtccaggcagaaccagtcctcttctcccacctctctgcctaatttctccttttttttttatttaccccgtgttccctttcctcatgtcccgcaagagcaattatgaacatttgatttcactatcgc

SEQ ID NO: 96312 - DNA, 971 bp, Zea Mays
agcacagtgccttcactgcacttcgcttggctgcctcgagaaaagctccactccaaaaaaaacctcgcgtcccttttctgaatccagactacagaggggcgggcgtgtcctgtcggatgacgagccggcgtgacaggttggagccgtcgccggcggcggccgcggtggcgctgctgctggtggtggtggtggccggcgcgccggcgtctgggcaggtggcgacgtcgtgcacggcgtcgctgatatcgacgttcacgccgtgcctcaacttcgtgacggggagcacaaacggcggcggctcgccgacgaagcagtgctgcggggtgctggcggagatggtgcgcacgggcgccgactgcgcctgcctcatcctcacgggcaacgtgcccttcagcctccccatcaaccgcacgctcgccgtctccctccccaagctctgcagctccacctccgtcccgctccagtgcagagacacggcgacgcaaatcccagctccaggacctatcgcgttcgctccggctctgcctccactgcgtaaggacctttgccttctctgctcacgccacgccaggtcgatctcccttctctaaactttactgacaaacgtgatcgacacatctgcagcacccatcccaccggaatcgtccgaccctccggcggatcccacggcgatccctccggcggtggactcgccgccgttctcccagaggccagtggtggtgcccagctccgctgttaggaggtctcacgtatccgtggcggctgtcgccgctgtgctgcccatagttgctgccgcgtccattttcgtttgatcaggatgtggtgctgtaggatgcatgcgttgtggtgtgcggtttgagaaggaactatctgtgtttccgggattttgagttggcttgtgatcatgattttgtacagggtattataaacagcacagtgagaaatacggctccaggagtccaggcagaacc

SEQ ID NO: 96313 - DNA, 207 bp, Zea Mays
acgcacaacaacctgcactaagggaccaaaattaatattttcagatttggcaggagccgcgcgaacgcgtaccccctctaccacaaattatgacgtccactctcccattggggagatggtaagccaacgcacccaccaagtgcaatgtgggtcattagcctaggctacgagccttggtgatcgcccgttgaccgcgtccaggtaagt

SEQ ID NO: 96314 - DNA, 215 bp, Zea Mays
ctgcgagaaacactgtgtacatcaaacaaggaccaaaatttaaattttcagatttggcaggggccgcgcgaacgcgtaccccctctaccacaaattatgacgtccactctcccacttggggagatggtaagccaacgcacccaccaagtgcaatgtgggccattggcctaggccacgagccttggtgatcgcccgtcgaccccgtccaggtaagt

SEQ ID NO: 96315 - DNA, 2456 bp, Zea Mays
ctccagagcttgggcagactctcctcagtaactatagttttttttgttccttgggaggatagaaaaaatatatccttggttttcttgaacagataacatttcaggtgtgcttctgaagggagatttcgttgaacaggatgaatgcattggcagcaaccagcaggaacttcaagcaggcagctaagctgctgggcctcgactccaagctggagaagagcttgctcattccattcagggagatcaaggttgaatgcacaatcccaaaagatgatggaactttggcatcctatgttggatttagggttcaacatgataatgctaggggacctatgaagggtggaatcagataccaccatgaggttgatcctgatgaagttaatgccttggcacaattgatgacttggaaaacagcagtagctaacataccatatggaggagccaaaggtggaattggatgtagccctggagacctgagcatctctgagcttgagaggcttacccgagtttttactcagaaaatccatgacttgattggcatccatactgacgttccagctccagatatgggcaccaactcacagacaatggcatggatacttgacgaatactcaaagttccatggttactcacctgctgttgtgacaggaaagcctgtggacctcggaggatcattgggaagagacgccgctactggaaggggagttctgtttgctactgaagctttgcttgcagagcatggcaaaggcattgcaggccagcgtttcgtcatacagggattcggtaacgttggttcctgggcagctcagctgataagtgaagccggtggcaaggtgattgctatcagtgacgtcacaggcgccgtcaaaaacgtcgatggcctcgacatcgtgcagctagtgaagcactcggcggagaacaaggggatcaagggcttcaaggggggagacgccatcgctccagactcgttgctcactgaagagtgcgacgtcctcatcccagcagcgcttgggggagtcataaacaaggataatgctaacgacataaaggcaaagtacatcatcgaggctgccaatcaccccacagatccagaggcagacgagatcctgtcaaagaaaggcgtcctcatcctccccgacatactggccaactctggtggcgtcacagtgagctacttcgagtgggtacaaaacatccaggggttcatgtgggacgaagagaaggtaaacgcggagctgcggacgtacatgacgcgcgccttcggggacgtgaagcagatgtgccggagccacagctgcgacctccgcatgggcgccttcacgcttggcgtcaaccgcgtcgcgcgcgccaccgtcctcaggggatgggaagcatgacctccctccgtgtcgtccgtgtgcccctccctgttgtatcctcttggtcttgggcccttgtttttctttggttaattattgtcgagatcaacggagatccgagaaaaacgggctcagttaataattccaagaagtgcgtcttcttggagataaaatagcggaaggagagttataataagtctgtaactgtaacccatagctgagatgctgtctgcaagcagcaatgccaatgccaatgccatctggttttcgtgcacgactttgggtcattttcgaatcctgatcactcaacgacagggtcggtagagatgaagctgtagacagccacgtccctgagcctccccttcaccacgcggtagctccgcagcacggcctcgcgctggaacccggccttctcgagcacccgccgcgccgccgcgttgtggtcgacgtccacgagcgcctcgacgcgctccacgcccgggaggtcgccgaacgccgcggagaccgcgcgcctcgccgccgctgtggccacacccttcccccggtgcgcgcgcgccagcacgacgcggagctcggcgcggcaggcgtcgtcggtgggcgtcacggacaccgcgcccacggggcggcagtgtccgccgccgccgaggcagacggcgcggaaccacgggtgcggcagcaccgcgtcgcgcaggaacgccaggagggcgtcccgggacgtgcaggcgtcccacgccatgaacgccgtcacctcggggtccgacgcccactccagcatcgcgtcgacgtcgccgagctcgaaacgacggagcgtgaccgcgggaacggaccccggtcgggcaggcgcttcttgctccatctctgagcctccctcccatccgacgcgttgcttttgccttttcttttgcttggtggtgtcgtggtggtgcgcagtcaccagtggaagctttgcgtcctgtccctgctttgacgctgtcagccacactaatcaaattaaagtggcagtggggcacacaatcacgcaacgcaagtgtgtaataagacccacaccagcactacacaccgtccaccagactaatttgataggtgaatatagaacatagt

SEQ ID NO: 96316 - DNA, 1604 bp, Zea Mays
tcttgtatttaggctttttgggttcttgctcattccgttgagcttccagataacatttcaggtgtgcttctgaagggagatttcgttgaacaggatgaatgcattggcagcaaccagcaggaacttcaagcaggcagctaagctgctgggcctcgactccaagctggagaagagcttgctcattccattcagggagatcaaggttgaatgcacaatcccaaaagatgatggaactttggcatcctatgttggatttagggttcaacatgataatgctaggggacctatgaagggtggaatcagataccaccatgaggttgatcctgatgaagttaatgccttggcacaattgatgacttggaaaacagcagtagctaacataccatatggaggagccaaaggtggaattggatgtagccctggagacctgagcatctctgagcttgagaggcttacccgagtttttactcagaaaatccatgacttgattggcatccatactgacgttccagctccagatatgggcaccaactcacagacaatggcatggatacttgacgaatactcaaagttccatggttactcacctgctgttgtgacaggaaagcctgtggacctcggaggatcattgggaagagacgccgctactggaaggggagttctgtttgctactgaagctttgcttgcagagcatggcaaaggcattgcaggccagcgtttcgtcatacagggattcggtaacgttggttcctgggcagctcagctgataagtgaagccggtggcaaggtgattgctatcagtgacgtcacaggcgccgtcaaaaacgtcgatggcctcgacatcgtgcagctagtgaagcactcggcggagaacaaggggatcaagggcttcaaggggggagacgccatcgctccagactcgttgctcactgaagagtgcgacgtcctcatcccagcagcgcttgggggagtcataaacaaggataatgctaacgacataaaggcaaagtacatcatcgaggctgccaatcaccccacagatccagaggcagacgagatcctgtcaaagaaaggcgtcctcatcctccccgacatactggccaactctggtggcgtcacagtgagctacttcgagtgggtacaaaacatccaggggttcatgtgggacgaagagaaggtaaacgcggagctgcggacgtacatgacgcgcgccttcggggacgtgaagcagatgtgccggagccacagctgcgacctccgcatgggcgccttcacgcttggcgtcaaccgcgtcgcgcgcgccaccgtcctcaggggatgggaagcatgacctccctccgtgtcgtccgtgtgcccctccctgttgtatcctcttggtcttgggcccttgtttttctttggttaattattgtcgagatcaacggagatccgagaaaaacgggctcagttaataattccaagaagtgcgtcttcttggagataaaatagcggaaggagagttataataagtctgtaactgtaacccatagctgagatgctgtctgcaagcagcaatgccaatgccaatgccatctggttttcgtgcacgactttgggtcattttc

SEQ ID NO: 96317 - DNA, 321 bp, Zea Mays
agattttggagatatgtgacaaacgccatgccctgtgcattagagaagatacagaatcgccatgccctgtacaagacagtgagccaaattcttgttcattttgcactatgatacatattgattcattaggccctaggttggaggttgtgactgatgagttgggaagggattacttgattggtggtgtacaattcttggactggatacatgttccagtttttggtccattagttcaggaattgtttcatttacatgtatattcagtacactcgtataatggaaacaggcaaatctctatctcattctttggttattgtgtta

SEQ ID NO: 96318 - DNA, 1587 bp, Zea Mays
atggatcacgtagtcgggggcaagttcaagctcgggaagaagatcaggagtggatcattcgggaaactttacctcgccgtgaacgtgcagaatggcgaggaggtggctgtcaaactgggtggaagctgccggcgtgaagcactggccaccgggtgctgcacgtcaacggccaacagggggcaccgtgcaggtgggcagaagcagccagcgacaacagtagggcacagacgcctggaagagggagaagaaaagggtgaattggggttcatccttgatggctttcctcgaaccatgagacaagcgcaccaacctcggcaggctgggttcgctggcgacgacgccccgagggccgtcttccccagcatcgtggggcgcccgcgccacactggtgtcatggtcgggatggggcagaaggacgcctacgtcggtgacgaggcgcagtccaagaggggtatcctgaccctcaagtaccccatcgagcacgggatcgtcagcaactgggacgacatggagaagatctggcatcacaccttctacaacgagctccgcgtggctcccgaggagcaccccgtcctcctcaccgaggcgcccctgaaccccaaggctaacagggagaagatgacccagatcatgttcgagaccttcaacacccccgctatgtacgtcgccatccagaccgtgctctctctgtatgccagtggccgtaccacagattttagagattacctgtatcgcaattttagatattccgtggaaaagacggaaggcctgggtgtgttcagaacacatgtgctcacagggcttgcccgctgcatcttggttcagtgaacgagggtaggatccagtgcccttaccatggttgggagtactctactgatgggaaatgtgaaaaaatgccatcaacaaatatgctcaacgtgcacatccagtcattgccatgctttgagcaggaaggaatggtctggatttggcctagggatgacccaccaaaggctacaatcccttctcttctgcctccttcaggatttacatgctcactgttgatgcagggggtgcatggcctagggggaggatggcgactaggttcatcgatggcggcaagcagctcgtgttcgaccacgcgacacagttcttcactgcgagcatccgcaccgctgcaggtgctgcatatcatcggcagagaggatcgagttcagatcgatgatgcaaggcggctgcatcgtcgagctgtaacacctgcagcgatgatgcctccttatgggacaccaccaccatatgcagcaatgtatgcacaaggtacaccataacagcaggcaccaatgccaccgggttcacacccatacagttcttatcctatgcagtcaccaaacggacagttcaaactccaataagaatctcttggctgctcacctgtcgcatcttccccgattcaaaatcgtcctggtcgcatcttccccgattcaaaatcgcccagttgagttttccaatcctatatttttttctcgaaagttttccaatcctatattcagtttgcagtaacacgatttttgcatttagccattttttattttgttgtatactttcgta

SEQ ID NO: 96319 - DNA, 1229 bp, Zea Mays
atggatcacgtagtcgggggcaagttcaagctcgggaagaagatcaggagtggatcattcgggaaactttacctcgccgtgaacgtgcagaatggcgaggaggtggctgtcaaactgggtggaagctgccggcgtgaagcactggccaccgggtgctgcacgtcaacggccaacagggggcaccgtgcaggtgggcagaagcagccagcgacaacagtagggcacagggatgtatatggaccttccaaatacactagacttttgcaagcaaccaaagatactctcagataagaaggtttgccttgccaatcaaaaggaaaactggtgtctgatgagatcatcataaatctgctgtcaagacgcctggaagagggagaagaaaagggtgaattggggttcatccttgatggctttcctcgaaccatgagacaagcggtagaaaatggccgatgccgaggatatccagcccctcgtctgcgacaacggaactggcatggtcaaggctgggttcgctggcgacgacgccccgagggccgtcttccccagcatcgtggggcgcccgcgccacactggtgtcatggtcgggatggggcagaaggacgcctacgtcggtgacgaggcgcagtccaagaggggtatcctgaccctcaagtaccccatcgagcacgggatcgtcagcaactgggacgacatggagaagatctggcatcacaccttctacaacgagctccgcgtggctcccgaggagcaccccgtcctcctcaccgaggcgcccctgaaccccaaggctaacagggagaagatgacccagatcatgttcgagaccttcaacacccccgctatgtacgtcgccatccagaccgtgctctctctgtatgccagtggccgtaccacaggtgagctgattccgttctctgcttaacaatttccaaatccgattttctcctgcagtccgtaatctctaaaatctgtgccctctctcagattttagagattacctgtatcgcaattttagatattccgtggaaaagacggaaggcctgggtgtgttcagaacacatgtgctcacagggcttgcccgctgcatcttggttcagtgaacgagggtaggatccagtgcccttaccatggtaagtctcctactgtctgaattagttcagagattctcggggttactgtatcttgttttcagaagtgcgcctacttgtttgtttaccctgtctgaatta

SEQ ID NO: 96320 - DNA, 597 bp, Zea Mays
tctgtagagcaactcatggatactttctgcttgttttaacaaacgcgacatcgggcgagctctgatgtaggtagaaaatggccgatgccgaggatatccagcccctcgtctgcgacaacggaactggcatggtcaaggctgggttcgctggcgacgacgccccgagggccgtcttccccagcatcgtggggcgcccgcgccacactggtgtcatggtcgggatggggcagaaggacgcctacgtcggtgacgaggcgcagtccaagaggggtatcctgaccctcaagtaccccatcgagcacgggatcgtcagcaactgggacgacatggagaagatctggcatcacaccttctacaacgagctccgcgtggctcccgaggagcaccccgtcctcctcaccgaggcgcccctgaaccccaaggctaacagggagaagatgacccagatcatgttcgagaccttcaacacccccgctatgtacgtcgccatccagaccgtgctctctctgtatgccagtggccgtaccacaggtgagctgattccgttctctgcttaacaatttccaaatccgattttctcctgcagtccgtaatctc

SEQ ID NO: 96321 - DNA, 957 bp, Zea Mays
agggtttcactcttccgtatataatcctgcccacaacgccgtctcctaaaccttagccgcgcggacgcccaccagcagctgcccccttgctgtcgccgcctctccgcgcgaccgatctaccgccgccgccaccatgtcgctgatcgccggcgaggacttccaacatattctgcgtctgctgaacaccaacgtggatgggaagcagaagatcatgttcgccatgacctccataaagggtgttgggcgccgcttctccaacatcgtctgcaagaaggccgacatcgacatgaacaagagggccggtgagctgacgcctgaagagctggagcgcctgatgacggtcgtggcgaaccctaggcagttcaaggtgccggactggttcctcaacaggaagaaggattacaaggacggaaggttctcacaggtcgtctccaacgccctcgacatgaagctcagggacgacctcgagaggctcaagaagatcaggaaccaccgtggtctgcgtcactactggggcctccgtgtccgtggccagcacaccaagaccactggcaggcgcggaaaaactgttggtgtctccaagaagcgataagctacatatctatcgacaaatctcagatgtactagtgttggttcatgttcaaactgtcttgatgaagggtttctgttgggacagtttcctgaaattatgttttgccctaggataatcttgcagttatggaaccttattatattgtatcctgcaatttgtttttttgcaacttataagagtaattttatttgatgagtcttatgctgatagtctctctatgctgttggtattgttaaggctatctttagcggagcttatatatggacgtgcaaaacacttttttttgttatgtagactctattgtttatagagtagagtttgaaatattgagtgagataaggattgaggttgggattgttggagat

SEQ ID NO: 96322 - DNA, 908 bp, Zea Mays
agggtttcactcttccgtatataatcctgcccacaacgccgtctcctaaaccttagccgcgcggacgcccaccagcagctgcccccttgctgtcgccgcctctccgcgcgaccgatctaccgccgccgccaccatgtcgctgatcgccggcgaggacttccaacatattctgcgtctgctgaacaccaacgtggatgggaagcagaagatcatgttcgccatgacctccataaagggtgttgggcgccgcttctccaacatcgtctgcaagaaggccgacatcgacatgaacaagaggcaagcgctgtgttttcgctctgaggaccttatcaggtctctctggtgacgatgtgcctgacatgccggcgagtgtgcagggccggtgagctgacgcctgaagagctggagcgcctgatgacggtcgtggcgaaccctaggcagttcaaggtgccggactggttcctcaacaggaagaaggattacaaggacggaaggttctcacaggtcgtctccaacgccctcgacatgaagctcagggacgacctcgagaggctcaagaagatcaggaaccaccgtggtctgcgtcactactggggcctccgtgtccgtggccagcacaccaagaccactggcaggcgcggaaaaactgttggtgtctccaagaagcgataagctacatatctatcgacaaatctcagatgtactagtgttggttcatgttcaaactgtcttgatgaagggtttctgttgggacagtttcctgaaattatgttttgccctaggataatcttgcagttatggaaccttattatattgtatcctgcaatttgtttttttgcaacttataagagtaattttatttgatgagtcttatgctgatagtctctctatgctgttggtattgttaa

SEQ ID NO: 96323 - DNA, 586 bp, Zea Mays
acacgggcactgatgaccacgaacgtattgttcgtcacagttgtaacacagtccctgtttgcgcgcgctcagccatctcgacgggggtgagcttcttaaatggacgttgtgcccccgtgctggttggtgctgctactgttacagtggactgttgtgctggaataggaaatgacagccactggggaggcctcgacggcttgttggtagttgatgtctggtggacgtcgagtgcccgagcccttcgttcatatgctcttgccaaacttaatgcatgattgagatcccgaggagccataagttcgacatcgatcttgatacgctctggaagacctaccgtgaagagctataccttctgttctaaagtgagtggcgtggtgtgggccagtaaatcccagaacctctcctgataatcctccactgttgttcgaaatggaagccttgtcaattccccgagtgggttgctgcaaagcggtggtccaaatcggagttggcataactgcttgaaacgcccccatgacaggggtggttcatcatgcaggagctggttgtaccaagtccatgcaacgccgagcatgtgatatgaaac

SEQ ID NO: 96324 - DNA, 1211 bp, Zea Mays
acaatcttggctagtgcaaaaactaaggaggacaaatactatgtggatatgcagtgggctttgttcttctatgaatgtggtgtgcctttcaatgctacagcagctaaacaatttcagattgcgattgaggccacaacatagtttgttttagggtataagcctctaacaccttactaactaggcgagccattgctacaagagattgtgaagtcgacaaatacaatgagggaggaacatgagcgtgcatgaaaatactatggttgtacactcatgtccgatggatggtttgatagaaagggatgtcatctgattaacttcttagtgaaacagtctggaagacacttactttttagagtctattgatgcatcaaatgaagtacatgatgcatacatgcttactgatttgctagagaaaaaagtcgatgagactggtagaggaaaggtggtacaagttgttactgataatggtgccaattacaaggttgtaggcaatcttctaatggagaggattcctacattattttgaagttcatgtgctgtacattacttggatctaatgttggaggacatatgaaacttgaatgattccaagaaaccaatcgcacttgcgatgcgtgtgtcaatttttatatatagacatgggagaatccttgctaccatgagggagaaaactggtggggatgatcttgtgaggtccgctgccattcattttgctacttcctttctcacattgaagagattgtacaaacacaaagatgatttgaagtctttatttacaagtgttgtttggattgataacagtttatcaaagactagtgctggattggatgtgtataacattgtcttctccacaattttggaatttagtagaagattatcttagagctttagggccactactcattgtacttagggtggtagatggatatgagaggccagctacgtcggaggtcaaagcattaatgaaacatgcaaataaaaagattaatcaaagctttgttgtccaaagcaagaagagtttaataaagagcatcatgactctaattgaacgacgtcgggagaaacaaatggttcatccactttatggggttgcaacgtatttgaacctaggaaagttgcatcctctcataagaaattatgatgatgctactgttgggcagctaagatgttgctttcttgatgtgcttgcaagaatggtacatgatgaggaa

SEQ ID NO: 96325 - DNA, 568 bp, Zea Mays
ctatattttgctcaaatcactagaatgtggcaattgggagactttggaacaatggaggtgttgctctattgtaaggacttaaatgctcagctcttgtgattcaatgggtcgattggatgttggatgtatttatagtctccaacaaccaaaatagtcgttggcattaaatgctaaaatctacaatttctgtgtgtgcactagaccttgaatattgtcagtctggtgtgtcaccaggcctttgtcaaactgatggggagcagtcttatcagagtcatcgaacctatctagtgcaccaccgagcatcgccacgtcagccaccacatcacctagccatcgggtctggaacttcgaccattgaactctgactggtccagtgcgctagcgccttcaaacctctaaaacggcttctccgcgtaatcggttcggcgtaccaccaaattatctggtgcgccaaccaaccaatgcacatttacagtgctctctgtgtacttggtctagtgcatcagtggatcggtctggtttgcctcagacgagcagacttaactccattttaggtaaatcttcttca

SEQ ID NO: 96326 - DNA, 1063 bp, Zea Mays
accacacggtgtgtcactatcattcttcaaataagatgatttgtttccaatttatatctcgagatgagattgaactaagctaattttctcctactagtatgaaagctttacagaaaggcaacatcctgcctgcactaacacaactctgaaaaccagctgcacacagatctgacaaactgatactacaaatctacggctaggctacgaagcatctgtagcggcatgtactgctgatgagactggtttacacccagcaagtgattccggtggatctcatggaggataataaacaagaagacaccctggccctccacgggaaagaacacaccatggtcgagaatgagcggggtccttcttgactcattggatagcgcaaacacatgtcgagatgccgtctccgtcgtcaagcaagtctccgccttcgctgtcttggctcgtactccttaatctctgccagatctttcccgatcaaatccagccactttacattgcctttgtcggcgcactcgtcatcgccgcagctggttttcttcaggcaactcttacccagcgccggcgccttctccacatcctcgcgcttctcagcgtcgtcgtcccttccggcggctaccggcgcctctaccttctgaaccggaggcggctcctcctcggcgacagcggctgggcgcggagccggcggagaggcggcggcagcgtcgcggctcgcatctttggattgggggaggcaggggatgaggcggaagggaccggcgcagtggctctcgcaatgggagagcctcatcaaggtcgggggtggaagcacggaaagctagtgccaaatagcccctggctccaagagcacaccacatcaatcgaatctctcgactggcactggcagaggagcagatcgaggtgctgctgcggaatgcaaccaggaatcgagcctgccgacaagaggagcagcaaatctctgtgcaggagaggtgcggaagcggggagagctgcagctggttgtaagcttgacagggaggcaggggagcaggagagaagacaaaagagtgcgttgtgtgcgagtgcgagagag

SEQ ID NO: 96327 - DNA, 486 bp, Zea Mays
aagaaatggccaccgaaaaaggaacagagcgagctatccctcaccaaattgtcaaccaagcctgctccccctgcctaggccacaggccagtatgataatagagaaaaagcaagcaggagggatgggcgagtgagatgcttcgttcacgttccagtgatggttgaagctggtgccattggggatgcccagacgcgcttcgttcacgttccagcgatggttgaagctggtgccattggtgatgcccagacacgagcgtgtgcagcctggttgacgtcagacgagccaggcacgctggacgggcctaaggcgttcgatgaaatgcccccccaagagtgcgacgtgtgccagaccgacatagcctcttggtttcgttgcatattctcgaagatggaaagtatgagctaatattcattgagacatatatatacatatgtttacatgaatctggttttattagattctgtaagcaaggggattatgattcta

SEQ ID NO: 96328 - DNA, 1959 bp, Zea Mays
tccgcggtaggattttttttggccacgccccagcctcagtcttcttccccgcgtgtgcagccgctgtcttctttctccctgcgtgctcctctctaaccagccgttcctcttctccctcagctcgcgccctgaagtttcccctgccggcgttcggcttctgctcgtcggaccccgtcccgagctcgcccccatggcgtccagtggagtttctcctcgccgacgctgctccttcctgccccagcgcctgctgcgagctcgccaggatgcccctgctcgcggcgccctctgctcaagctcgtcgtcctgcgccgtcagtcgaccttgccgtgaagccctggccggtgcggtggtagcgcccagcccccagcgttggcccctcgcatggcgctgctccctggcttctctctctccctccatctctctctgcgtcggcctgcctcagctcggatctccctccccagccgaggcccttcttccctggtctcccatggccaccgttcttcagtcgagctcctcagcgccgaaggctcaggtccctgccgagctcgtctcgagctcccgcccaccctctgcccagccccagcgcccagcccatgtgtctggtgcttctacctgctcagatttggtgaccgtgtcccctggttcttcaagtttgtcgctgtccctgcttgcctcggcacagttgggtccgaccaccacccccatgtcgacggtgccctcgattcgtcggtgcccaggcgtgcatcctctgcaccggctattctcgcccaaattcacccctgcacttggtcctcgtcgaggatacgtcgccctccactcggttcatggcgctcggcctccagctcgcgaagcttccctggtggccgcttcctcgtcgttttctatagtcgcgcccggccgaggttcctccctgcgtgcgcaagctctgttgcgagcgccgatccgtacccacaaagcctcgtcggtgctcaattggctcgaaccctctgctcggacctttcttccgtggcgctcagctcggccagatgcgacctcgccttggctctctgtccctactgcgctcgccagtcggactcctggccatcgtcaacgaatctcgcgatcacagctctctgttgctcaaccggcgactcgctactcgtcttgctccagcctccaggtacgttaattaatcgcgcgatgcggaagacaagccaagtcgaccccaagcacggactaatccacaggatgaagctgatgaacgaacctgcctaatcaagtgctaggacatgaataatcgtcaagtggacgtcatctaacaacactaacctagtgttactcaggcaagccccggtgcatttaccacccctccttgtgttttaaaaatctttatcacttgcttgatgcattaggtgataggagttgattgctaaaacaattcctgcattaccttccttggatttaattaccttccttgaaatccctgttttacaaaagatttttgatgcttagccttgctttagaaaaataaaatgttttgtttttacaaaatatgatgtggcaaaagtgggtgggatgttttcaaaaataaaacttgatggtgaatccatcacggccgtgatggattcgacatcagaaaagatgtacctctgctaggtaccaacctttggggttagatgattaagctgagaccggacgggtgacttgcacgagaaagagagtctcggtgtagtgtctccatctgagtcgattaaggaccttgtcgatgtaggcttgatgatcgaggaccctttaactggtcacatgcctcgtcatgggtaagccttgcctcgggcagactaaggccagaataagataacacgaaatgggcgtggagcggtggcgagagtagcgtgtaccctccgtggcaagaggctggacggtggtgtatctgtgctctcggtttgcgtgaacctgatctggtcttaagaaactcggtgg

SEQ ID NO: 96329 - DNA, 1204 bp, Zea Mays
acgccccagcctcagtcttcttccccgcgtgtgcagccgctgtcttctttctccctgcgtgctcctctctaaccagccgttcctcttctccctcagctcgcgccctgaagtttcccctgccggcgttcggcttctgctcgtcggaccccgtcccgagctcgcccccatggcgtccagtggagtttctcctcgccgacgctgctccttcctgccccagcgcctgctgcgagctcgccaggatgcccctgctcgcggcgccctctgctcaagctcgtcgtcctgcgccgtcagtcgaccttgccgtgaagccctggccggtgcggtggtagcgcccagcccccagcgttggcccctcgcatggcgctgctccctggcttctctctctccctccatctctctctgcgtcggcctgcctcagctcggatctccctccccagccgaggcccttcttccctggtctcccatggccaccgttcttcagtcgagctcctcagcgccgaaggctcaggtccctgccgagctcgtctcgagctcccgcccaccctctgcccagccccagcgcccagcccatgtgtctggtgcttctacctgctcagatttggtgaccgtgtcccctggttcttcaagtttgtcgctgtccctgcttgcctcggcacagttgggtccgaccaccacccccatgtcgacggtgccctcgattcgtcggtgcccaggcgtgcatcctctgcaccggctattctcgcccaaattcacccctgcacttggtcctcgtcgaggatacgtcgccctccactcggttcatggcgctcggcctccagctcgcgaagcttccctggtggccgcttcctcgtcgttttctatagtcgcgcccggccgaggttcctccctgcgtgcgcaagctctgttgcgagcgccgatccgtacccacaaagcctcgtcggtgctcaattggctcgaaccctctgctcggacctttcttccgtggcgctcagctcggccagatgcgacctcgccttggctctctgtccctactgcgctcgccagtcggactcctggccatcgtcaacgaatctcgcgatcacagctctctgttgctcaaccggcgactcgctactcgtcttgctccagcctccaggtacgttaattaatcgcgcgatgcggaagacaagccaagtcgaccccaagcacggactaatccacagga

SEQ ID NO: 96330 - DNA, 1658 bp, Zea Mays
tccgcggtaggattttttttggccacgccccagcctcagtcttcttccccgcgtgtgcagccgctgtcttctttctccctgcgtgctcctctctaaccagccgttcctcttctccctcagctcgcgccctgaagtttcccctgccggcgttcggcttctgctcgtcggaccccgtcccgagctcgcccccatggcgtccagtggagtttctcctcgccgacgctgctccttcctgccccagcgcctgctgcgagctcgccaggatgcccctgctcgcggcgccctctgctcaagctcgtcgtcctgcgccgtcagtcgaccttgccgtgaagccctggccggtgcggtggtagcgcccagcccccagcgttggcccctcgcatggcgctgctccctggcttctctctctccctccatctctctctgcgtcggcctgcctcagctcggatctccctccccagccgaggcccttcttccctggtctcccatggccaccgttcttcagtcgagctcctcagcgccgaaggctcaggtccctgccgagctcgtctcgagctcccgcccaccctctgcccagccccagcgcccagcccatgtgtctggtgcttctacctgctcagatttggtgaccgtgtcccctggttcttcaagtttgtcgctgtccctgcttgcctcggcacagttgggtccgaccaccacccccatgtcgacggtgccctcgattcgtcggtgcccaggcgtgcatcctctgcaccggctattctcgcccaaattcacccctgcacttggtcctcgtcgaggatacgtcgccctccactcggttcatggcgctcggcctccagctcgcgaagcttccctggtggccgcttcctcgtcgttttctatagtcgcgcccggccgaggttcctccctgcgtgcgcaagctctgttgcgagcgccgatccgtacccacaaagcctcgtcggtgctcaattggctcgaaccctctgctcggacctttcttccgtggcgctcagctcggccagatgcgacctcgccttggctctctgtccctactgcgctcgccagtcggactcctggccatcgtcaacgaatctcgcgatcacagctctctgttgctcaaccggcgactcgctactcgtcttgctccagcctccaggtctgtgtatccgcacgtcgttgtgccttcgcttggcacaatttttaatttgatgatgtgtgtggttgataattggagtgaaattctagctgttgggcgacgacgtgtggaacgttgttcatcacgcgctaagtgcttgatggacggtctcaaccgaaatcatcgtcgttctcgtgaattttacatcgactagtaatagtacattgattcgctagttcctactattggttcatggactggattaattatttatattagttatgtcagttttctggacggctgcaaccgggtgttgtggttatattaattgttaggttaaaatgcctcgtgtcatgtgttttgatatattgtttccttcatgcttgcgcaaaaccttgttgggttaagaggttaattaacttgctgtcacccttgttccgattatggggtgaccaaagttagtaagtcgaaatattgtaccagttaacctagagaagtaatttatgaagattagttaaat

SEQ ID NO: 96331 - DNA, 1802 bp, Zea Mays
aatgatccaatccaagcacaataagaacagtataaacaaagctagaggccatgagcaagtggtgcacgcgcagaaccttaagaaaaaaacaagtctgagaagccccagagatgaagcgcctatatatacacacacaccaaattgaacacacggcaacagcacacactggacacgaagcaagcacacactagacacagcagcaagcaagcaagacaccaaacattccagtgcccgccttataccgttgcatgacgaggatgagctcgagggcggcggcggtggcggcggcggcgttcctggtgctcgcggccgcctgtccgctgctggcctcggcgcagccagcgccgggcatgcctccgccgtccccggccgcgaacaactcccggctggagaaggcgtacgtggcgctgcaggcgctgaagcgcgccatcacggacgaccccaagaagctgaccaagaactggtgcgggcccgacgtgtgcagctacttcggcgtgttctgcgcgccggcgcccgacgacccctgccagcgcacggtggcctccgtggacctcaaccacggcgacctcgccgggacgctccccgaggagctgggcctcctgtccgacctcgccgtcttccacctcaactccaaccgcttcagcggctccctccccgactcgctccgctccctccacctcctccacgagatcgacgtcagcaacaaccagctctccgggcccttcccgccgcagctcctctgcctccccaacgtccagtacgtggacatcaggttcaacaacttctgcggcgaggtgccggcggccatcttcgacaagaaggtcgacgcgctcttcatcaacaacaaccacttcgagttcacgctgcccgacagcttcaccaactcgacggcgtcggtgatcgtgctggccaacctgcagcgggtcagcggctgcctgccgagcagcatcggcgacatggccgccacgctcaacgagctgatcctgctcaacagcggcatctcctcctgcatcccgcccgagatcggcaagctggacaagctcaccgtgctggacctcagcttcaacagcatcgccggcaccctgccggacacgatcggcaacatgcgggcgctggagcagctcgacgtcgcgcacaaccgcctcgccggcgagataccggagagcgtctgcggcctgccgcacctcaagaacttcacctactcgtacaacttcttctgcggcgagccgcaccggtgcctcgaggtgccgcgcgtcgacgaccgccagaactgcatcgccgggcgccccgaccagcgcccgggcgaggagtgcatctcgttcctgcaccagccgagggtgcgctgcgacgcccacgggtgcatcgcgccaccgtcttcgccacctccacctccacctatgcatgctcctccgccgcctgtatactgatccgtgaaccgtggtaactcgcgattgcttcccttgcctagcttgtggtgtcaaaatcgaaagggtaaatgcatacacatggtatatactgtaacttttatttctcagcaaaagattaataatggattcatagatttttcatcacggaatgctaagcatattgatattccccaaaagaaaaagaaaagaaaaaaaattgcactgcacagctcaactgaaagtttggtgagagagagacttatcaatgcattccttttatttgtttcttgtactggttttccaatgctgtagtacttccaagtcatagctaaacaatgctctctagcagtacgatctgcaaaatacttggcttctcatagcatctcgtcggtacaa

SEQ ID NO: 96332 - DNA, 94 bp, Zea Mays
gttatatactgtgctacactagactcggttaatatgtttgctgcacgtcggacacaccgtttgtcggtacctagaacgggttactagagaagac

SEQ ID NO: 96333 - DNA, 94 bp, Zea Mays
ccgagcccagcctcgggcaagggcagccgaccccggaagattcacgtctcgcccgaggaccccctcaagcgacggacacaccttcggctcgccc

SEQ ID NO: 96334 - DNA, 1160 bp, Zea Mays
cgcctaataaacatccctccccagcgcagcgcgcagcgcagcccacctatcaataaccgacgagcgaggcgcgagaaccgacttgccaccggctgctcgccgtctctctctctccctcggggcgcgcgcgcgggagacaggccaaccgatcgtccggcggccagccatgggcaagcacgggcacggcaagtgccacgacgtggaggcgtgctacccgccgggggcagcgggcggcggcaagtacccgtacatgacggagaatccgcagctgcggtgggccttcatccgcaaggtgtacgtgatcgtgtgcctgcagctgctgctgacggtggccgtcgccgcgacggtgaacctggtgcgcgccatcggggacttcttcctctcccgcaccatgggcgccatgttcgccatcatcggcgtcatcgtcgcccccatcctcgtgatgatcccgatgatcatttaccggaagcggcacccggtgaacctcgcgctcctggcgctcttcaccgtctgcatcagcttcgccgtggggctgagctgcctgacggcgaacgggccagtgatactggaggcggtggtgatcacgatggtggtggtgctggggctcaccttctacaccttctgggcggcgaagaggggctacgagttcgagttcctggggccgttcctggtgtccgcctgcctcatcctcatgctcttctccctcctgcggatcatcttcccgctgggcaggacggggaccatggtgtacggctgcatcgccgcgctcgtcttctccggcttcatcatctacgacaccgacaacctcatcagggtctactcctacgacgagtacgtcgccgccgccatcgagctctacctcgacatcatcaacctcttccaggccatcctagcggtgctcgaaggcgtcgactgatagggtcatatatataacacggccggctgaggctcatgggctgtgagcatatatacataggatcatatatatgcaatctatacatgagctaccactaccactaccgagagatgggttccaagcttgctgggcaatctgtaatccatagacgatagatagggtcgaacggcaccgccgtgattgaacattattgctacaacgaaacattgcaaatgcaattcattatcttctcttgcaactaaaa

SEQ ID NO: 96335 - DNA, 722 bp, Zea Mays
gtaatttgtatcaactaggattttgttcgttctctatgaagaagttgattgtctgtttgttatgcatacaggaaaaatcattttggaggctgccattcttacagcagtggtggtgatcagcttaactgcgtacactttctgggctgcaaagaggggtcatgatttcaacttcctcggtcccttcctatttgctgctatcatggtgctcatggtgttttcactaatccagatctttttcccgctgggtaagatatctgtgatgatatacggtgggttggcatcgcttatcttctgtggatacatcatctatgacacggacaatgtcatcaagcgctacacctacgatgaatacatatgggctgctgtttcactctaccttgacgtcatcaacctgttcctgtctctgctgcagctgctgagggcagccgatagctgagctcgtcaagctttcacttcgatcttgttctcacatacatctgtgtatatcacaaactctgtaatggtcatggatactccaatttataactatactctgtcggtgttaccttggttcaaatggtatgtctggctttaacggatacccatgagagttttaagagcgcggtcaatagctcagctgcttacaaacgagcttggataaaaatcataagctgtgcagtaacagtacatctgtacttgtcttgatcaattatttgcaataattatttatgattttgcaccat

SEQ ID NO: 96336 - DNA, 1178 bp, Zea Mays
ccgtccaatccaggtagtccgagccagcgaaccaactattcgtttgcttttcgtcttcgtcctctctttgcccagttgtcggtcgcccgcgccgtcgtctccgctccgccggccttcctgcgaaaccctagcgaggcgagcgagagagaaactagcggccatgttcggctacaggaaggctgacccggacctcgaggccggcgggtcctcgctgctgtacccgggaatgacggagagccccgagctgcggtgggcgttcgtccgcaagatctacgtcatcctagccgtccagctcgccatgacggccgcggtctccgccttcgtcgtcaaggtgcccgccgtctccaacttcttcgtctcctccaacgccggggtcgcactctacatcttcctcatcatcctgcctttcctcgtgctgtgccctctgcgctactaccaccagaagcatccggtcaatctgctgctgctcggcctcttcaccgtcgccatcagctttgccgtcggcatgacatgcgctttcactagcggaaaaatcattttggaggctgccattcttacagcagtggtggtgatcagcttaactgcgtacactttctgggctgcaaagaggggtcatgatttcaacttcctcggtcccttcctatttgctgctatcatggtgctcatggtgttttcactaatccagatctttttcccgctgggtaagatatctgtgatgatatacggtgggttggcatcgcttatcttctgtggatacatcatctatgacacggacaatgtcatcaagcgctacacctacgatgaatacatatgggctgctgtttcactctaccttgacgtcatcaacctgttcctgtctctgctgcagctgctgagggcagccgatagctgagctcgtcaagctttcacttcgatcttgttctcacatacatctgtgtatatcacaaactctgtaatggtcatggatactccaatttataactatactctgtcggtgttaccttggttcaaatggtatgtctggctttaacggatacccatgagagttttaagagcgcggtcaatagctcagctgcttacaaacgagcttggataaaaatcataagctgtgcagtaacagtacatctgtacttgtcttgatcaattatttgcaataattatttatgattttgcaccat

SEQ ID NO: 96337 - DNA, 132 bp, Zea Mays
atggcatgcggtgtcagcgttgcgtacgacggatcggtggaggtgtcgcgagcaagacaagaattaaagacacaacaacaacaacaacaacaacaacaacaacaacaaataatgtgtatgaaaattgtctag

SEQ ID NO: 96338 - DNA, 643 bp, Zea Mays
acatttcagacatttcacggatgcgaaaatgtactgcctttgtgctacttctgtggcttgattgcgaggttttgtctaaattgtgtcctgtgctaatgtttatacgatccaaacaagcttctactctatatcgtcaatttatctgagtagtgtggcacatacgtatttgtatctgatatctttcacccaacgccaacctatatggattttcacttttttggactcgagagctcgtcgcattgtcattatatgtaggtcaccatatctagttgttggatcagacgatgaatagcaatactatcggattatccttggtcgtcgtccattaagggttggtcatcatatttagtcatcggatcaaaagataaatagtacttcctctgttttaaaatagtatttgttttagctcgtgataccaaaaaatagtactcctaccaaaaaagcagtagggattgtgtaaatatgtttttcactatctcgataacggaaacaatggtggtggagtcttatacattttagacaattttaattgtcaacatctaaaaccggaaaacaagtaatcttggcttggtttatatattatgtcaacgagttagggcatgtacaagtacgatttcatttaatctaaggtcttttaagatag

SEQ ID NO: 96339 - DNA, 85 bp, Zea Mays
atgcagatcccaggtagaatcagttcggtagcttcttctgttcactggccatcatttcctttgatttcttctgtttcttagagtc

SEQ ID NO: 96340 - DNA, 863 bp, Zea Mays
tcctatcactgttctgcatccagcaaggaatcctttcttacatgcatcaaagcacacatagaacctttcaaatacttgatcttcaaactctggattcagatacaccacaactgtactaccagggttacttctcaagagctccaactggtagtcatacaccttgttgtactctcctttcatggagtccagagcagccttcaggaccaatgcctttgccctctttcacttggacggtgacacgtctgcaagaaggtcttttagaacaactttctttatcagttcaactttccatgttggattgtccttaatctcactgaaataatgcttcgcaattatgttggaggttactaacctattgtctctcctaggtgggcaagaatgctcatctataaaagtgacaaccttaaaccaatctgatctggtagtcttggaaccatagattaaccatttgcatccaggccaagaacagtttgccctaaccctattcttctcatctttatgaaagtgcaagtgcttgtgtgctttcaatccatacttcacaagagcttttttaattgtctactgcatctgaatgccattccaagtgagaacattggaactggtgctttgctatcatacctgttctcttgacaaagccaccttttagactcacattcactgttttcttcatatgaatactcttcactggagtcatgatatggactccctgggtcatctaggttcgtaacttcatctaccaattatgcggggttaatgtgtccaatccctccactttgtagtcctagcttcttagccctgatgttcctcttcgcatcattggcatattttctgaaatcaattgcttcatcattgtgacggaacct

SEQ ID NO: 96341 - DNA, 682 bp, Zea Mays
ctagagacttcatcaccgcaggcagtcgcgcggcggctctcctccccgcaggcagtcgcgcggcggcctcatccccgctggcgagcctccactcccctccgccggtacgcctctatcgtcggtggactccccctcggcagacagcctcgcctcgcgtcttctcaccagtcgcgcggccactatcccgctgctctgcgcaccgcgcaacagtaaccgctcttcccacgacctattccatcccgagttcacttgtgtccgctctgaaatggtgcaacgctgcggcgttccatgcccatgcttgtttacttgtgtccgtcggcagaacaattgctggttgcgggtgtttgcatcttttcgcgcacaaatagatagtgtgtggcattgcctatttcattcagttctgcaaagataacagaaggttgggtatgggcaaatgtcgggtcagtcaagcaagcatcgcactgctctaaaagatcacagaagattgggtatggaattgcttgttccatggagattttgaaggaattctaccaacaagagctgacctcatgaaaacctccctcatcgaattcttgtgtttttcctgcacctcatccaaacattcggtcttggagttttctttatttgttcgatctatagagctacaggattcaaggtactacggtaatgaattcctatgtct

SEQ ID NO: 96342 - DNA, 2572 bp, Zea Mays
aaatatataagagattagtgtagcacggttctgccagtgccatccgcgccctcagccgaggatctccattctcctccccacgcagaatccaccgcgaggtctccgccgccctaaccgcgcccttccatccatggttgcagtggtgtcgtgctccccagatctaccacgggcgcgtgcccggatctggcccgacgaacagcggtggagctcgcgcggtgttccattcatggattgggatctcaagatgtcggtctcctaggacctccgcgacttcccccgcgacagcgtcgggcattgccgccgcagctgccgcgccttccctcgcgacggcgccgagccgagcggagtgctccgtcgacctcaagctcggcaggacgacaccaccacgaaggagccggtggctgcaaccgcagcgccgtccgccagcccgatgggcggcgtcgggcattgccgccgcagctgccgagccttcccccgcgacggtgctgagccgggcggagtgctccgtcgacctcaagctcggcgggctaggcccaggagcagcccccggccccggggacctgcgacctgtacaagggccgctgggtgtacgacgagtcccgcgcgccgctgtacaaggagtccgactgcagcttcctcacggagcaggtcacctgtatgcgcaacggccgacgcgacgacgactaccagaagtggcgctggcagcccgacggctgcgatctccccaggtaccaccgccttgcttcctcgcttgcctgccactgattctacagaaacggtgcctatacgtatacgtgtacggtttacgcggcccggcgcgcgtcgtagggtaggtgcgcgttttcgtttgcgggctggatactgtgaattctagcaaaattaccttaattattagctgagcacacctctgtacaccataattatccgagactgagttgaatctgtatgtagaacctgctatgggatggcacttcttgtgactatgttagcagtagattcgtgtttgactgtagtagtaaaataaattgttgatcccaatggattgttctacaacctgtatctattttatgagtcggatccaatgccatctgccgccatgtcaaagcgaggtaagcagcctcttttaccaactggattcggccatttctcgtcgctcgatctggctataaatctcgcctgctcgtgcatgtgacatagttcggctgcttcaaggtgctcggaaaggggatgctgttgtccaaccccatcattgttagggccaagctcatctccaagatcatcgagaagaggatcaatgttactggaggcactgtcttgctgaccgccacataggtctttatgcatcttgttttatctatctgtgataagaaagctttccatttctttttgtggatcatgcgttgtgagataatattctctggtacgtctaattgtgggcatgtattgtccttttctggtgtatggttggaaacgacaaaatcaattgatttcagtctttatcactaatctgagatgcagatgctgtcgacggatatgcatagaagagaacatatatgcataaaagggagtaaaactaagatttgggtaaaaatcctctcccgtattgtattccaatttatacgtgtatatttatggtaattgttttagtatattttagtatctgttttttcttatacttaaataattgaattgtatgatgatagatattttcatccggacacagagtaaagaattctccactctcttgacttgacgaggctatataaccagaggccatcagaggagaactgaagactgagagcattctctgcttataatctttattcctctatattctaaattatttttttcaatccccttccacctggattcgattcgaatcccacaccaccacgtggtgttcttcctatatcgaataaacgttgtttcgcttgtctaatgatcgatagggcactgaaagagtcattcctagagactctacggaaggacacaacggagatggagcagcctgcttgagaagaggcggcggaggagaaggaagcgctcaacctagactcgtggtcgtcgaccagcatgcgccttgacgtcctcttttttgattcatttatttgattttttgaacaaaattgcccttgtctttgtccttcctcccttttttcattttcttaatgccctcatgtaaaatataaggcatgtgttgttcaaatctttcttttaaaactacatgtatttcgtgtgttctatgatgatatatacagaaactggtcttcttgatatgttgatagtggtctgtttgctcttgaaccatggccattcagtgtaatccgtgaatgtcatatattatactccctctattttgaaatatagaacattgaggacatgctacaactaattagcctttttattttgaatcaagttttctctttctgccaaatcttgctattaagcaatagtgcatgcatattttttttctaaatcagaccattttctataggacaaaggagggcatatggaaggacataaaggaaggagggatactggatggtaatgatggggcttctgagatactgtc

SEQ ID NO: 96343 - DNA, 1486 bp, Zea Mays
aaatatataagagattagtgtagcacggttctgccagtgccatccgcgccctcagccgaggatctccattctcctccccacgcagaatccaccgcgaggtctccgccgccctaaccgcgcccttccatccatggttgcagtggtgtcgtgctccccagatctaccacgggcgcgtgcccggatctggcccgacgaacagcggtggagctcgcgcggtgttccattcatggattgggatctcaagatgtcggtctcctaggacctccgcgacttcccccgcgacagcgtcgggcattgccgccgcagctgccgcgccttccctcgcgacggcgccgagccgagcggagtgctccgtcgacctcaagctcggcaggacgacaccaccacgaaggagccggtggctgcaaccgcagcgccgtccgccagcccgatgggcggcgtcgggcattgccgccgcagctgccgagccttcccccgcgacggtgctgagccgggcggagtgctccgtcgacctcaagctcggcgggctaggcccaggagcagcccccggccccggggacctgcgacctgtacaagggccgctgggtgtacgacgagtcccgcgcgccgctgtacaaggagtccgactgcagcttcctcacggagcaggtcacctgtatgcgcaacggccgacgcgacgacgactaccagaagtggcgctggcagcccgacggctgcgatctccccagttcggctgcttcaaggtgctcggaaaggggatgctgttgtccaaccccatcattgttagggccaagctcatctccaagatcatcgagaagaggatcaatgttactggaggcactgtcttgctgaccgccacatagggcactgaaagagtcattcctagagactctacggaaggacacaacggagatggagcagcctgcttgagaagaggcggcggaggagaaggaagcgctcaacctagactcgtggtcgtcgaccagcatgcgccttgacgtcctcttttttgattcatttatttgattttttgaacaaaattgcccttgtctttgtccttcctcccttttttcattttcttaatgccctcatgtaaaatataaggcatgtgttgttcaaatctttcttttaaaactacatgtatttcgtgtgttctatgatgatatatacagaaactggtcttcttgatatgttgatagtggtctgtttgctcttgaaccatggccattcagtgtaatccgtgaatgtcatatattatactccctctattttgaaatatagaacattgaggacatgctacaactaattagcctttttattttgaatcaagttttctctttctgccaaatcttgctattaagcaatagtgcatgcatattttttttctaaatcagaccattttctataggacaaaggagggcatatggaaggacataaaggaaggagggatactggatggtaatgatggggcttctgagatactgtc

SEQ ID NO: 96344 - DNA, 1847 bp, Zea Mays
aaatatataagagattagtgtagcacggttctgccagtgccatccgcgccctcagccgaggatctccattctcctccccacgcagaatccaccgcgaggtctccgccgccctaaccgcgcccttccatccatggttgcagtggtgtcgtgctccccagatctaccacgggcgcgtgcccggatctggcccgacgaacagcggtggagctcgcgcggtgttccattcatggattgggatctcaagatgtcggtctcctaggacctccgcgacttcccccgcgacagcgtcgggcattgccgccgcagctgccgcgccttccctcgcgacggcgccgagccgagcggagtgctccgtcgacctcaagctcggcaggacgacaccaccacgaaggagccggtggctgcaaccgcagcgccgtccgccagcccgatgggcggcgtcgggcattgccgccgcagctgccgagccttcccccgcgacggtgctgagccgggcggagtgctccgtcgacctcaagctcggcgggctaggtatgtttgctctcaggtacccgagaatcagaggctccttgtatgacggcgacggcggcgcgcaggcccaggagcagcccccggccccggggacctgcgacctgtacaagggccgctgggtgtacgacgagtcccgcgcgccgctgtacaaggagtccgactgcagcttcctcacggagcaggtcacctgtatgcgcaacggccgacgcgacgacgactaccagaagtggcgctggcagcccgacggctgcgatctccccagatgctgtcgacggatatgcatagaagagaacatatatgcataaaagggagtaaaactaagatttgggtaaaaatcctctcccgtattgtattccaatttatacgtgtatatttatggtaattgttttagtatattttagtatctgttttttcttatacttaaataattgaattgtatgatgatagatattttcatccggacacagagtaaagaattctccactctcttgacttgacgaggctatataaccagaggccatcagaggagaactgaagactgagagcattctctgcttataatctttattcctctatattctaaattatttttttcaatccccttccacctggattcgattcgaatcccacaccaccacgtggtgttcttcctatatcgaataaacgttgtttcgcttgtctaatgatcgatagggcactgaaagagtcattcctagagactctacggaaggacacaacggagatggagcagcctgcttgagaagaggcggcggaggagaaggaagcgctcaacctagactcgtggtcgtcgaccagcatgcgccttgacgtcctcttttttgattcatttatttgattttttgaacaaaattgcccttgtctttgtccttcctcccttttttcattttcttaatgccctcatgtaaaatataaggcatgtgttgttcaaatctttcttttaaaactacatgtatttcgtgtgttctatgatgatatatacagaaactggtcttcttgatatgttgatagtggtctgtttgctcttgaaccatggccattcagtgtaatccgtgaatgtcatatattatactccctctattttgaaatatagaacattgaggacatgctacaactaattagcctttttattttgaatcaagttttctctttctgccaaatcttgctattaagcaatagtgcatgcatattttttttctaaatcagaccattttctataggacaaaggagggcatatggaaggacataaaggaaggagggatactggatggtaatgatggggcttctgagatactgtc

SEQ ID NO: 96345 - DNA, 2300 bp, Zea Mays
aaatatataagagattagtgtagcacggttctgccagtgccatccgcgccctcagccgaggatctccattctcctccccacgcagaatccaccgcgaggtctccgccgccctaaccgcgcccttccatccatggttctgcagccgcgccgaaatcctcctgtcccaaaatctcgtcggcctggccacgatgagtgcgccttctctgaccctgggcttttgacccctcgccaggttgcagtggtgtcgtgctccccagatctaccacgggcgcgtgcccggatctggcccgacgaacagcggtggagctcgcgcggtgttccattcatggattgggatctcaagatgtcggtctcctaggacctccgcgacttcccccgcgacagcgtcgggcattgccgccgcagctgccgcgccttccctcgcgacggcgccgagccgagcggagtgctccgtcgacctcaagctcggcaggacgacaccaccacgaaggagccggtggctgcaaccgcagcgccgtccgccagcccgatgggcggcgtcgggcattgccgccgcagctgccgagccttcccccgcgacggtgctgagccgggcggagtgctccgtcgacctcaagctcggcgggctaggtatgtttgctctcaggtacccgagaatcagaggctccttgtatgacggcgacggcggcgcgcaggcccaggagcagcccccggccccggggacctgcgacctgtacaagggccgctgggtgtacgacgagtcccgcgcgccgctgtacaaggagtccgactgcagcttcctcacggagcaggtcacctgtatgcgcaacggccgacgcgacgacgactaccagaagtggcgctggcagcccgacggctgcgatctccccaggtaccaccgccttgcttcctcgcttgcctgccactgattctacagaaacggtgcctatacgtatacgtgtacggtttacgcggcccggcgcgcgtcgtagggtaggtgcgcgttttcgtttgcgggctggatactgtgaattctagcaaaattaccttaattattagctgagcacacctctgtacaccataattatccgagactgagttgaatctgtatgtagaacctgctatgggatggcacttcttgtgactatgttagcagtagattcgtgtttgactgtagtagtaaaataaattgttgatcccaatggattgttctacaacctgtatctattttatgagtcggatccaatgccatctgccgccatgtcaaagcgaggtaagcagcctcttttaccaactggattcggccatttctcgtcgctcgatctggctataaatctcgcctgctcgtgcatgtgacatagttcggctgcttcaaggtgctcggaaaggggatgctgttgtccaaccccatcattgttagggccaagctcatctccaagatcatcgagaagaggatcaatgttactggaggcactgtcttgctgaccgccacataggtctttatgcatcttgttttatctatctgtgataagaaagctttccatttctttttgtggatcatgcgttgtgagataatattctctggtacgtctaattgtgggcatgtattgtccttttctggtgtatggttggaaacgacaaaatcaattgatttcagtctttatcactaatctgagatgcagatgctgtcgacggatatgcatagaagagaacatatatgcataaaagggagtaaaactaagatttggagtaaagaattctccactctcttgacttgacgaggctatataaccagaggccatcagaggagaactgaagactgagagcattctctgcttataatctttattcctctatattctaaattatttttttcaatccccttccacctggattcgattcgaatcccacaccaccacgtggtgttcttcctatatcgaataaacgttgtttcgcttgtctaatgatcgatagggcactgaaagagtcattcctagagactctacggaaggacacaacggagatggagcagcctgcttgagaagaggcggcggaggagaaggaagcgctcaacctagactcgtggtcgtcgaccagcatgcgccttgacgtcctcttttttgattcatttatttgattttttgaacaaaattgcccttgtctttgtccttcctcccttttttcattttcttaatgccctcatgtaaaatataaggcatgtgttgttcaaatctttcttttaaaactacatgtatttcgtgtgttctatgatgatatatacagaaactggtcttcttgat

SEQ ID NO: 96346 - DNA, 912 bp, Zea Mays
aaatatataagagattagtgtagcacggttctgccagtgccatccgcgccctcagccgaggatctccattctcctccccacgcagaatccaccgcgaggtctccgccgccctaaccgcgcccttccatccatggttgcagtggtgtcgtgctccccagatctaccacgggcgcgtgcccggatctggcccgacgaacagcggtggagctcgcgcggtgttccattcatggattgggatctcaagatgtcggtctcctaggacctccgcgacttcccccgcgacagcgtcgggcattgccgccgcagctgccgcgccttccctcgcgacggcgccgagccgagcggagtgctccgtcgacctcaagctcggcaggacgacaccaccacgaaggagccggtggctgcaaccgcagcgccgtccgccagcccgatgggcggcgtcgggcattgccgccgcagctgccgagccttcccccgcgacggtgctgagccgggcggagtgctccgtcgacctcaagctcggcgggctaggcccaggagcagcccccggccccggggacctgcgacctgtacaagggccgctgggtgtacgacgagtcccgcgcgccgctgtacaaggagtccgactgcagcttcctcacggagcaggtcacctgtatgcgcaacggccgacgcgacgacgactaccagaagtggcgctggcagcccgacggctgcgatctccccagttcggctgcttcaaggtgctcggaaaggggatgctgttgtccaaccccatcattgttagggccaagctcatctccaagatcatcgagaagaggatcaatgttactggaggcactgtcttgctgaccgccacatagatgctgtcgacggatatgcatagaagagaacatatatgcataaaaggga

SEQ ID NO: 96347 - DNA, 715 bp, Zea Mays
gcctcttgttttgtactcaatcgtcgtcgtgtacgccaaagataggaagagcagagcgcaaggatgccggctagcctggtgacgtcgtcgctcctcccgccgtgccgcgcggccgcgacgtcggcgcgcgcgttgcgttcgttcgcccgccggccgccgccttcgtccgccggtctcgtccgcgtgcgctgccacgctgccactccgccgccgccggaggtcccgggccagacgacgccgcccgaggtgcctggcacggaccgccagccgctcgaggtgccggggacgaaccgcccgccggacgaggtgccgagcatcgacacgccgccagagttcaacgcgccgccgggcgtcgacgtgccgatgccggggcagccagcgcccggaccggagctcccgggtccggcgatgccgtcgccgccggcgccggaggtccctgtcgtgccgcccaaccccgacgtaccgccgccacagctcccggaggtggacccgcccagtccgccgcccgaggtcgtcccgccggagccgccaggcaccgcgacggcgccgcctccctttgtgtagctccgtggctccgccgccgtcgatggcgcgggccggtggcaggtggacagggcgggcggcatgcgaatgaaccacgtaggagtgtacaaagtagttagaaggcatgttgttcacgggtcacggctgggcaagtttgctattggtttaaaaa

SEQ ID NO: 96348 - DNA, 1989 bp, Zea Mays
aaatataatagttaagttagctctgaccaattgagaatctatcttggttttgccaatccaactaattaatatctgcaggatggcgacattggatgaactcatgaggcaactaattaggttccatcaggtcataagttaagttaaactaattttaaggtagcagcattttaaaaataaaaaaaaagaaaaataaaagtaaggaggagccaagaactgaacgtaaagaacacctctgcgcatgaaacagttgcaaggccccgctctggatcgattcttaaccgcctgattaatctatctcttcgttagtctccgactccgaggtctccagatatctttctaatttattttttcctccacatgtaatttgcctttgctattcttagagtccgatggtggtaaattttctgagctcctgtttttccttgttcctctgacctgaactgctgtcccagccaggctttcacctcgcggcttaatcccaattgggttggctggagcgcaacccaattgggggttaattgggattgctacttcgcgggtgctcgtccgtcgtggtcttggattggcgaggcgaatcgactggtttcctgcagcctccttggtaggatcatgaagctgaaaaatagtgcactggagacttttaaggagaacaatacgattttcactcctgaaggaaatttccactctacaaagatgcgagaagagtatgttgctggtccgaaccaaccagccgttgttgagacaagatgcaaatggatgattggagatgtaactgaggtcctggatcgcaacacgtggaagcttggaaagatcttaaagatgctgaagaacgattacttcgttatcaggcttgctgattgcatccgactgaaggagttccacatatctagcttgagaattccacgcggtctggaagctcctgaaagcaagccctttcatgcagcagcggacaaggccaccggacgcgataaacgccgaccagctgatggcgcctcgcccggcacaagagctgtgcagcagacgtgtcaccgaacaacctacgatctagggagcagtggcaagaagcggaaaccagacgcagatgcctctcgccatccgggcatagcatcagcacacatccggaaggtcgccgcagcctccaacctgaacggcggcatcgccgacagctacctgcacaacgatccgcaggccataggagacgcccaatgctcggtggccagctgcagcgtcaacgacctgtaccgcctcggcaatggcggcaacgcagagcggcgccccgccgccgcagtgtgcctccctgacgacgccatgtccgcgtgcccgtgcacgcccggtgccagggacggggagggggaggaggaggccgcggcggccttgcacgggctgcagctggaggcttaccggtcgacgatgcgagcgctgtacgcgtcggggccgctgacgtgggcgcaggaggcgctgctgacgaacctgcgcctgtcactcaacatctccaacgaggagcatctgctccagctcaagcgcctactgtcctcctgatcggccatccttctggccggccgagcgccgtcctgttccggcgagcctcttcctttttactgttcttgttatacatggtttattacattgtctagttcaggtagaaagaatcctatgtttataccagtgtcgagacatggatgcatacacagagacgcttgcatctttttgatgccttcggtatcctggatatatctcttgcttgtaaatgcaaacatatttacaagtttttctttgaggggccgtatttacaagttttttacactcagtttattttttttttcttatgaaaaatctaaatgactagctcactagctgagtagtttgaaggctttggtcactctattttttttgctatgctgctgcgctgtgctgttcatgacatcacttttggtcacttgcttttaatttatgagagaaatcaagaacaacacaacacaaataaattaa

SEQ ID NO: 96349 - DNA, 1857 bp, Zea Mays
aaatataatagttaagttagctctgaccaattgagaatctatcttggttttgccaatccaactaattaatatctgcaggatggcgacattggatgaactcatgaggcaactaattaggttccatcaggtcataagttaagttaaactaattttaaggtagcagcattttaaaaataaaaaaaaagaaaaataaaagtaaggaggagccaagaactgaacgtaaagaacacctctgcgcatgaaacagttgcaaggccccgctctggatcgattcttaaccgcctgattaatctatctcttcgttagtctccgactccgagccaggctttcacctcgcggcttaatcccaattgggttggctggagcgcaacccaattgggggttaattgggattgctacttcgcgggtgctcgtccgtcgtggtcttggattggcgaggcgaatcgactggtttcctgcagcctccttggtaggatcatgaagctgaaaaatagtgcactggagacttttaaggagaacaatacgattttcactcctgaaggaaatttccactctacaaagatgcgagaagagtatgttgctggtccgaaccaaccagccgttgttgagacaagatgcaaatggatgattggagatgtaactgaggtcctggatcgcaacacgtggaagcttggaaagatcttaaagatgctgaagaacgattacttcgttatcaggcttgctgattgcatccgactgaaggagttccacatatctagcttgagaattccacgcggtctggaagctcctgaaagcaagccctttcatgcagcagcggacaaggccaccggacgcgataaacgccgaccagctgatggcgcctcgcccggcacaagagctgtgcagcagacgtgtcaccgaacaacctacgatctagggagcagtggcaagaagcggaaaccagacgcagatgcctctcgccatccgggcatagcatcagcacacatccggaaggtcgccgcagcctccaacctgaacggcggcatcgccgacagctacctgcacaacgatccgcaggccataggagacgcccaatgctcggtggccagctgcagcgtcaacgacctgtaccgcctcggcaatggcggcaacgcagagcggcgccccgccgccgcagtgtgcctccctgacgacgccatgtccgcgtgcccgtgcacgcccggtgccagggacggggagggggaggaggaggccgcggcggccttgcacgggctgcagctggaggcttaccggtcgacgatgcgagcgctgtacgcgtcggggccgctgacgtgggcgcaggaggcgctgctgacgaacctgcgcctgtcactcaacatctccaacgaggagcatctgctccagctcaagcgcctactgtcctcctgatcggccatccttctggccggccgagcgccgtcctgttccggcgagcctcttcctttttactgttcttgttatacatggtttattacattgtctagttcaggtagaaagaatcctatgtttataccagtgtcgagacatggatgcatacacagagacgcttgcatctttttgatgccttcggtatcctggatatatctcttgcttgtaaatgcaaacatatttacaagtttttctttgaggggccgtatttacaagttttttacactcagtttattttttttttcttatgaaaaatctaaatgactagctcactagctgagtagtttgaaggctttggtcactctattttttttgctatgctgctgcgctgtgctgttcatgacatcacttttggtcacttgcttttaatttatgagagaaatcaagaacaacacaacacaaataaattaa

SEQ ID NO: 96350 - DNA, 1962 bp, Zea Mays
actcccttcccgcttccacctttgccgccccgcaggccgcatccgaagccaccgagccgctacccgtcgccgccgccgcgaaatggccgccggcgcgcgccccctggtctccgtgagggccctggagggcgacatggccacggactccgtcggtgtcccgcttccggacgtcctccgcgcgccgatccgcccagacatcgtccgcttcgtccacaagctcctgtcctgcaacagccggcagccgtacgcggtgtcgcgtcgcgctggccaccagacctccgcggagtcctggggcacggggcgtgcggtgtcccgtatcccccgcgttcctggcggtggtacccaccgcgccggccagggagccttcggcaacatgtgccgtggcggacgcatgtttgcgcccaccaagatctggcgccgctggcaccgccgcgtcaacattcacctccgccgtgtggccatcgcctccgccctcgctgccaccgccgtcccgtccctcgtcctcgcccgcggccaccgcgtggagtatgtccccgagcttccgctcgtcgtttccgactccgccgagtccattgagaagacagctcaggccatcaaggtcctcaagcagctcggtgcctccgctgatgctgataaggccaaggattccgttagcatccgccccggcaaggggaagatgcgcaaccgccgctacatcaaccgcaagggacccctcattgtctacggcgctgagggctctaagatcgtcaaggccttccgcaacctccctggcgttgatgttgccaatgtcgagcgcctgaacctgctcgacctcgcccctggtggccaccttggtcggttcgtcatctggaccgagtgcgcattcaagaagctggatgaggtgtacggtaccttcgacacgccatcggcgaagaagaagggtttcttgctcccgaggcccaagatggcaaacgctgatctgtcaaggctcatcaactctgacgaggtgcaatctgtggtgaagcccatcaacaaggaggtgaagcgtagggagcctaggaagaacccgctgaagaatatggctgcagtgctcaagctgaacccgtacctcggtactgcacgaaagatggcagccctagcagaggcagcgcgtgtcaaggccaggaagcagaagcttgactccaagaggaccaagctcagcccagaggagacttctaaggtcaaggctgctggaaaggcgtggtacaagaccatgatctcagacagcgactacacagagtttgagaacttcaccaagtggcttggtgtcacacagtgattgtctggtggtagtttgtcatgtcagaaattatgattttgtttgctattgccaactgtcgcttgtcattggtatcttcaggcatgatatctggttttggcttttgtagtttttttgaccgatgatctctttcttccagacacatattacacctattatgagaacgaagtatatgcaattttcagtactcctccgtgcttctgtttgtggttgtattggttacacgagtttgcttggtcagccatgtcatctcttggtcacaaggcatacctgattgcaatgtattacagcatgcattgttctgtgccctttggtttcttaggtactatatagtgtacatacatatgatgcttcggttcgttgtcaaatttggcctaacagcaatggtttctgctgaaggatggtggttccttgtcgcttgttccgtttctttgaagcatctttcttcacttctttctgtggttgtaattttgtgggaataaacacagttcaaatcttaagtttttcagaattgaagtttttgtttgattgtagtatatgcaatactgaaaccattgaattgcatgtctgaaagcttgtgtggttgtagattattcggtctatgaatcaacctgtaaaatcgcatataatagaaattgattggactctgcatagtttgtgacttt

SEQ ID NO: 96351 - DNA, 113 bp, Zea Mays
aagatctcggccgtccgattagaatcaacgccacagattttataacgcccagattgatttccgagcgcccgatcccgatcgaaaggcccgcaactatcggaagtcggatctaa

SEQ ID NO: 96352 - DNA, 102 bp, Zea Mays
gctgttttaagggagggtggagcaggtttttttagatcccacctttcttcacaaaaacgacttccgatctttcggctccacacgagaatcagtttaaaaaaa

SEQ ID NO: 96353 - DNA, 117 bp, Zea Mays
tggactcggtggtgtaccgactaccggctcatccttgttttctggattttattttctggatagggctattattttaatatgagcggtgggaccagcagaatacttagcggtgttggg

SEQ ID NO: 96354 - DNA, 1399 bp, Zea Mays
ctgcgacaataaggcagtgctcatatatctgcttctctttccgtggcaacaatataacaagcggcacgcacagttcgtctcctcaatacacaaattacaagcagcagcacataggacgtgatcacgcttgcgcctacaagcaggtatcgaaacgacgactgctgctacatattgcccggccgccgggcaggacggagggatcacaaagcccctcgagatgccagccaagaccaaaacttacaagcgtcaaaacaaaacaaaaaggaaaccataaggaagaaggcggcggcgagtgttttttctccttttccgaaaataaaacccggaaaacaccaaaacaccgaaaactagatccccaaacggatcgagaggcgcggcggaaaacaaaaaagaaacgaaaacgaagggagaattgcgagaagagcgggtactagctagctaggcagcagtagtactagtaggagcgttattctctgtccatcaccacgccacgctcagaggacggcggcgagccccgtgacgaccttcgccttgggcggcagctgcttcttgctcgcctcctccgtcgggcgccacggcgacaccaccaccgtgatcttctcgccgccgacggcgccgccctccgcggcggcgccggcgccggcgctgctacgcttcctgtcgaacacgagctcgaactcgccggaaaaactcgccgcctggacgggcgtcgccgcggcggcggcggcggccggcacggcgaccatgtcgcctccgacgccgccgcagcggacgtgcggggacagccacttggcgcgcatgtactccggcttccgccacggcgggaagtggagccccttcttcttgaggctctgccgcgccgcctccgccaccaccgccacgatctgcccgagccggtccggggtgcccacgaacagcggcggcagcgcctggagcgccgcgcggtacgccttggtcgaccgcgccagctcgaactgcgaccggaagtccacctccacgatcagcctcacctcctcctcctcctgctccttccccttccccaccacggcgtcgatgtactcgtgctcgcctgcgcacacggattccgcggtcagcaccgggcaccggccaggacacgctgtggaccgaaccaccgcgccaccacgtacctgctgggtgggagggggccttctcccaccgcgacgtgcacacggaggcgtcgtagcccagcgacctgaggccgtcggccaccgcgcgccggcactccgccttgcccttgcagcccttgccgcacttgtcggcgagcctagacgcgtccgccaggagattccgctccgcgacgctcgcgctctgcaccaggccctgtcaacacaccattcgtatcatttcgatccatgtgggtttggggttcgggtttgag

SEQ ID NO: 96355 - DNA, 1674 bp, Zea Mays
atgccgtggcttgatcaggaggtagcgtggctcatcaagatcatcgcaacctacggctacggctacggctacgagtcggaggtatctctatcctatctgcctatccgaatcccgagcacggcgaaacctgagccgagaaccgtcggagaacacgatcgcaagtatgcccagctgttcgtcggccatggcgccggccgctacaaactccagacgccaaggaccgagccaaatcaacaagcaaacctacctcttcgcaacaaaacgacgcaatatatctgcgacaataaggcagtgctcatatatctgcttctctttccgtggcaacaatataacaagcggcacgcacagttcgtctcctcaatacacaaattacaagcagcagcacataggacgtgatcacgcttgcgcctacaagcaggtatcgaaacgacgactgctgctacatattgcccggccgccgggcaggacggagggatcacaaagcccctcgagatgccagccaagaccaaaacttacaagcgtcaaaacaaaacaaaaaggaaaccataaggaagaaggcggcggcgagtgttttttctccttttccgaaaataaaacccggaaaacaccaaaacaccgaaaactagatccccaaacggatcgagaggcgcggcggaaaacaaaaaagaaacgaaaacgaagggagaattgcgagaagagcgggtactagctagctaggcagcagtagtactagtaggagcgttattctctgtccatcaccacgccacgctcagaggacggcggcgagccccgtgacgaccttcgccttgggcggcagctgcttcttgctcgcctcctccgtcgggcgccacggcgacaccaccaccgtgatcttctcgccgccgacggcgccgccctccgcggcggcgccggcgccggcgctgctacgcttcctgtcgaacacgagctcgaactcgccggaaaaactcgccgcctggacgggcgtcgccgcggcggcggcggcggccggcacggcgaccatgtcgcctccgacgccgccgcagcggacgtgcggggacagccacttggcgcgcatgtactccggcttccgccacggcgggaagtggagccccttcttcttgaggctctgccgcgccgcctccgccaccaccgccacgatctgcccgagccggtccggggtgcccacgaacagcggcggcagcgcctggagcgccgcgcggtacgccttggtcgaccgcgccagctcgaactgcgaccggaagtccacctccacgatcagcctcacctcctcctcctcctgctccttccccttccccaccacggcgtcgatgtactcgtgctcgcctgcgcacacggattccgcggtcagcaccgggcaccggccaggacacgctgtggaccgaaccaccgcgccaccacgtacctgctgggtgggagggggccttctcccaccgcgacgtgcacacggaggcgtcgtagcccagcgacctgaggccgtcggccaccgcgcgccggcactccgccttgcccttgcagcccttgccgcacttgtcggcgagcctagacgcgtccgccaggagattccgctccgcgacgctcgcgctctgcaccaggccctgtcaacacaccattcgtatcatttcgatccatgtgggtttggggttcgggtttgag

SEQ ID NO: 96356 - DNA, 1356 bp, Zea Mays
atggccgccaccggcgaccaactcgccgcggtgcgcgtacgcggccgagcctccgtccgcgtcaacccctcctttttctctcccaataccgcctcatccacctcatctccctcttcggcgcatccaatgttcggcgtcttctgtaagggacagcaaatgttgatcgccgacgagatggtaggccttgccgacggagaccccggaacgccggtgctagcggtggccgtgtgcgggccgcagggagatgttgtggtcggggggcacaaacccgcgtcaggatttgtgagcgggcacgacggcggcggcggcgatgtcggacaggtgctgctggaggcgatggcgctcgtggagggcctccgtaccgcgatcaggatgggcatcaccagcgtcaaggccttcaccgatcacaggctgctgtacaactgtatggttgggctttctcgtccagcaggtgacgagcagcttgcagatatgatcagccaggctctgtcagcacaaaagcaattcgagcgatgcgagatatcacttgctgagcaaggccaagtcggcaacgctgtgaagctagcaaaggaggtggaactggaggcggagatcggcaggtacctctccacaacaaaggagagaacggagacatgcaggatctgcctggaggacgtggacagcaggaagatgcacgcggtggaaggctgcgcgcaccgcttttgcctcgtctgcatgaagacgcacatgaaaatgaggctactcggcgggctggccccgcgctgcccgcagcctggttgcgcgaccaagctcggcgcggagggcgcagcagcgttgctgtcgccacggcttgtggggatgatggcgcagcggcggctgaaggaggaggaggaggaggagcagatgagtatccacccgagcctgagggtgtactgcccgtacccgaggtgctcggcgctgatgcccctgagcgaggtgctgcgagggtcgctgagcccagagtaccctgcgacgttcagggagtgcgcggagtgcggagggcccatgtgcgtggagtgcaaggtgccgtggcacgggccgttgagctgccccgagtaccggaggcggtacccccacggtggcggccctgaggacgtggcgctccagaagcttgcgaggcagcggctgtggcagcggtgcgagagctgccaccacatgattgagctcgccgtgggttgcgcccacattatctgcgtgtgcggtagtcatctgtgctacagatgtgggaaggcactagcggatgatggaaggtgcggctgcagcggattggcagatggcaggagaccatggtatttccggctgccagcatgctggggaggcagaggcacgcgtcgttag

SEQ ID NO: 96357 - DNA, 735 bp, Zea Mays
gccacaacacctcatcatcgcgtggcatgcacggccgggacggcgcatgcttccaccagtcaacgcacgggcaatgcgcgctacagacgcaacgagacattcgcgccatccaacgcgaaattcggttcgacgtcccccgccaaaagcaacgaggcagcgggaatggcgccacagcaccgaccagccatacggatacgcggagcagagccgaggtacacttacgcgcgctcgagctcgtcgggatcaggatcccccgcggcggctccggcggcagccgcgaccgcgagcaggaccagcgccgccgcgcggatccccgaggcccaccgcccgcgccccatcccctgcaccgcccacgaacaaccaggtctcctcggcccagatctctgcttcgggagcggaggagacgccgtaagcgcccccaatgcggcgagcggcaatggccggcgcgggcgccgccgactgggcaccgggcggcgcggcgcggcgcgggatctggggctagggttttggcgcgcaggcggattccggagttgcttcggcgcgagggaatgaacgggaagagctggagccgcggggcgacgaggtcggaactcggaaggggagaggaaaaaaattcgggggagcacggggcagcgagggtgatgcgtgcgtgccgcgagaagcccgcttccgtattttaagcgggcaattgtttagcgctttattatagcgtctactactattaataacgttgct

SEQ ID NO: 96358 - DNA, 1423 bp, Zea Mays
cccttccattttttctcttctcttccaccaaaccaagtgcggccagagaaatttctcccaaatttcagatcaaatcctcgaaatctccgacacctagccccccggagacttctcctcaacagtgtcgcgatccgtctcgatccggcatggagcgcgtcttctccgtggaggagatccccaacccctactgggttccgccgcaccctcaatcggcggctgcctcgagctcggttgttgaccccgtggagtacaacgcgatgctcaagcagaagctggagaaggacctcgctgccgttgccttgtggagggcttctggtgcagcacctccagatcattctccagctggttcttccttgccaagtgtggatgttccacacgcaggccctcttaaacccatcggaggtactggaagtctagttcaaaacaagctagttggtgctccaggcgggggatcaagtccacatgtagtacaaaatgccgatatccctgttaagcaaaccactagctcttcctcacgtgagcagtcagacgatgatgacatggaaggagatgctgagactactggaaatggaaaccctgttcaacacagattacagagaaggaagcaatccaaccgagaatcagccaggcgttcgagaagcagaaaggcagctcacttgaatgaactggaggcacaggtatcacagttaagagttgagaactcttcgctcctaaggcgacttgctgacgttaatcagaagttcaatgaggctgctgttgacaatagggtgcttaaggcagatgttgaaaccttaagagcaaaggtgaagatggcagaggactcagtgaagcgggtaactggcatgaacacattgttccctgccgtgtctgatatgtcgtccctcagcatgccattcaatggctccccatctgactccgcctctgatgccgccgtacccatccaagatgacctgaacagttacttcgccaatccaagcgagatcggaggcagcaacggttacatgccagatatagcttcctcggttcaagaggacgacgatttcgtcaacggggctcaggtcgccggcaagatgggcagcactgactcgctgcagcgggtggcgagcctggagcacctccagaagaggatgtgcggaggcccggcttcatcggggtcgacctcctaggttcctactccatcggatatgataaaggccctgatgcccacggcaagaatatgataaattaacagtttcacatactttgtagtggacattgctaatgctgcgatgcgcattcgttcgttgtggacttacgggtctactgctattgatttattgttcgttcttcatgtggatctcgtgtgtccatttgacgtgtactacgccacctgatgtctgctacacattgctgtggacagagcaagttcggtttccatcgaaga

SEQ ID NO: 96359 - DNA, 1642 bp, Zea Mays
atcttctcttcttcctctcttcccttccattttttctcttctcttccaccaaaccaagtgcggccagagaaatttctcccaaatttcagatcaaatcctcgaaatctccgacacctagccccccggagacttctcctcaacagtgtcgcgatccgtctcgatccggcatggagcgcgtcttctccgtggaggagatccccaacccctactgggttccgccgcaccctcaatcggcggccgccggcgctgttgctgcaccagcgggggaggcggcggggctgatgaaccggtgcccgtcggaatggtacttccagaagttcctggaggaggccgtgctcgacagcccggttcccgtagccggcgccagtaggggcagcgttggagctggagttgaggctgcggagagcaagacaccgggggccgcggcgccggcggctgcctcgagctcggttgttgaccccgtggagtacaacgcgatgctcaagcagaagctggagaaggacctcgctgccgttgccttgtggagggcttctggtgcagcacctccagatcattctccagctggttcttccttgccaagtgtggatgttccacacgcaggccctcttaaacccatcggaggtactggaagtctagttcaaaacaagctagttggtgctccaggcgggggatcaagtccacatgtagtacaaaatgccgatatccctgttaagcaaaccactagctcttcctcacgtgagcagtcagacgatgatgacatggaaggagatgctgagactactggaaatggaaaccctgttcaacacagattacagagaaggaagcaatccaaccgagaatcagccaggcgttcgagaagcagaaaggcagctcacttgaatgaactggaggcacaggtatcacagttaagagttgagaactcttcgctcctaaggcgacttgctgacgttaatcagaagttcaatgaggctgctgttgacaatagggtgcttaaggcagatgttgaaaccttaagagcaaaggtgaagatggcagaggactcagtgaagcgggtaactggcatgaacacattgttccctgccgtgtctgatatgtcgtccctcagcatgccattcaatggctccccatctgactccgcctctgatgccgccgtacccatccaagatgacctgaacagttacttcgccaatccaagcgagatcggaggcagcaacggttacatgccagatatagcttcctcggttcaagaggacgacgatttcgtcaacggggctcaggtcgccggcaagatgggcagcactgactcgctgcagcgggtggcgagcctggagcacctccagaagaggatgtgcggaggcccggcttcatcggggtcgacctcctaggttcctactccatcggatatgataaaggccctgatgcccacggcaagaatatgataaattaacagtttcacatactttgtagtggacattgctaatgctgcgatgcgcattcgttcgttgtggacttacgggtctactgctattgatttattgttcgttcttcatgtggatctcgtgtgtccatttgacgtgtactacgccacctgatgtctgctacacattgctgtggacagagcaagttcggtttccatcgaaga

SEQ ID NO: 96360 - DNA, 722 bp, Zea Mays
atcttctcttcttcctctcttcccttccattttttctcttctcttccaccaaaccaagtgcggccagagaaatttctcccaaatttcagatcaaatcctcgaaatctccgacacctagccccccggagacttctcctcaacagtgtcgcgatccgtctcgatccggcatggagcgcgtcttctccgtggaggagatccccaacccctactgggttccgccgcaccctcaatcggcggccgccggcgctgttgctgcaccagcgggggaggcggcggggctgatgaaccggtgcccgtcggaatggtacttccagaagttcctggaggaggccgtgctcgacagcccggttcccgtagccggcgccagtaggggcagcgttggagctggagttgaggctgcggagagcaagacaccgggggccgcggcgccggcggctgcctcgagctcggttgttgaccccgtggagtacaacgcgatgctcaagcagaagctggagaaggacctcgctgccgttgccttgtggagggcttctggtgcagcacctccagatcattctccagctggttcttccttgccaagtgtggatgttccacacgcaggccctcttaaacccatcggaggtaatcatccacagcatcatttgctgcatttcaaactggttttgaagcttggctcagatgatcttatgtttcagtgctcaatactcatgcaatagatatta

SEQ ID NO: 96361 - DNA, 2082 bp, Zea Mays
cttgaatttaaattttgtcaggtttgagcctcagttactgcccacagtcgccacagatagacctccagtaccagtcacacacgcgaacgcgacactcgcaaagtcgcaagcgggtcgcaatcaaggctgctcccctctatctccgtgttcgcccctcggttcaccacccgccgccgccgagacctcctcctcgccggctactcctgaccccataaaggcagcgctcggaggtggccctctgtcgggtggagtggtggacacatccgcgcccatggccaaccgcggcgctgcggccggcaagctcaccgtcgccgagacattctccaacctcagggagcaaggcaagagtgcattcatcccgttcatcactgctggtgatcctgacctggcaaccacatcaaaagcattgaagattctcaattcctgcggttcggatgttatagaggttggcgtaccatactcggatccactggctgatggaccagttattcaggcttctgcaacacgggcgcttaagaaaggcactacactcgattctgtcatagaaatgctgaagggggttacacctgagctttcttgccccattgttcttttcacatactataatccaattctgaaacgtggtgtgggaaacttcatgtcttttatcaaacaagctggcatacatggacttgtagtgcctgatcttcccttggaggagacagcgttgctgaggagcgaggccattatgcacaacatagagctggtgctgcttacaacgccaaccacgccaacagatcggatgaagggaattgcacaagcttcagaaggatttctctatcttgtgagcgctgtaggggttacaggtgcacgctcaaatgtaaacttacgtgtagaacaccttcttagggagatcaagaaggttagtaaactataacctgtttgtcgtcagtaaagagtgaacgagttttaatgcaccagcatggctagagaaatttgcgttcaagaatggttatgagaaaattcctggtatgccatcagattttatactcatcccttgtgtgccactgagtgacatataggtatattttttggtgtctatgacatgtggggccagtggcatacaaatggttatcttcctggctttacaggttacagacaaaccggtagctgttggtttcggtgtatcgactccagagcatgtgaaacagatcgtgggctggggagcggacggtgtgattgttggcagtgcgattgtgaggcagttgtgtgaggctgctactcctgaagagggtctggaaaggctcgaggagtacgccaggagtatgaaggctgctatgccgtgagctgatctcactccccgtcacaggcaaggtaaatagaacatggttttagcaatattctgggcatgggtttggcatccagaactcatcttagtgctgtacgggtcgttctcgggtggtgagaacgaagtctggctttgcctataatagaaaagggttaaactgagttagtgcgacattttgatggaaaagcgagtgattgcgagatatcagttcatgcttattggcagatcctttttttttttttttgctgaaagatggaaatgttagggatgaggttgccctggcctcttgagaggataggaataagagaggataagttcgttatgatttatatggctttccgcttgaaccccaccagctggtgtccatggggatgcgggcagagcagtgtctgattggctgcactgaaaatgacattaccttcagacaattcgccttgctctcttctggttctggagtactactttcgaggtccgtcagactgggtcacaagatgatcccaaacggccccagatgctgggtttttggacaacggaaagtcgattctgacctctgttaatgtcggccactcatgggtcatgaccaagccatgtttatggtcaaatcagtcccggatgctaacacgcttctctaatctctatctacggggactttttccggtgcttatcgtatcattatcatgcatgttactggtagttacatgttgtctgaacagattctttagctctgccatggcagcatgaagtgtatctggatg

SEQ ID NO: 96362 - DNA, 1378 bp, Zea Mays
cttgaatttaaattttgtcaggtttgagcctcagttactgcccacagtcgccacagatagacctccagtaccagtcacacacgcgaacgcgacactcgcaaagtcgcaagcgggtcgcaatcaaggctgctcccctctatctccgtgttcgcccctcggttcaccacccgccgccgccgagacctcctcctcgccggctactcctgaccccataaaggcagcgctcggaggtggccctctgtcgggtggagtggtggacacatccgcgcccatggccaaccgcggcgctgcggccggcaagctcaccgtcgccgagacattctccaacctcagggagcaaggcaagagtgcattcatcccgttcatcactgctggtgatcctgacctggcaaccacatcaaaagcattgaagattctcaattcctgcggttcggatgttatagaggttggcgtaccatactcggatccactggctgatggaccagttattcaggcttctgcaacacgggcgcttaagaaaggcactacactcgattctgtcatagaaatgctgaagggggttacacctgagctttcttgccccattgttcttttcacatactataatccaattctgaaacgtggtgtgggaaacttcatgtcttttatcaaacaagctggcatacatggacttgtagtgcctgatcttcccttggaggagacagcgttgctgaggagcgaggccattatgcacaacatagagctggtgctgcttacaacgccaaccacgccaacagatcggatgaagggaattgcacaagcttcagaaggatttctctatcttgtgagcgctgtaggggttacaggtgcacgctcaaatgtaaacttacgtgtagaacaccttcttagggagatcaagaaggttacagacaaaccggtagctgttggtttcggtgtatcgactccagagcatgtgaaacaggtggaccaggctttctcctaactttcttgttatgcatgaggtctgtctaatggtatccgtgttacacccttttgataccttgattggtaagcagatcgtgggctggggagcggacggtgtgattgttggcagtgcgattgtgaggcagttgtgtgaggctgctactcctgaagagggtctggaaaggctcgaggagtacgccaggagtatgaaggctgctatgccgtgagctgatctcactccccgtcacaggcaaggtaaatagaacatggttttagcaatattctgggcatgggtttggcatccagaactcatcttagtgctgtacgggtcgttctcgggtggtgagaacgaagtctggctttgcctataatagaaaagggttaaactgagttagtgcgacattttgatggaaaa

SEQ ID NO: 96363 - DNA, 917 bp, Zea Mays
cttgaatttaaattttgtcaggtttgagcctcagttactgcccacagtcgccacagatagacctccagtaccagtcacacacgcgaacgcgacactcgcaaagtcgcaagcgggtcgcaatcaaggctgctcccctctatctccgtgttcgcccctcggttcaccacccgccgccgccgagacctcctcctcgccggctactcctgaccccataaaggcagcgctcggaggtggccctctgtcgggtggagtggtggacacatccgcgcccatggccaaccgcggcgctgcggccggcaagctcaccgtcgccgagacattctccaacctcagggagcaaggcaagagtgcattcatcccgttcatcactgctggtgatcctgacctggcaaccacatcaaaagcattgaagattctcaattcctgcggttcggatgttatagaggttggcgtaccatactcggatccactggctgatggaccagttattcaggcttctgcaacacgggcgcttaagaaaggcactacactcgattctgtcatagaaatgctgaagggggttacacctgagctttcttgccccattgttcttttcacatactataatccaattctgaaacgtggtgtgggaaacttcatgtcttttatcaaacaagctggcatacatggacttgtagtgcctgatcttcccttggaggagacagcgttgctgaggagcgaggccattatgcacaacatagagctggttcatacccactctcatctttgcatgcaccacttgcacaaagtttgttgcgtacttgtgttgctatctgggtgctaactaaattcttactcgagatgggacctatcaaatcttcagattgggctctgcccattccagacctgcaaatatacacagttgcaaaagatcttct

SEQ ID NO: 96364 - DNA, 106 bp, Zea Mays
acaccttcttcaccctgctatctcggatcaccggatcgacgaggagcgggtatttgcctgggtggtcgaagttgagccattgatccgcccgagtgaaggtgatcgg

SEQ ID NO: 96365 - DNA, 104 bp, Zea Mays
accgcattcagccgttcttcttcgagtacatcaatgtcctccagcctagtagcttcggcttctgctatgctttcgaagaccaaccttggcgccccgaacttgag

SEQ ID NO: 96366 - DNA, 104 bp, Zea Mays
atgatgtgatccgtctcaggcaattgatatcggctaaggatgctactatcaaagaacttcgtgcttccaagaaatccatcgctcaggagctagaaaccgctcaa

SEQ ID NO: 96367 - DNA, 1532 bp, Zea Mays
tctcatatcctactgccggcgttccagagttcgagctgagcagttgcacacagctgctcgtgaagctagctagcgaagccacaggcccacagtgactttgctcccccacaccgtagcggccgtataaaccagctccaaccgatccatcgaaatcgaagcacagtacgtgagcccgtactagagacatatggcctccgcgatcaaggctgcatcgacctcctcccagtggtcttcttccccggcggcagtccactcgtcgccgttatcgaagcggctaccagctgcagtggccatgccggggcggcggaggtctgtggccactgtaagggcggtcgccgcggtagctccggctgccccggcggcgccggccaagctcaccgccggtgccggcggccgatgcctgccggtgtcgcagaccatgtccaggctcagggcgcagggcaagacggcgttcatcccgtacatcaccgccggcgacccggacctggcgacgacggcggaggcgctgcggctcctggacgcctgcggcgccgacgtcatcgagctcggcgttcccttctcggacccctacgccgacgggccggtcatccaggcgtcggcggcgcgggcactggcgagcggcacgacgccggacggcgtgctggcgatgctgaaggaggtgacgccggagctgtcctgccccgtggtgctcttctcctacttcaaccccatcgtgcggtggggcctggccgacttcgccgccgccgtcaaggaagccggcgtgcacggcctcatagttcccgacctcccgtatgggaactcgtgcgctctcactctcaggaccgaagccatcaagaacaacctcgagctggtgctgctcacaacaccatctacgccagcggacaggatggaggagataacacgagcttcacgaggattcgtctatctcgcgagcgtcaatggagttacaggtccacgcgcaaacgtgaacacacgtgtccagtctctcattcaggaggttaaacaggtcactgacatacccgtggctgtcgggtttggcatatcgaaacctgagcatgtaaagcagattgcagagtggggtgcagatggtgtgatcattggtagcgcaatggtgagacagttaggcgaagcagcctctcccaaagaaggattgaagaggctagagaaatacgccaggatcatgaagaacgcgctaccatgccagtgaactagtcgtattgacgcgatataggctgtgttagcaagcacgttggagaacaatgttgcagaagtagcacaattaataatgatccattcggcaaggttgcttttttacaaattgcaacaatatgttatcaatataaaatcaacgattcctttgtttaaaaaaaggaagaaatgttacatcattgcatgatgcttcgattcagtggtcactccattcattctaaattacagttcagttcgagtttgtcctggctcagcccttttaaagattgtcggtttgtaataataacaataataataatacaaagtggctcattacattcttc

SEQ ID NO: 96368 - DNA, 1707 bp, Zea Mays
tgaaagccgtccgtgccgactttattattatttattgcagccaccgtgcacacctcatcttctcttcttcctctcttcccttccattttttctcttctcttccaccaaaccaagtgcggccagagaaatttctcccaaatttcagatcaaatcctcgaaatctccgacacctagcccaccggagacttctccccaacagtgtcgcgatccgtctcgatccggcatggagcgcgtcttctccgtggaggagatccccaacccctactgggttccgccgcaccctcaatcggcggccgccggcgctgttgctgcaccagcgggggaggcggcggggctgatgaaccggtgcccgtcggaatggtacttccagaagttcctggaggaggccgtgctcgacagcccggttcccgtagccggcgtcagtaggggcagcgttggagctggagttgaggctgcggagaggaagacaccggggaccgcggcggcggcggctgcctcgagctcggttgttgaccccgtggagtacaacgcgatgctcaagcagaagctggagaaggacctcgctgccgttgccttgtggagggcttctggtgcagcacctccagataattctccagctggttcatccttgccaagtgtggatgttccacatgcaggccctcttaaacccatgggaggtactggaagtctagttcaaaacaagctagctggtgctccaggcgggggatcaagtccacatgtagtacaaaatgccgatattcctgttaagcaaaccactagctcttcctcacgtgagcagtcagacgatgatgatatggaaggagatgctgagactactggaaacggaaaccctgttcaacaaagattacagagaaggaagcaatccaaccgagaatcagccaggcgttcgagaagcagaaaggcagctcacttgaatgaactggaggcacaggtagcacagttaagagttgagaactcttcgctgctaaggcgacttgctgacgttaatcagaagttcaatgaggctgctgttgacaatagggtgctaaaggcagatgtcgaaaccttaagagcaaaggtgaagatggcagaggactcagtgaagcgggtaactggcatgaacacattgttccctgccgtgtctgatatgtcgtccctcagcatgccattcaatggctccccatccgactccgcctctgatgccgccgtacccatccaagatgacctgaacagttacttcgccaatccaagcgagatcggaggcagcaacggttacatgccagatatagcttcctcggctcaagaggacgacgatttcgtcaacggggctcaggtcgccggcaagatgggcagcactgactcgctgcagcgggtggcgagcctggagcacctccagaagaggatgtgcggaggcccggcttcatcggggtcgacctcctaggttcctactccatcggatatgataaaggccctgatgcagtgatgcccacggcaaagaatatgataaattaacagtttcacatactttgtagtggacattgctaatgctgcgatgcgcattcgttcgttgtggacttacgggtctactgctattgatttattgttcgttctccatgtggatctctggtgtccatgtgacgtgtactatgccaactgctgtctgctacacattgcagtggacacagcaagttcggtttccatcgaaga

SEQ ID NO: 96369 - DNA, 1939 bp, Zea Mays
gtcggttaaatttgttgtcaaaaaacttaaacgacaatcttagggagtaccaaaaaaatcaacacacgtgcatatggaatgtaattcttgaattaaaattttgtcaggtttgagcctcagttactgcccacagtcgccacagatagacctccagtaccagtcacacacgtgacactcgcaatcgcaaagtcgcaagcggatcgcaaactcgcaatcaaggctgctcccctccgtctccgtgttcgccactcggttcaccgcccgccgccgccgagacctcctcctcgccggctactcctgaccccacaaaggcagcgctcggaggtggccctctgtcgggtggagtggtggacacatccgcgcccatggccaacggcggcgctgcggccggcaagctcaccgtcgccgagaccttctccaacctcagggagcaaggcaagagtgcattcatcccgttcataactgctggtgatcctgacctggtaaccacatcgaaagcattgaagattctcaattcctgcggttcggatgttatagaggttggcgtaccatactcggatccactggctgatgggccagttattcaggcttctgcaacacgggcgcttaagaaaggcactacacttgattctgtcatagagatgctgaagggggttacacctgagctttcttgccccattgttcttttcacatactataatccaattctgaaacgtggtgtgggaaacttcatgtctactatcaaacaagctggcatacatggacttgtagtgcctgatcttcctttggaggagacagcgttgctgaggagcgaggccattatgcacaacatagagctggtgctgcttacaacgccaaccacgccgacagatcggatgaagggaattgcacaagcttcagaaggatttctctatcttgtgagcgctgtaggggttacaggtgcacgctcaaatgtaaacttacgtgtagaacaccttcttagggagatcaagaaggttacagacaaaccggtagctgttggtttcggtgtatcgactccagagcatgtgaaacagatcgtgggctggggagcggacggtgtgattgttggcagtgcgattgtgaagcagttgtgtgaggctgctactcctgaagagggtctggaaaggctcgaggagtacgccaggagtatgaaggctgctatgccgtgagctgatctcactccccgtcacaggcaaggtaattagaacatggttttagcaatattctgggcatggggttggcatccataactcatctagtgctgtacgggtcgttctccggtggtgagaacgaagtctggctttgcctataatagaaaagggttataaactgagttagtgcgacattttgatgaaaaagtgagcgattgcgagatatcagttcatgcttattggcagatcctttttttggctgaaagattgaaatgttagggatgaggttgccctggcctcttgagaggataggaataagagaggataagttcgttatgatttatatggcttttcgcttgaaccccaccagctggtgtccatggatgcgggcagagcagtgtctgattggctgcactgaaaatgacattaccttcagacaattcgccttgctctcttctggttctggagtactactttcgaggtccgtcagactgggtcacaagatgatcccaaacggccccagatgctggatttttggacaacggaaagtcgattctgacctctgttaatgtcggcactcatgggtcatgaccaagccatgtttatggtcaaatcagtcccggatgctaacacgcttctctaatctctacctacggagacgactttttccggtgcttatcgtatcattatcatgcatgttactggtagtaacatgttgtctgaacagattctttagctctgtcatggcagcatgaagtgtatctgga

SEQ ID NO: 96370 - DNA, 628 bp, Zea Mays
atcaatcccagacagcaccttaatttaagttgacagtctaacctgggaaattttcagagtgcattcatcccgttcataactgctggtgatcctgacctggtaaccacatcgaaagcattgaagattctcaattcctgcggttcggatgttatagaggttggcgtaccatactcggatccactggctgatgggccagttattcaggcttctgcaacacgggcgcttaagaaaggcactacacttgattctgtcatagagatgctgaagggggttacacctgagctttcttgccccattgttcttttcacatactataatccaattctgaaacgtggtgtgggaaacttcatgtctactatcaaacaagctggcatacatggacttgtagtgcctgatcttcctttggaggagacagcgttgctgaggagcgaggccattatgcacaacatagagctggttcatacccactctcatctttgcatgcaccacttgcacaaagtttgttgcgtacttgtgttgctatctgggtgctaactaaattcttactcgagatgggacctatcaaatcttcagcttgggctctgcccattccagacctgcaaatatacacagttgcaaaagatcttct

SEQ ID NO: 96371 - DNA, 872 bp, Zea Mays
cagatagacctccagtaccagtcacacacgtgacactcgcaatcgcaaagtcgcaagcggatcgcaaactcgcaatcaaggctgctcccctccgtctccgtgttcgccactcggttcaccgcccgccgccgccgagacctcctcctcgccggctactcctgaccccacaaaggcagcgctcggaggtggccctctgtcgggtggagtggtggacacatccgcgcccatggccaacggcggcgctgcggccggcaagctcaccgtcgccgagaccttctccaacctcagggagcaaggcaagagtgcattcatcccgttcataactgctggtgatcctgacctggtaaccacatcgaaagcattgaagattctcaattcctgcggttcggatgttatagaggttggcgtaccatactcggatccactggctgatgggccagttattcaggcttctgcaacacgggcgcttaagaaaggcactacacttgattctgtcatagagatgctgaagggggttacacctgagctttcttgccccattgttcttttcacatactataatccaattctgaaacgtggtgtgggaaacttcatgtctactatcaaacaagctggcatacatggacttgtagtgcctgatcttcctttggaggagacagcgttgctgaggagcgaggccattatgcacaacatagagctggttcatacccactctcatctttgcatgcaccacttgcacaaagtttgttgcgtacttgtgttgctatctgggtgctaactaaattcttactcgagatgggacctatcaaatcttcagcttgggctctgcccattccagacctgcaaatatacacagttgcaaaagatcttct

SEQ ID NO: 96372 - DNA, 968 bp, Zea Mays
gtcggttaaatttgttgtcaaaaaacttaaacgacaatcttagggagtaccaaaaaaatcaacacacgtgcatatggaatgtaattcttgaattaaaattttgtcaggtttgagcctcagttactgcccacagtcgccacagatagacctccagtaccagtcacacacgtgacactcgcaatcgcaaagtcgcaagcggatcgcaaactcgcaatcaaggctgctcccctccgtctccgtgttcgccactcggttcaccgcccgccgccgccgagacctcctcctcgccggctactcctgaccccacaaaggcagcgctcggaggtggccctctgtcgggtggagtggtggacacatccgcgcccatggccaacggcggcgctgcggccggcaagctcaccgtcgccgagaccttctccaacctcagggagcaaggcaaggtgcgtgcgtttgagacctcacgttcgtgcttcgcttcgtcgcaacccttgcggggcaattcaccccagcacccacatttctcttgctgttcctgattgagtcgcagggttggattgctggcgccgtggtggccgatacccaatgttggtcccggttggttgcagggaatacctaattttggtcccatttagttgcaaggaaatggattagggctttggaacaatctgtgtattccttgcatgaattgtccaaatctagtggttttatgtcgagtacacatcgtgctggtttaatttccgtaaaaatctagcctgatcttgcacaatagtggctgctggcttgatgtgcacattgatccgtctttgtctttaaaagcagtgtttatattttaggtgccacagtgttcattctcaacaaaggtaactgcattaagaaatttgtatccagagtagcgataacatgctaagcagagaccaatctttagttgcagggatcttgcattgtactccattccaaattctgtgtta

SEQ ID NO: 96373 - DNA, 823 bp, Zea Mays
gtcggttaaatttgttgtcaaaaaacttaaacgacaatcttagggagtaccaaaaaaatcaacacacgtgcatatggaatgtaattcttgaattaaaattttgtcaggtttgagcctcagttactgcccacagtcgccacagatagacctccagtaccagtcacacacgtgacactcgcaatcgcaaagtcgcaagcggatcgcaaactcgcaatcaaggctgctcccctccgtctccgtgttcgccactcggttcaccgcccgccgccgccgagacctcctcctcgccggctactcctgaccccacaaaggcagcgctcggaggtggccctctgtcgggtggagtggtggacacatccgcgcccatggccaacggcggcgctgcggccggcaagctcaccgtcgccgagaccttctccaacctcagggagcaaggcaagggttggattgctggcgccgtggtggccgatacccaatgttggtcccggttggttgcagggaatacctaattttggtcccatttagttgcaaggaaatggattagggctttggaacaatctgtgtattccttgcatgaattgtccaaatctagtggttttatgtcgagtacacatcgtgctggtttaatttccgtaaaaatctagcctgatcttgcacaatagtggctgctggcttgatgtgcacattgatccgtctttgtctttaaaagcagtgtttatattttaggtgccacagtgttcattctcaacaaaggtaactgcattaagaaatttgtatccagagtagcgataacatgctaagcagagaccaatctttagttgca

SEQ ID NO: 96374 - DNA, 1523 bp, Zea Mays
tctcatatcctactgccggcgttccagagttcgagctgagcagttgcacacagctgctcgtgaagctagctagcgaagccacaggcccacagtgactttgctcccccacaccgtagcggccgtataaaccagctccaaccgatccatcgaaatcgaagcacagtacgtgagcccgtactagagacatatggcctccgcgatcaaggctgcatcgacctcctcccagtggtcttcttccccggcggcagtccactcgtcgccgttatcgaagcggctaccagctgcagtggccatgccgggacggcggaggtctgtggccactgtaagggccgtcgccgcggtagctccgggtgccccggccaagctcaccgccggtgccggcggccgatgcctgccggtgtcgcagaccatgtccaggctcagggcgcagggcaagacggcgttcatcccgtacatcaccgccggcgacccggacctggcgacgacggcggaggcgctgcggctcctggacgcctgcggcgccgacgtcatcgagctcggcgttcccttctcggacccctacgccgacgggccggtcatccaggcgtcggcggcgcgggcgctggcgagcggcacgacgccggacggcgtgctggcgatgctgaaggaggtgacgccggagctgtcctgccccgtggtgctcttctcctacttcaaccccatcgtgcggtggggcctggccgacttcgccgccgccgtcaaggaagccggcgtgcacggcctcatagttcccgacctcccgtatgggaactcgtgtgctctcactctcaggaccgaagccatcaagaacagcctcgagctggtgctgctcacaacaccatctacgccagcggacaggatgggggagataacacgagcttcacgaggattcgtctatctcgcgaccgtcaatggagttacaggtccacgcgcaaacgtgaacacacgtgtccagtctctcattcaggaggttaaacaggtcactgacatacccgtggctgtcgggtttggcatatcgaaacctgagcatgtaaagcagattgcagagtggggtgcagatggtgtgatcattggtagcgcaatggtgagacagttaggcgaagcagcctctcccaaggaaggattgaagaggctagagaaatacgccaggagcatgaagaacgcgctaccatgccagtgaactagtcgtattgacgcgatataggctgtgttagcaagcacgttggagaacaatgttgcagaagtagcacaattaataatgatccattcggcaaggttgcttttttacaaattgcaacaataagttatcaatataaaatcaacgattcctttgtttaaaaaaaaggaagaaatgttacatcattgcatggtgctgcgattcagtggttactccattcattttaaattacagttcagctcgagtttgtcctgactcagcctttttaaagattgtcagtttgtaacaacaacaacaataataataataagtggctagctcattacat

SEQ ID NO: 96375 - DNA, 481 bp, Zea Mays
atagacgcgggacgcagcccacgtaaaattacatttatgtccattacatttgtcaatgacttatggaaatctgacaaggcccacgtagtcttttcatctttaagtcggttcccctctctgctatcgcgacgaagcttccctgcgcacagcttcggctgtgcaccatccttcgtggagcttggtaatcagcccgtccttcgtctggttcaggcttcgtcctgaccgcacttcatgttcgtaattctgagtccgaagtaccttgtggagaaagcgctcagtggaacggatctggtttttaagtgaggtgttcttggcggcggcggtccacttccgcttgcggtcggcaactacggcggaggacgaggacttgggccggcggacggcggcgtcgcggcgcgggtagccgccgtgcaccatcgccggaaccctaggtggagatggagactgccaggaccaggagcgtttggctcacgtacgcaag

SEQ ID NO: 96376 - DNA, 1238 bp, Zea Mays
atggagatgatcgacgcggagctgcgtcttggcccgcccgggagcaacaacagcgacgtcgtcgtcaccgtcgtgccgcctgcagcggcgaggaaaccggcggcgccggcgccggcgtcggcggcgaaacggccgtcctcgtcggtggtgaagagcgacgacgcgtccgggacgggcgaccatgacgacgacgccgcaccggcctccaaggtgcgggcggtggggtggccgccggtgagagcgtaccggaagaacgcgttccacgcggcggcggaggcggcgaggaggaccaataataagggcgaggagctgcagggaggaggcggccgcctgtacgtgaaggtgagcatggacggggcgccctacctccgcaaggtcgacctgcggacctacggcggctaccgggagctgagggacgcgctggacgcgctcttcggctgcttctcctcctcctccgcctcctcctcctcggccgacggcggctgccagttcgccgtcgcctacgaggacaaggacggcgacctcatgctcgccggcgacgtgccctgggagatgttcatctgctcctgcaagaagctgaggatcatgagggggtccgaagcaagataaccaacgcaacaacgaggatgcaaaggacatgttggatgcatggcatgcatggaggtccagctagctatggtccgtccaactcatgcatgggacagagggagagagagagacagaaaaaaaaagggaggtctttatatctgtcattcactggaattggaggcgcggcgtagggtatatacctgcacaggggtcggaggccccatgcatgcatgcgcgcgtcgtcgtgttctacggccagcccagccggctcataccatacacaccatggacatgcacatgatcagatggagtggagcatggaggtgatggttcaaggatcacggcggcgtagtacacgtcacgccgtgtctcccgccaccagtcaggcggacgtgctgtggacggctgactggacgtgcatgcatgtcagatcggagattattcagccaagtagcatcggtgaaaagctactatctagaattttttttgtactgtgcacgctagctcatatgctgtagcttatgcttgctagcctatctgtaactttgagctcctcttttgtaagtgacctgggcccatgtatattagttcattctaggggtgcagccgcacccacgtaaaaaaataagaaacaatgtgggattagaacc

SEQ ID NO: 96377 - DNA, 107 bp, Zea Mays
ctatccccaactaggtcgcctgataatagacttcgatcatgtcatgctattctataacaatttccgttgtaacttgcctaatcatcatactatggtacacacttaaa

SEQ ID NO: 96378 - DNA, 204 bp, Zea Mays
atggaagaagctggcagtgctcatgctcaaatataccctccactcactgacgttttcaaacctctgataaaggagggcaatgtctacaatgtctcctacattcagatcaagaaagctaataggatgtacaagcctgttgacaacgatatcatgattggtttcacaaaatggatcctatgctacctcgacaaacccgcggtttga

SEQ ID NO: 96379 - DNA, 1581 bp, Zea Mays
atggtggcggcgtcgcggaggagacggccgcagagcggacacgtgaggcacgccgcgaggcccgaccgcctcagcatcaccacgccctcggctcctctgtcccctcccgctccaggcgccgcagcggcggcggcggttggcgcctcgcaggcgagcacggcactctccatgccgccagccggagagaccgagcacgagacgacgacgggggttcggggttccctccctggctccctcacggctctctcgggtctcacccgcgtcgcgctcgatcgcgttgctcgcagcttcgatatcctcggccgcgaccgcgagcccgcgactagtgctgaagaagtggagaatgggtcgggccgacccgaaatcagtagcctagagtacggttcggcacgtattactttgcatgatggacagtatgagctccatctccatcctgctgatcaccatccgcttgaagttactggagactacacttctgcgacgttcgacgaccttggacacgagttctttgcagaaagagaaatcgagaagcccatattcaaccgtacttcatcgattggtcgtagagttgggtctcaactacctctgccgactatcaaaactgaggtttctcatctcatagacagtggcctcgtatcatgtaaggcgtatgagataaatgacaggtttctggcaagaaagaagacctctttgaagaaagccaatgtcgtgaaagggcagtggacaccagaggaagataggaagctggtaaaattagtggaacagtttggactgaggaagtggtcgtacatagcacaactgctgccagcaagagtgggaaagcaatgcagagaaagatggcacaaccatttgaggccaaacatcaagaaagacatttggagtgacgaggaagacatggttctgatagaagcccacaaggaggtgggcaacaaatgggcagagatagccaagcggctacccggcaggaccgagaactccataaagaaccactggaacgcaacgaagcggaggcagttcgcgcggaggcggagccgcaccagctccaaggcgcccaagccaggcacccttctgcagagctacatcgaaggcctcggcattgttggcccgagcgacaagagtgctgcgccactttctgaacctacactgtcgcctgaagctcccggagcaaagtcggcaaagaccggtggaacaacgctaccggaagaacacagcccgccgtccaacatgctggattcccaaggcgttcttcttcccagcgaagagcttcttgccccaatctgcgacgaacttctagatggaatgtgtggcggtcttttcgactgcacgaacgaggacgccttcttccgtgtgtgcgctgtggacgatgacatcgacgtgagctacatcttcgaccatgcgatcaaggtcgatcctgagatagacatggagatgatgatgatgtgggatgacgacgccctcgcgtgtactgctggacctgctgctggaacagctcatgtcgagaccgtgcatgtgaaggaggagatggacctgatggagatggtggcagccacgcagaactgtggcgaagcagaaaatcactag

SEQ ID NO: 96380 - DNA, 976 bp, Zea Mays
ctcctctctcgctttgctctctgtcttccattcagatcccctcgtccgcgatcgtcgaagccaggccagggccaggccaacaagcggccaaccaaacacagctgcgcaacgaatcccacagcccgaggcccgatctagcgccggcgacttggggtccgccagcgccccgccatgccatcctccaccgcgtcgtggtcgcgctacggtgccgtcccgacctcccccccttcgccgccgccgccgccgccgcagctcaggccggaggacgacgccgcgggcggcgaggcggcgccctcgcccctcggtctcggctacggcggcggaggccggggtcgccttcttctcccgcgcgcggggcgttcgcgggggcggggcggccgcgcgcgtggcgggaggtgctggacccgacggcgttctcgcggcccgagagctgcggggaggcccgcgcgcgggcgcgccgcaacctcgcctacttccgcgccaactacgcgctgggcggcgctcgcgctcgtcttcctgggcctcgtctaccgccccgtctccatgctcgtgttcctggcgctcttcgtcgcctggctcgggctctacttcggccgcggcgaccggggcccgctcgtctgcctccgccgcgaggtcgacgaccgcgccgtgctggccgcgctctcggcggccaccgcgctcgccgtcgcgctcacccgcgcgggaatcaacctcctcgtctccctcgccgtcgccgccgtcgccgtcggcctgcacgccgccttcagggtgaacctgtacgtcgacgagacggacgcgttcgatgtcgctggcacctcgttcacggatagccgatacgggtacgcgctccctagatgatgagtcgatgacagcggcaggcattcagctgatgcggttctgctcatcgtgaggcaggggggggggggggctgtcattctcgtaaaaactcgaaatcttcccaacgagaccttgagaa

SEQ ID NO: 96381 - DNA, 454 bp, Zea Mays
gatcgatttggtggccaagcgacagaccttttatcactttgtgcttccttgaatccaatacttggctcttttgacataggaaaggtatgctctttagtggaaaagtattatcctgcagatctctcaaatcaagaaagaatgcaattagagtgccaattgccacattttcaacttgatgtttgcaaccatccaaaactaaagggtttatcatctttggctgatttaacaagtggattagttaagatgggtaaagattcttcttatccgatggtagataaattattgagattactcttgactctccctgtgtcaactgcgaccatagagagagcctttttcagctatgaaatttgtgaagacacgtcttcgaagaaaaatgggagatgcctatttacgggattatctggtcgtttatattgaaagggaattagcggcaatgattagttctaatgat

SEQ ID NO: 96382 - DNA, 559 bp, Zea Mays
gcgatagttccatcaaagtgtatttcttgtagtacacaggactgaaaccacagaagacaaatgccgcatcgtgcatctgtgcagacaagagatgaatgctacactgcaaatctgcgcagattggagacgaatgatacaatgacagcgccgacataactcaaactaatctattcacatacgttgtactgtcacctacaaacggcagctgtggacgacaacaaattcaattttcgcagaaatttcactggagaacccgtgttacaaacgacgcctgaaaaaccgctgtgctccagcattagtgttttcacccttcagaaaccgctggtgccgttgcttcagaaaactctccatggatttaactgccgttggggattcttcagtatgtgccaggggggcatccagttcattcccttttctgctactggaactggactatggtactatttagcctatatttatgctaacttactttgctcaatgttctggtaacttgtgatcaaagcattttctcagggctgcccttatctccttcagcatctcgtcgatcccgatatgcctc

SEQ ID NO: 96383 - DNA, 1620 bp, Zea Mays
gggaacttgtaccgcgccaggaacacctccgacgcgaacccggcggtgacgcgcccggcgtagttccagatgctgatgagggagacgaacgtgttgatgctcttggccgggtatcccagggactgcccgatctgccccatgttgtcgatcgccgtcagcgtgccgcccacgccgcagatggtggccaggaacagcaccagcatgtccacgctcaccagcgcctgcaggatggtgtagtcctccccctgcgccggcgggctgaacatgtgccgaaggcaagaccccaggcagctggaccgcttggcctctgttcccgtagtcatgctctgagccaccgctggttcaggtgctgctgctgctgctgccaccagctgcagcgaagctgcggtggccggtttctccacggtcaccgtggggtcctcgcggagggactcctccagctccttctggatcttgtactcctgcttgacgacgacggcgagcggcaggaagaggatgaggagcagcgccgcggccgagaccgcgaaggcggcgtgcgagaagttgacctgcttctgcaccacgatcatgacgaggaggtaggtcgcgagcgcgatggagatgtagaggaagcagaagaaggcgtcgttgctggtggctgccgctgacgggccccggcgtcggctggcgcgcgggtacggcatgatgcggacggtgtggacgaagaggatggtgacggcggcggggagccaggcgatgagcagcacgagcgacttggcgtcgtcgccgtagatggcgaggtagagctgcgtgaagatggcgccgctgaggccgacgaagcccttgaggaggccgagcacgacgccgcggctctccgggaagttcttgacgcaggtgacgagcgcgccggtgttggcgaaggactgggagttggcgcccacgcagatgtagatgcacatgagccagacggggggcctggcggtgcgcccgtcgatggcgaggtagatcatgaggtagcccgccaggttcatggcggcgcccatggcgagcaccacccacggcggcgtgacctcgttgatgaggcccgaaatgacgcccacgttggcgcccaggtccttgaagaaggagagcgtgttgagcgtgcgctggtcgtaccccagcgtcgacttgagcaccttggagtagatgctgaagatgtaggtggcgcccgacgccgacaagatgagcaggcacgcgaacaccatgaaccaccggccctgcaccacctgccgcacgaaccgcgccgtcagcacctgcggcccgccggcggcggacccggacgcgaacaccatcgctcgctccaaaccaaaggacacgcgctcctcctcctctcgtagtctcgtcctcgccgactctctgctttgccgcttctctggccctggcccggtgagtgacatagctcgcgcgtctgtggaatatatgataagccgaaggggagcggcctgcgctgactgtgactcgctggtcaagtggctcgtgtgagttgtgatgactgactcttctgtggaggagaggcagaaggaagagagccagagccagaggttggttagtagtttgtgtgtgagagccaaattatctcgcacctcactcagtcactcctcc

SEQ ID NO: 96384 - DNA, 971 bp, Zea Mays
acacgattccctcgtcgggtgggtgtgggtctcgtgccgtggcctgcggtgcgggcgcttattaatcacgagtacccgcaggcacgcacacaacacaacaacaacaaccatctccaacgcagcaagcagacagaaggacaggcaggcagcgagtgcaaccgcgagagcgatcagcgatgggctccttcttctcgaccttagtgacgccccctccggccgccgacgacccgaactgcgccgtggtggccgcgcactccaaggccacctacgacgagcagtgggcggcccacaagagcagcagcaagctgatggtgatcgacttctcggcgtcctggtgcgggccctgccgcttcatcgagccggccttcaaggagctggcctcccgcttcaccgatgccatcttcgtcaaggttgacgtcgacgagctcgcggaggtcgcaaggacatggaaggtagaggcgatgccaacgttcgtgctggtcaaggatgggaaggaggtaggccgtgtgattggggctaagaaggacgagcttgagaggaagatcaggatgttcgtcacgtcatcttcctcgtcctaacttagcagtgcatacactcccaccttcttactggtttctcgactccagtggttcacctgggacggggttgctgaaatggttcccttctctgaatactgaaaaatcaaaaaaagaagtatatgaaaaaatgatggtagacgtgtctgggtcaataagagtttctgaaacttggatttgtatgtgtcagtctctgtgttctgtttccaaggaatggatcatgtgagtttggaatatagctggaaatatgctgtgctgttagtttctgttttctggaagtttggtttttagggcttgtttggttagaagaggattgaagagaacgagagagatcctgagaaaaattagttcatttctctcttaaacctcttcaatccccttctacctaccacttcc

SEQ ID NO: 96385 - DNA, 998 bp, Zea Mays
acacgattccctcgtcgggtgggtgtgggtctcgtgccgtggcctgcggtgcgggcgcttattaatcacgagtacccgcaggcacgcacacaacacaacaacaacaaccatctccaacgcagcaagcagacagaaggacaggcaggcagcgagtgcaaccgcgagagcgatcagcgatgggctccttcttctcgaccttagtgacgccccctccggccgccgacgacccgaactgcgccgtggtggccgcgcactccaaggccacctacgacgagcagtgggcggcccacaagagcagcagcaagctggtcagcccctcttcccttttcggctcttgttgccttgcccccgggccttccgtgccctggatctgaggaacgcgagggtctggttcccttgcgctctttgcttggcagatggtgatcgacttctcggcgtcctggtgcgggccctgccgcttcatcgagccggccttcaaggagctggcctcccgcttcaccgatgccatcttcgtcaaggttgacgtcgacgagctcgcggaggtcgcaaggacatggaaggtagaggcgatgccaacgttcgtgctggtcaaggatgggaaggaggtaggccgtgtgattggggctaagaaggacgagcttgagaggaagatcaggatgttcgtcacgtcatcttcctcgtcctaacttagcagtgcatacactcccaccttcttactggtttctcgactccagtggttcacctgggacggggttgctgaaatggttcccttctctgaatactgaaaaatcaaaaaaagaagtatatgaaaaaatgatggtagacgtgtctgggtcaataagagtttctgaaacttggatttgtatgtgtcagtctctgtgttctgtttccaaggaatggatcatgtgagtttggaatatagctggaaatatgctgtgctgttagtttctgttttctggaagtttggtttttagggcttgtttggttagaagaggatt

SEQ ID NO: 96386 - DNA, 1007 bp, Zea Mays
acacgattccctcgtcgggtgggtgtgggtctcgtgccgtggcctgcggtgcgggcgcttattaatcacgagtacccgcaggcacgcacacaacacaacaacaacaaccatctccaacgcagcaagcagacagaaggacaggcaggcagcgagtgcaaccgcgagagcgatcagcgatgggctccttcttctcgaccttagtgacgccccctccggccgccgacgacccgaactgcgccgtggtggccgcgcactccaaggccacctacgacgagcagtgggcggcccacaagagcagcagcaagctgatggtgatcgacttctcggcgtcctggtgcgggccctgccgcttcatcgagccggccttcaaggagctggcctcccgcttcaccgatgccatcttcgtcaaggttgacgtcgacgagctcgcggtacgccacgcctcctgcggccctgacgccatcctcgtgcctactttttttcttgtggcttggtattgtggtccggaatacactgtgatttagcctcggcatgatcctgtctctagtaagcagcagtcaatcagcagtttggagacggaactccgaattggatatgatttcccatatcttcggggaactcctcgagcccagttcagttctactaggctgggaatcaggatgcgtcctagtggtgttctattgcagcgaatgttcgggaaaccctcgagcccagttctactaggctgggaatcaggaattcaggaattagagacagcaatgggtacccgctacccgaaacccggtggatttttctctattagggtatgggtttgggtcaatttctctatccatgggtttttttaatgggttcaaatagaaacccaacggttacgtgggcatgtgtttattcttccactacccatatccgcaaacccatgggtttttaaagcccgttttaaaatcaacattccttataaatatgtctcataatattattaattgaatatgttctaattgaaataaact

SEQ ID NO: 96387 - DNA, 1794 bp, Zea Mays
cgcgtcgtcgcctagtcggtgcgtggtgggagtggtatggagaggggcgccgccacggccgccgcggcgctcggctgcgccctccgctccccttccccctccgcgtccccggctccccggtggccgccgctccaccgctgcccacggcgcggcccgcccgggcctccccgctccctcctgccgcccgcgcggcgtttcaggcccctagacatgaagaagggacatagtaggaactcaccgaagaccttcagctcatctggacactcgggggttagactaaacaacgaaggtcttgtcaacgacaggctcctaatagattgtggagaggatcaggattgtgtgctcggtggcatagttgccctgggaaagtttgatgctctccacattggtcatcgggaattggcaatgcatgcttctaaagcagggactccttttcttctttcttttgtgggaatggccgaagtacttggctggacatataggcctcctatagttgctcattgtgatcgcaagcgggtcctttcatcttgggctccatactgtaggaatgtggtaccacttgaatatcaagttgaattttcaaaggtcaggtccctgtctccacgacaatttgttgaaaggctatcaaaggatcttagaataaaaggtgtcgtggcaggtgaaaattacaggtttggttacaaagcatctggtgacgcaactgagttagtgaaactatgtgaggaatttggtttaagtgcattcattgtacgctctgtcatggacacagcaaaaagatctcttaatggattttcaggcgctataaattcgagtgataaaggacaggtttcttccagccgtgtccgccatgcattggctatgggtgacatggaatacgtctctgaattactagggaggaaacaccgtcttttgctaatggttaaccaacactgccttcatgaaaagaaaagcattgtactccctaattcttgcatgctgaacatgccaccagctgaaggtctctatgaaaactgcgaccttgttaatggagggtatcttggaccatgtagagtgatcatcaactctgatactatcatcattgagatgaaagatgataacagtttatccctaaatcctattcaagaagttcagttagggattgagtttggatgaagttatatactttttgcatctgccatcttgtggagattattgctgaaagaagacattggggggaatactgcaaggggaagtcgaagactttgttcaagcgtgcagtacgcctcatcgtgattgagttcaggagcattttgtagtctcacaagaatgctttattacagaaaaaaaaagtggagatcagtccagggttaccatacacacaaggacaatggagtcaaactggcattttttggggtctgatgacaagttgtatctatcgaaacaaatgcacggaagggggtttatcttgcaatcacgcattctgtaacttatacaattgtttagtctttagttggtacagacaggtagcagtgtcaacattgtagtaatgcttcagccgtttaactagaccttgattcagacaacattcgagatcactctagatttctttgacgcaaaattgcttctaaggggatgtttgtctgtttgacatggctttaacttatatacggaatttttcctctcttttttttttgacagcagaggacttttctttttaacaacagagtttttttttcatgtggtaaccgctaacactaatgtgctgtttggttcacatattgataacgtaacgtgtaaccgataacgttaaattat

SEQ ID NO: 96388 - DNA, 2683 bp, Zea Mays
caatcacacacgagtccggacgcagaagaacccaccgatttcggcgcgcggaccggtcgaacaggcggcccaatcgccacgcggatggcggcggccgccgcactgctgctgggcgaggacgggcgcggctacgagctcgcgcggcggctggaggcgtgcggcgcgtggcgcgagtggctgggcgacgattccgcgcacgccgcgctcgcgcagcacctcacgtccccagcaacctgggacgccttcctctaccccgccgcctccccatcgccgcccccgcgcccgctcctcctcctccagctccgcgttcgcgcgctcctcttcgacaaggcctcggccgcgctcctcctgcccccccgcggcgcggcccctgtcagcctccattccatcaacgccaactatctgcgacttcatggagatgatatttatttctctttggaagatgagcaggaagacaacactcaacatcaagtgcattctagaactgcgttcagtccaagcagggatggttccatgttgtctcaacggcataatcggtatgaagaattgcctgacacatggtacaagccatatgctgacaaattcaggatatggcacagcaagcttcactcaggtgacaaagaaataccaaagagaacaccagagggaatgtctgactatcttaagatttgcagtgtacataaaaggaagagggctgtgtttatggatgatcccagcatatctgctcccatattggaaaatggcccttccctgcactcaaagaatgctggggaattcagcaattcaacagacgaattaattccagaaattagatttccatctgactgtgttccagaaagcgcaattcctaaaacaagtgggatatctagggctaacaaaatagaagttcatggagttcttgataatttgccagcaccatctagccgcaacactgcaatgcttgaaaggtttggcatggtgcctgaatattacaagacaggaaacaaatatagaggaaaagatggatctagagtagaagggaaatctttaagccaagagcaagcattgctcatgacaaaacagttggttgctcgctacttggcaaattcaggctttgaaagtggaactgtggtctctattgatgttctttcagaaataataattaagcacatatgtaaattgggacgcaacttgaagcttctaactgacagctacaggaagcaattttcatcaattgaactccttaagatgttcctacaaactgttgggtacagtaacattggatccttgatggagatcacaaagatggggaacagagtggccaactaccctattcatcaagatgcacaagttcttcagacacaaaatgcaatttccattcatgcacagcagcttccaaggcagtttcctccgcaaatgcttcagaatttgacaccacagcaacaacagcagcttcaaaatttgacaccacaacagcagcagcttctgcagcagcagcagtggcttaggcgcaaccagttatgcagcccccgtggtcctcttactatggcagacaagaaccagcctatggtgaatgtgaaggtagagaatactatggattctcaaatcgatgtcccatatgggtcttttactagacaacagcaatttaatataagacagcagcagcaactattgcatcagcagcagcaacagcttcaacagcagcagctccagcaacagcaacaacagctccagcagcagcaacaccaacaacagcttaatcagcagcagcagcaactgcagcaacagcagcagcaattgcaacaacagcagcagcagttcactcagcaacagcaattgcaacaacagcagcagcaactacagcagattaatcagcagcagcaccttcaacagcaacagcaacagcaactaaaccagcaacaacttcagcagcaacagcagcagatgaccatgtcaggaaatcagaatgcacaactagcacagcagttcaaacaagtctcatcaatgagtgcatatggcatgcgaatgccacctgtcaaagtagaagctttccatgaattggtgagcggggactcgtcgctgaagcacgataacgaccctaacaaactcacttctccaaagtagctgcggtgtgcaaaggatagcttttgcggtctgttgccttcctgccccccaacatcatgtctcgcctgtttgattgcgcacaacagcaagacgaaccgtgtatcgtaaatgtgaagcatttggctaattcactgccttcaaacaaactgatgtcaaatacgaactgataatagctccaagtttccttacattctgtacatggattaagggtgcgctgtcctctacataattagacctgtgcatattttaagtttgccagagaaagctcattcatttcatgccaagaaattgtggccattacgttcatagtgtgcgttggctcttcattttcaggccaggcctgggcttggatggaccatccgttagtttttagtatgaagacacttcaaatcaatatattagattggacttaggccaaggaaattttacgaatttggtgtttcgtctcatcctctaggttctattatgattttatccttatccttaattttaagccttttgattttgttctcaggattttaaataaaccagctccttgtttatgtaccacggaattaaatgatgaaaaacagaaaaaaaa

SEQ ID NO: 96389 - DNA, 88 bp, Zea Mays
ggtgacgcaaactatgaggaagttgggttcgacggtaaaggagaaactagtgtcatacgtgtttgacctagctactccattatgctag

SEQ ID NO: 96390 - DNA, 1467 bp, Zea Mays
gtcctcttcatcctctccggctccgctagccttcttggcctcttccagcgccttcaccaagtccgcgaggcacgagtccggcccgtcgtcgaggctcttgggcgtgaggttctcggcgacgtcggccggcgtcatgtccacctcccggagtagctcgccgacggcgtcgaacagagggtgcgagtccacgtcgaggtacgtcttggccaggaacttgaacgcctcgaagccgcagtaggacatctcgatgtgtttgtccatgcgccctctgcggatgagcgccgggtccagcttcttgacgtggttggtggtgaacacgatgatccgctcgccgccgcacgccgaccacagcccgtcgatgaagttgagcaggcccgacagcgtcaccttgctgctggtgtccttcttctcgccgggcttgctggggccgccgccgtccttcttgtccttgtcgccgtcctcctccgccgccttcttcttctcgcgcgcgccggtgaggtcgagggagcagtcgatgtcctcgatgacgatgatggacttgctggtggtctcgatgaagagcttgcggaggtcggtgttggagtgcacggacgtgagctcgatgtcgtagatgtcgtagtcgaggtagttggccatggcggcgatcatggccgacttccccgtcccggggggcccgtacaggaggtacccgcgcttccacgccttgccgacgcgcgcgtagtagtccctgccgcccttgaacatgtcgaggtcgtccatgaccctcttcttctcggcggggtccatggcgagcgtggcgaacgtcttggggtgctcgaacaccacgtgggtccacgccgacctcatgaacccgccgtcgctccactggtgcgtggagatgttggtgaacagcttccgctggcggttcttcaccatgacggcgcggcccagctggcggacgcgcgggaggtacgtgtccagcacaagcgaccgctggtgctccaggaagaagaggcggtagaagtggcgctcctcctgcgcggcggcgccgccgccgctccaccacgccgcggcgccgtccgagcgcggcggctgcttggagtaggcccaccaccagaccctcgcgccctcgaagtcgtcctccacctcctcgccgtccgacatgctgagcacgagcttgtcggcgtccttggcggactcggcccggaggtggcgcacgccgtgggcgctggcgtcgctgaggtaggccttgacctcctcgtacgcgtcgctgcgcttcatccgcccgccctcgtactcggcgatggtgaccgacaggtacgggtccaccatcgccgccagccgccgcgcgcgccggctcagctgccgcgcgaagaactgctgcagctgcaggtgctgcaggttctgccacaccaccgtccacagcacggcgatcaggctgagcaccacgccggagttgagcccgctcatcatcgcttccatcgccat

SEQ ID NO: 96391 - DNA, 2712 bp, Zea Mays
acacgaaatcccgctttcgcccccgtcctcttccccgctccacctccctttccccctccctccttactccagtcctcccatggcttccagtgccacgggacctgcccgctccccgtgagtccgagacctcctccccgaccgagccctgccctgatcccgacccgggacccacccttgatccggaccgtcctaaatcccaacggggtctctggcgatggcggcggcctccccgccgcaggatcagcagcagccggcggcggagggggccgttgcgcgggaggaccccgcggcgctgaccccgaggagggctcggttcccgcgcgcgtgccactaccgtccgaacgcgccgccgctcacgcccacacccgcgccctcgcctccgccgccgcggccgaggcggaacgggaatgcggggtacgagacgccggagtaccgcgtggtaacgccgctggtggaggaaccggcgtcgcccgctgagctgccgcggtggagattgcgcggcatgtgggagctcgcctccgtcctcaacttcctccacgtgttccggccattgctgaacattccggtggagttcactgcagaggagctggaggacgcgatcataacacccaatggaacgttggatgacgttcatatgcctttattaaagtcaattcctccagtaactcgaatggccatgggacgtggaacatggatagcggtgttatgtaaaaaattgaagcactggtggcattgggttgcagaaggcgatataccgattgtagcctcacatggagcggaaactgagctttacaaggcacttgagccaggaattcgattagtgatcctgaaagccatatgtgatatacgcagtgagcaagaggacgttcggaacttcattgatagttctttgaagcatggttatcatctttccatcttccgtaaagaaaggattggaggagattcacatggaatctcatactggtatgaagatgacccaatccttgggcatcggttgtatcgtgaaattagacgagtggagcatgcgaaggactcaacaaaaaaatctaaaggaaagggagtttctactgttccggttatctcctataactgggaggctgtagcatccaactttgatgagtttaaagtagctgcagagaaactcttttcaagcaggaacaggacagaagtctctcttggcaagaagctgaagttcacttatcttccagagattgaaaagattcacaagaagaaggagaagttgctaaaaaagcaacaaagagaagccatcctccttgacagctgcttgacagtgaatggattgacatctggccgctctcgacgtgaaagaaaacatgtgacttatacttttgatgattatgagcgttcaataaatgaagccataaaaacaataaggaaaaatgagaatgctgttgaggttggcccctccccattatgcaaaggattttatggagaaactccagagaagttgtattacaaagcaaaaacagatgaaggaaaggctgaaactctccatcgcagctacaggcagagaaaaagatcccaaaggtacacaaaggactatgttgaggccatatcagatattgacctagattttgacagcgatgatgatatcatgggtgaagcagtctatgatgaggaatatcttagaagaaggaaacgatacaaggcaagcctttctgaaaatgatgatgagtttcagttggatcaagtcgccaatgatggtgatgatgaagtgggtacttctttgaatgttaatgaagacacaaaagatctccaatggtacaaaagatttccacttctcacccctcaagggaccaagttgaaatctattgatgaaatccaaactggcatccgacgcagtaagcgctccacccgttcccgtattaactatcgacagcttgatacttttggcgcaaatacaaaatatggaaagtcagagaaatgcaatgcatcagatccggatgctagttctgatgcactaaatgatacggagctctcaacaagtcaagatcgagaggaagaagacggagtaaacaaagcacaacagcagtacacagagaaaccaatcgttcctgtcaaggagagtagaagtgtccggagaaaattcctcgtcctaaatgagcttgtgcctatagctggttttgatgatgcttcagtcttagtgaaagataagcacgtgaataacaacggaggaaaatgttctgcagcacattagggcgttggggaagctctttttttttggtcacatgggtagcaaatactgggtagaactgctcgcttaagcatggaccaacgagaatccaatgagatggtgatgcaacattggtcttgtttgggcagactgctgcttactacttccagtgtcatgccagcgaggagatgagatggtccatgggtgctgtgtggctgaattcccagcccataaagccaagtccctctctgatacttggaggtcttgctgagatgtgcactaggcacaccgcgtcgattggcgctgtacaattgtcacagctgtacgtgtatctcctccatgtatatacagtgattgggagcaatagcgtcttctggtttcaggatgcctatgggtagttgtctcttcttccttttcccctcttctgagcatctgaagttcggcaataaactcgattcaactgtggcatttacttatttctgtatgcggtaattaatatcgctcgatcttacactact

SEQ ID NO: 96392 - DNA, 1228 bp, Zea Mays
tcttactctctctccaccgcaagtgtgcacactgcacagtgccactgaccactgcgagctctccctccagtttcacacaccctgatctgttcgcatcagtctcccggtcgcaagcgcctccgaaaccctagactcgcctcgcgagttgcttcgcttctcctgcccccgatggagccgtccccggcggtcgctgcggagctctggtgctcaccgcacctcgccgcgggcggcggccgcccgttggaggcgacctcggccgtcacggagaagagcagcggcggccgcggaggaggcggcgccgtccggaggaggccgagggagaccccggtgtccgaggatgactcgtcccggatcgtctccacttccggcggtggcggcggccaggatttgactgatctagaagcaaagcgttccaaaacaaataagtccagtaataataaaggcagtctaagaacagaggttgaaactgactcaagaagtgctggcaaggctgttagtaaaaacattccagcagcagagccaccaaaacaagattatatccatgtcagggcaaggaggggtcaagcaactgatagtcatagtcttgcagagagggcacgtcgtgagaaaataagtgaacgaatgaaagttctccaagatcttgtgcctggatgcaacaaggttattggcaaagcatcagtacttgatgagataattaattacatccagtcgttgcaatgtcaagttgagttcctgtccatgaaactagaggcagtgaatgcccaggcaaaccagggagttgaagtatttccagccaaagattacggttctcagacatacaacacagctcctgggctgacatttgatacgcaaaccagtagagaatacgcccagggcacgtcgacctcggaatggcttcacatgcagattggcagtggctatgaaagggtttcatgaacgagatgaatccaggcagccgctaaataaagtgaaccatgatcaatcatggccgtgcttgtagatcattctttttcattttttttgaaaccatcatgttccagacgcattttttattcatgcttggagctgtaattccagccggaacatgtatttttgatgaggcgctcatttgtttccccatctgaatctcaagactgtttctgctgttcatgtattccatggaatttctgtagatcgcgttcgtctgtcagaaggatgaataaatcagttgatgctttgattttgaatc

SEQ ID NO: 96393 - DNA, 1363 bp, Zea Mays
tcttactctctctccaccgcaagtgtgcacactgcacagtgccactgaccactgcgagctctccctccagtttcacacaccctgatctgttcgcatcagtctcccggtcgcaagcgcctccgaaaccctagactcgcctcgcgagttgcttcgcttctcctgcccccgatggagccgtccccggcggtcgctgcggagctctggtgctcaccgcacctcgccgcgggcggcggccgcccgttggaggcgacctcggccgtcacggagaagagcagcggcggccgcggaggaggcggcgccgtccggaggaggccgagggagaccccggtgtccgaggatgactcgtcccggatcgtctccacttccggcggtggcggcggccaggatttgactgatctagaagcaaagcgttccaaaacaaataagtccagtaataataaaggcagtctaagaacagaggttgaaactgactcaagaagtgctggcaaggctgttagtaaaaacattccagcagcagagccaccaaaacaagattatatccatgtcagggcaaggaggggtcaagcaactgatagtcatagtcttgcagagagggtaagtggaatgtaacattttctgttgtaaaaatgctattgtatgaatttcaagtggtctaaaacggtaggagcatcacttctgtaagttacatacaacatgaacttgaccacttaaagatcttgttgttttaacaggcacgtcgtgagaaaataagtgaacgaatgaaagttctccaagatcttgtgcctggatgcaacaaggttattggcaaagcatcagtacttgatgagataattaattacatccagtcgttgcaatgtcaagttgagttcctgtccatgaaactagaggcagtgaatgcccaggcaaaccagggagttgaagtatttccagccaaagattacggttctcagacatacaacacagctcctgggctgacatttgatacgcaaaccagtagagaatacgcccagggcacgtcgacctcggaatggcttcacatgcagattggcagtggctatgaaagggtttcatgaacgagatgaatccaggcagccgctaaataaagtgaaccatgatcaatcatggccgtgcttgtagatcattctttttcattttttttgaaaccatcatgttccagacgcattttttattcatgcttggagctgtaattccagccggaacatgtatttttgatgaggcgctcatttgtttccccatctgaatctcaagactgtttctgctgttcatgtattccatggaatttctgtagatcgcgttcgtctgtcagaaggatgaataaatcagttgatgctttgattttgaa

SEQ ID NO: 96394 - DNA, 494 bp, Zea Mays
cagattacctaccacacctgtgccatatccggttattatttatgaaatcatcattgatggcaatgtctcctcgaaacaggagacagacaactcactgaatccgtcttccacgaggtaattgaaagtgtgaccgtcgcagttgtaggtgaacttgttgttgcttgcggggagcttcatgaggcactgggaggcgatggtggtgaagttgccggtgaactccgtgtactcggccagtatgaccgtgccacgggccacgaacgcgtagatcagcgactgctgccccatggctgccccctcgtcgtccctgctttcccctcttcccccgctcgtggagtttggctcgccgctggcgaaaccctagggctggactggatctccgcgaggtggaatgcgggggagggggaaaggtcggtttcgcttctccgtggagtgggaggaggggtaatagtcgggggtggaaaaggaaaggaaaggaaaatcaaattttgttgatg

SEQ ID NO: 96395 - DNA, 895 bp, Zea Mays
cgcgcaggcctgatctatctctcatcatcacacccaacgcaacagcagcaaacgcgcagagaaaaatcactgatacaatggccatcaggggcagcatcggcttcgcagtgctctgcgtcgcgctgatgctgcacgccgcggcgacggcggcggcggccaggaccgtgcctatgccgggcgcctcctcgacgtccaccggcagcaccgcgtcgctcccggccgcggccggcaccaagaacgacgactctggctcgggcggcgccggcgtggcggacaagaagaacctcttcgtgggcgtgggaggcatgggcgacctcccgggcttcccggccgtgggcggcgggtacggcggcggcttcggcaacaacggcgggggcgtcttcagcggcgtcacgggcccgctgggcggcgtcgggggcggcgtcggaggcgtcggcccgctgggcggcgtcggcgggttcgggcccctcggcggcggtggcggcggtatcccgtttggcggcttcgctggcggcggcacccccttcggcggctacggcggcgggggcgctggcgctggcggcgtcacgccttgagctggccctgggctgcgggaggtgcctggtctagtagatgcatgcgtgtgttgcgcgtggtacgtgggtatggcacgtaacaataatttatatcgtacgtgtagagttcgtttcgctgtagcgctgtctgtgcaagtgtgcagcatgtctggccgtgtgttcgtcacgttagggcttgtgtgtgtgtttgaggtccgagtccgggtagttcttagcagtgtgcttgtgtgggggatccagttaatgtgtgctcatgtaccagccgcttagctgcaactgcaagtaatagttaaatgtggtgtgtatttaatctgtgctca

SEQ ID NO: 96396 - DNA, 201 bp, Zea Mays
atgcacctcttgtctgttcctcttcctccatgcaatgcaagtatgcaacgcaacgcatcttctgtttgctagccgccgctcccaacacgtcgctatcgccggcctcttcgggttcggaagcttccacgcctcggcatgcgcgctcccgacgtcatgctcgtcccggcgatcgtcctgacttgccggttcctctgcaggatt

SEQ ID NO: 96397 - DNA, 2729 bp, Zea Mays
ctgcctgccccacccccaccccaacgcaacggtctggtcttaaacactcagacccagacgccacatcaactcccacgacacctccccgaaaaagtctcttgcccgcgcacgcgcacgtctccccaaacggctacttgaacttgaccgactccccgagctctcccctgcccctccaccgtagctcgcgaaccgccgcgccatgccgcccaagcgcgcgtgccgcctggcgctgctggccgcggcggcggcgtacctcctcttcctcctcctcttcgagctgccctccttctccgtctccaccgcgtctccccgcctcgcccaggccgccacgcgccgcgagctcctccgcgcctcctccgcgcgctccccgctccgcccccgcaccagcgccccgctcgccgtctcctccgtccgcgtccaccgccgcgccaccagctcctcctcctccgcctccgccgccgccgccatatcatccatcgacgcctcggccgccgccgccttcgccgccgcggcgccgcacctcgcgcgcctcctctccgcccccgctcccccgtcctccgccccttcgccgtccccgaccgcggccgcctcggcctcctgccccgcgacggtctcggcgccgagggaccagctcgcgagcggcgcgggagtcgcggtggacctgccgtgcgggatggcggtggggtcgcgcctcacagtggtggcgcggccgcgcgccgcgcgcccggaggtcgcgggagcgggggacggggccgcgccgccggtcatggtgtcgcagttcatgctcgagctccttggcaccaaggcggtgcagggggaggagccgcccaggatactccacttcaaccccaggatccgcggggacttcagcgcccgccccgtcatcgagctcaacacttgctaccggatgcagtgggcgcagccgcagcggtgcgaggggtggcagtcacgcccggacgacgacactgttgatggggaactgaagtgtgacgaatggattcgtgatggtaacaacgagacacaagaatcacggatgaaacggtggctgaaccgtttgattggtaggccgaaagtcaatcggccatacccatttgcggagggcaagcgatttgttttggtcataacagctggtttggagggctaccatgtcaatgttgatggccggcatgtcacgtcattcccttaccgcaccggctacaatcttgaggatgcgacacaattgtctttgaaaggagacattgatgtcgagtccgttttggctggttcattgcccacttcacctcctacttctgcaacaagaagttaccttgagatgtctaaacagtggaaggcctcacccttgccaactgaacctgttgaactttttattgggatcctgtcatctgctaaccatttcgccgagcgtatggcagttcggaaatcatggatgatttctaccaggagatcatctgatgttgttgcgcgcttctttgttgctctgaatggaagaaacgaggtcaatgaagagctgaagaaggaagcagattactttggggacattgttatagttccattcatggataactatgaccttgttattctaaaaactatcgccatcgttgagtatggggtgatggttgttcctgcaaagcacataatgaaatgtgacgatgatacgtttgtcagaattgaatctgtattggatcaagtaaacaaggtcccacgtggaaagagcatttatatgggaaatataaactactaccacagacccttaagatctgggaaatggtctgtcacatatgaggaatggccagacgaagtgtatcctccttatgctaatgggcctggctatgtcatttcatcggatattgctcaatatattttatccgagtttgataataagacattaagattattcaagatggaagatgttagtatgggcacgtgggttgagaagttccatacgactcgtcagcctgtagagtatttgcatgatgtcaggttctaccaacctggttgctttgatggttatttcaccgcacactaccagtcaccacaacacatgatctgtctgtggagaaagttgcaagctgggagcgctcaatgctgcaacgtaagatgacagtggacagcaccgggataagtataacggagaactcactaatcatcgagacataacacagaggatactgcacttgtactgtctgctggaccttgcgaccattcgttcattctttggtcagtagttgattcagctgctgatgctaacactggagatccatgttcttagggtactgtctatcatatttacaagagaaattcattgttttcgttcatctgagtcctgagtcttgacccttggagcatctgagttctgagtcttattatcaaactcggataaaatatattgagcaatatattttatgctaatgagtactgtctctgtacaagtgataggccatctgagttgagtcttgacccttggagaacatggctgttgaaatgttacatgaaaagtcttcagcgaccgggtgcatcgcgaagtcgtcgtagcttgtcgacggcagaaaactcaaatcgttattcagcagtgaatctgacttttattctaaccatcatatatccaccgactattctcatccatatttgaggctatagagtaaagcaatatacaataatgagtgttttatattgtccatagataatgatatattctaaactcactcaagagtaggggtggtgaaggactc

SEQ ID NO: 96398 - DNA, 1772 bp, Zea Mays
gtgggcttgagcgcgtgctgttgctgaaaggcccaagcgaacaagcaaaagggagggacagcccacgcggatcggtgtgcgtggctccgcgctcccttccgccgccagtccgccggctcaactccagccgccgcgtgcccctcctctccccacccgatgcgggccctcgcgcgcgccgcgtcgctgctccgccgcgccgcggggtccgcgcctactacggcgtcgctgtaccatccgccgcggaacgtaggcccttgcctcgtgaagaatctgccaggtttctttttcaatgggtattctactcttttggctccaccaaatgaagtgttgattccaccagaactcctttctagcaggactgtgtggacaccagatcgggagcttgggcagtatgaagacctggtagctagggtcacaaacttccataatgaggacaagggcttcatggttttggatggcgatgtttttgatgttccaattaggaaggacattgttcaccgagtagtaaggtggcagcttgctaaaagacagcaggggacacactcaactaaaactatcagtgaagttagtggcactggaagaaagccttacccgcaaaaaggaaccggaaaagcacgacatggaacactgcgcggtgcccagtttcgtggtggtgcaaccatgcatgggcctaaacctcgaagccatgcaatcaagctgcagaagaaagtacggcggctggggcttaagattgccttgtctgctcgaactgctgaggggaagctcttgatctttgaggacttggaagttcctagccacaagacgaaaaacattgtgcaatacattagacagatggatgactcaaagaaggttctgttggtggatggaggcgacattgataagaagctaaagctggccactcaaaaccttcactacgttaacgtacttccttccattggcctcaacgtctacagtatcctccagcatgacacccttgtaatgactcgggccgctatcaacagaatcgtcgagcggatgcatacccccatcaaccgctagcaaggagggtttctgagtcgcaccactgcttcttacagccagcaacctgtgctttttcgttccctgttaaagctcgaaggtttcctgttatcttggtgctaacatggagctgcaacgtgagctgtttattttctgtcagactggaggtaccgaccgaggtaggagggaaatgttgtggccttttgtaagcaggtcattggatgtttattttagattattttttggcgttttacccacactacccttgaaacttagtgagttcttatccagcaaataagattatgtaatcctggattatataggtccaaagcttgggacagcaatttgtttagagtcctgtataatctagctgtcacgtcgcaggactcacgtggagaaagatgaagggatttgcatcgtttagggtttagtaagtggcagcggattctgtatttacttggatttggtccattttcatagaagttggctgaaaacgaaaggtttggttggcagaagccaattctaagagacataagctaaaacaaataggcccatcatccatattaaataagctagattgtatatttttagaagcaaacaaataggccctattttaatctaaaattttactgtctacgctgtaaatctcgccgcaccttgatttcggtccgtccgtcgcagccgaagtatgaatttgatgttttttaaggtccaaacaagcacaacaactctattttgtcacgccaacaaaaaaa

SEQ ID NO: 96399 - DNA, 8784 bp, Zea Mays
cccccctgcccgtggcctccgccccaattccagcgggacagcctcgatgagccgccaggatcgtcaccagtggcctcgccctaaccacggatacgaccctcgcgccgccgccgccgccgcgcaatggtatggcgccgcttcgatgctgtttcccgaccccggcgcggcggcgctgcacgggataaacccctacggcttcgcccctaaccctttcttcaataacttcctcccccagaactccgctgccctagctgcctaccaactgcagcagcagcaggctcatcacttcgcctcccatgcctaccaccaagcccctaccggtaacaccatgcaccgctctaccaaacccgccgccgctgccaaacctgcgccgccaccgggcaaccagcaggccgtgctggaccgggctcaagaggcggcgaggaaggctcgggaggagctcgtgaagggtggggacggcgtcacggcgtggaaggtggcgcaggcggtgctggtggcgctcaaggctgattcgtgggactccctcggcgtccagccccaggatgtgcctctcctgcgggatctcttcctaatcgagggcaaggtgaacgcattcatccattgctatgttgcagcaagaaaaattgtaacggtttatgatctggaggttgagatatgcaagaatgagggggttgtgcaatttgaagagctgggattgggacctttccttcagcacccgcttgttgcacattattttttagtgccagctgatttgtctgtggtgcctaagctttgtagcgaggaaattatcaataccctgctgaaatttgtggacaaatctaagaaaaaaatcacaattgaagattttttgaaccatcttgcagagaaaaaatcagtctctgggaaggaaaaacttggtgtgcgggtacaaagcttgggaaaggccattccattttttactaatttagggaggttttgtaggttgcatatttccttactacgacaggccaagcaaacagaagtgtctgctgcgaagcttcgagcaaatatgagtggatctggtaatagtagtcaggagaaggatttgttgaaaaatgcaagtttccatactcacaagaaggctttggacaagaggttcatttctttaactaatcgtataaaagagttaccaggcatcaataagcatatccattttgattcgaccgatgatgaaactaatagttgtactggttctgaggatggtaaatctgatggcaatgagaatgagaatgaatgttctattcttgacaaaaaggatggtgataagcgtgtgaatagctgcccatatccgtcaaaaactgaagaactggaaaggcttggtttgaaatctgaaattaataaaaggcaatctttagagaatagcaagccaagagacagtgggaaaaaggggaaagttttggaaatgttagcaaattactatgggagaacgatatcagggaagaggagaattagaaatttcttctcacagtacccaggcattggccttctcaatgttgctgttaaatcaatgggatgtggtctgctggatagcatttacgatgtgatacagcttgctgatgagaatgatgtagcttcaagccctcctcctaacaccaccactgaagttatggaaattgagcctccaagtgttgctattgatgatgtcatcaggaggatttcagaatatattgaatccaacagtaaaatctctggtgatgtggctttgcaagtgagggcacttaatgattgtgaaacatgggtaactactcaattttcagcaaatcaattcagtgctcttggccatgggacattccttgagtttttggacaaacattgtcaccagttccgaactgctttgagtagtttctttaaggagggtccttctaattcttcatctctggaagtttctgtactgcagcagcaaattgaatttttactctgtcaagctgagagtaattggctggaagatagtgacttttcagaggatagttttgttatgcttcttaaaaagcaatttccaacaataagctttaatattgtgcaagacaaatctgatggtggagtttctggctttattgaggggcagaagaaagacatacggacatatagtttaaaattttccatctctttgttggagaaacgatggtctggaactttgccaagtagacatgggaatgttgatgaactggggaacattgtcgctgaacaatcttgttaccataccacagtttgctcacgagaggcaattaattgtttactgagggctcctatgctgtctgatctgcatctttggtcccattgggattcgctatttgctcctacactgggctcctttgtacattggttgctgaatactggtccaattcaagagctcgcatgcattgcgaccacagatggtaggtttattagagtagattcatcagccacagttgaccagtttctggaagctattatccatcgatcaccacttcaagtggcagtgaaactgctttcacttctatacatttacaatggttctatgaacaccccaatgtcattgctaaaatgttatgcacagcgagcaataaagctcatagtagataacaacaatgatttgatgaatgctaaatctgaaaacaaaatatttatgcctgatgagccccaaaacctaagtagtgaaagctctacttgttttgctgatcagtgtcaagaaagctctcaggcgtctcctggaaggttgatcaggtctgatagcttgccaaacattaataacactgttcatttgatcacaaaatttgtacttgattgtcttgatcatctaccttcagaattccgtagtcttgcagcagacatactattggcaggatttcgggttgttactaagaactggcatgcagttatgttgcatgaagccactgaaaacgggcagctttgcatgcttcatgatattggtttgtcacttggagttgtagaatgggttgaagattgccataggttgtgtttaactgatgaagttcatgtgcagacagaaatgcattcttctgccaagcttgcaacacctgcctctgtgggagccacccatgaagattctaacatgcatatttctagtgatgttaatatgatggataagagaaaacaattgtttcctgtcataaatgatcgggctggtatagataaggaagacaataagatgttaaatcctgctggaactgaggcagatgttgcagaactacatactaccagcagatcttctatgatggaagaaacaagtcttgaggaagcatctcttgttattgagactatacgccgtgaagagtttggtctggatcaggcactaagtgacactgagaatagcttgttaaagaagcagcatgctcgacttggcagagcattgcattgcctttcacaagaattatattcccaggattctcatctacttcttgagctggtacagaatgctgacgacaatacatatcctgaggatgttgaagcaacattagcattcattctccaagaggatggtattgctgttctaaacaatgagaggggcttctctgctgagaacattagagcactctgtgatattggtaactcgacaaagaaaggatcaaaccagggttatattggaaataaaggcattggatttaaatcagttttccgggtaactgatgctccggagatccattcaaatggtttccatgtgaaatttgatatcacagatggccagattggttttgtgttgccaactgcagttccaccttacagtaccacttcttttagtagaatgttatccgttgaagatgacaaggatgcccattcattgtggaacacttgcattttacttcccttcagatcaaaatttagggagtgcactgatctgcacccatctctactgctgttccttcatcgactaaaatgtatcaagtttaagaatttgtttgatgacacacttctgattatgagaagggagattcttggtgatggtattgtgagaatctcgcatgggattgagacaatgagttggttggtggtcagtaagaggctacaaggtaccattgtgcggcatgatgtgtgcaccacagagatagctgtggcgtttactttgcagcagactgaggaaggagattatgaaccttatttgaagcagcaacctgtgtttgcttttcttcctctaaggaattacggtcttaaattcattcttcaaggagattttgttttaccatcttccagagaggaagtggatgcggatagtgcatggaatcagtggttgttgtctgaattcccttctttgtttgtaagtgcccaagaatctttttgtgctcttccctgttttcagaggtgccctggaaaagctgtcacagccttcttgagttttattcctctagcaggagaggttcatggattcttcagccagcttccacacttgatcctttccaagttgcgtctgacccgctgcatgtttttggatggctctactgtgcaatgggtctatccatgcaacacacttaggggttgggatgaacaaactaaaatgttattttcagaaggcttacttcatgaacatcttggtcttggttacctctcaaaaaatattgttatatctgataagttatcaagagccctaggtattcatgactatggaccaaacattttgctagatgccatctcatctatttgccgaattgatggttgtattgagtcattgggcctggaatggctttgtgcttggtttgttaacctttatctgacattgctgtctcattcttctcaaaatgtttcctcagcaagaaacctcgaagacattcttttggataaagttaggaaaataccatgcatcccactttcagatggttcatttacctctatttcagatggtcgtatatggttgccatatgatgttgccagttccattcctgaatgcagtagcattccgaattttccagctctatatggtaatcttcgaactgtaagtccaaaccttctctctgcatgctgcaaaaataaatacctcatggaggaagtcagaataaatgatctggcagacatgctccaaaggatcggggtgcggaagttgtctgggcatgacattgttaaaaatcacatcatggtgtccttgcgtaacggtttagatgctaatgtggctgatatagtgattagagagtatgtgagctttattatggttcatcttcagtcttcttgcaccagctgtaactttgaaagaggagagatagtgtcagaactacggaagagtcctatcttccttacaaaccatggatacaagagcccagctgatgaaccaattcacttcagtaaagattatggaaattccgtggatgttactagactgcttcagaatgtagaaataagttggattgaacttgatagtagctatttgcagcatcatggttcacagtcgtcatcatttgcacgggaaaaatggaggcaattttttgaagaaatgggtgtgactgattttgtgcaggtagtgaaagttgaaaaaactttatcccaagttgattctattctagcaggaggactttctctagctgatgtatctacaaaacaatgtacagtgtatgactgggagtcaccagaattatctagaattttatcaatattttcttcaaaaagatgcaaggaaaattgtgtatatcttctggaagttcttgatagattctgggatgatcattatagtgcaaaatctaggatcttcacagatgctacacattgtggtgaaaacagagcagttgaatcatcatttatgaagtgcattcaaagcttcaaatggatagcatcaagaatggatgaggatcttcattatgcaacagatttattctatgattgtgaaaatgtccgctctctttttggtagtgtggctccatatgctgtaccgcaggtatctagcagttcacttaagaaggccattggattcaaaacagaggtatcttactgtgatgcattgatggtcctgaagtcttggataacgtcaaaggttccctttagagcaagtatgagccagatgtgcaaattctataccttcttgtctgaaggcgtggcagacgcaaagattgacattaaacgggagttcatgtcgtctccttctatatttacaccactacagcgtcctcgggcaagtgaggttattcctggaaggtttttggcgccagaagacctctattggcatgacccaacaggatgttctgaaataacagaggatttcgttgcaacgaaaaacagaagtatgttcccaagaaaaatgctgtctgcagcctatccaaacctttatgaattatttactctgacatgcggtgtaccaaaggccccaacaacatcaaattatgttgagatgctgctacggttgtcaaccattgcattgccttcacaggcaggaaaccatgtcttttgtgtatttgtgagatgggccaagtgtatgcattctgaaagtgacaagatgaatgatatattgtacttgaaagaatcccttcagaaattagaaacaacaatattgcccacctcagccgataaatgggtctctctacatccttcttttggccttgtttgctgggtagatgatgatgagctaaagcaacagtttgttaactctaatgatgtttacttcatacaatttggcgacctttcttctgaggataagcaaatgttgtatggaagagttgctgctttaatgaaaagcttaggcatccaagcactttcaaaggttgtgtatcgtgaagcaatattttatggtacatcagagaacagagaaaaggtttccttgatttgttggctgttgccatacatgcaacgttacatctataagatgcatagagatacttatatcaacttccagaaaaacgacatcatgaagattagcaacctgcaagtagtagttgttgacaagttattccacaagtatgtactgaggggactcgagagttcttctaagaaaagattccaatgtcattgtcttttgcagggagatactctatatgcaacacaagaggctgactcacattcagtatttttggagctttctagaattttctttgatggatcccatgatcttcattttgcaaattttctacacatgatcaaaaccatggccgaatctggcactcatgctgagcaaatagagacttttatcgttaataatcagaatgtgcctgagttacctgagcatgaagctatctggtccttctcttccttgtctgcagccaaacatggttcagcgaaccaaggtggtgctgatacccagggggttgatttccaacctgtccatgaatttagtattcccaatcatcagaaggcacaggtgatggtttctagttggcctctaaactattggagaacagcacccgtcttcagaacacctctcataaaccagcatgcaagcatgcaagaggcaaaggtgaatgatgctggaccttcatcaaacttaaacatgcctgctatgtatggacacaccgaagatagtttgctttctgctgatcttgaaagggattggattatagaagagaatccaagaactgaaactacattgtttggagatagttcatcggaaatccttgatgagcctcagatggtgatgtctgctgaacctttccatgcacctgcttatttgaacttggaggctggaaattcaagcccaacggttcatgtcgagctaacaaattccgatgagaaactggccaatcttgcagaagacaagaatcagcgactttcagatgcaaaccagttaagaacagggaggcttggtgaagaactggtcgagaaatatttggccaaacagctaggttccaacaatgttaggtgggtgaacaacagaattgaaaccggactgccttatgatattgttataacacacccagagggtttcacagagtatgtggaggttaaaacaactgtatcttcaagaaaagattggtttgacgtctcagcaagggaatggcagtttgccttggagaaaggggattcatttagcattgctcgtgtcatcttaggtacaaagaaagcaagtatagaaatgttgaaaaacccacacaagctttgtaagcagaaagcattgcggcttgctctcctgatatccagatcggcagcaacctagactaaaatgtcggttttgttgaggctagcaccgatcatccttctgcagattgttatgattactctgactaataatcaacatgaactggagtgagcatctgcatcttgataggtatttgctgatccaagttagcagattcttctttttggagagagatggggtaccgggtacggcatgagtgcaagacaacatacagttgagccgctctatagtaggctcctctttctattattctaactcgggtaatcttctccaatggcggctctctaccatgtctcttgttacatacaacttacgctctgcctttgtaacccattctggtattttgttgcataatgtatgtgattttgtcattagatttgtttttcaatttctgccctagacatcgtcccataggttgattgtgtaactaaacatgaaactgtacataaatggatggaatttgattttaccatgtacatgaaatttgattttgcgtgcggcggctgcctggtctgtgcgttctggtctctgtgcgcagggcgcggcatctgcccggcagcctgctcgccggctgctcggtgagaaaattggctagttgggtactggttttttttttcaattgataaaaaaacaggatctgatggagccttttcatttttgttttactttccgtctcttttatcagcagttgaaaggcgatcacttattctcaatttggtggaatc

SEQ ID NO: 96400 - DNA, 2844 bp, Zea Mays
gcccccttccccttcctgtccacgtggcatcggcccgccctccctacgccgcccgcgcccgcaagacggggcccagggctctatgccatgcgccgaacgcacgcggccttcttgcgccacgatcacgcaaaatgttacatttccgcacggctttttaaaatcagggaaggcccagattacgttctataggagggaatttcccgtccaatttattaacatatcgggctccggctcggccacttcgtttgcaccccccgctcggccgcctccaccgctgcctcgctccctccgcgcccaccacggagagcacgcgcggcgtgcagcttccctcgcgcgcctcgccttcccgctgctctgtccgttcacctgcgctcctcctcctagggttaggtcacgcgtcgccgtgggccgcggcgcccggcgcaatgcgaaggccgtcgggggccggcgcgccgtgccgcagccgcgcgatccaggtgctcgtggcggtctccttcgcctacgcgctcgccgtgctgctcctcgagtcgccgttcgtgtccacgtccctgctcggggcgggggcgtccgccgcggcttcgcggaagctccacctcgccggcgcgtgggagggcgtgaggcgcgccgtgccggcgcgccccgccaaacacccgcacagggagaccctctcgtcggacgcggggcgaggacgggcgcgccggttggcagggatcgtctctggcctcgagctctgccacctcaactccacccgctccggctcgctacgcaaggtcgccgccgaggctgccgagtcaggggcccgcgtgttctccgacctggaggctctagcgacggccctggcgtcctcgcgtgattcgtcaggggaggaagagaagagcaagtgccctcactcgatcgtcctcagcggcgacgagttccgggagagggggcgggcggtggagctgccgtgcggcctgacgctgggttcgtatatcacggtcgtcgcgacaccgcacgaggcgcaccctgagcgggatcctaagatcacgctgctcagggagggtgaagagccgatcatggtgtcgcagttcatgatggagctgcaggggctcaagacggtggacggcgaggatccgcccaggattctccacttcaacccgcgcctccgcggcgactggagcggcaagccggtgatcgagcagaacacctgctatcgcatgcagtggggcactccgctccgctgcgaaggctggaggtcacgtgccgacgaggagactgtggatgggttggtgaagtgtgagaagtggattcgggatgatgaagggcggtcggaggagtcaaaaacgtcatggtggctgaaccggcttattggccgcacaaagacagtctccgttgattggtcatacccattcgtcgaggaccgcctgtttgttctcactctcactgctgggttcgagggttaccatgtgaatgttgatggacggcatgtgacatcatttccataccgcactggatttgttcttgaggatgctactggcttatcattggatggggaccttgatgtgcaatcagtgtttgcggggactctgcccaccacacatcctagcttttctccacagaaacacctagagatgttacccagttggcaggctcctccccttccagacgaaccagttgagattttcatcggtatcctgtcagcaggcaaccattttgctgagcgaatggctgtgagaaagacatggatgtctgctgctcagaagttgccgaatgttgtggcccggttttttgttgccctgcatggcaggaacgagattaatgcagagctgaaaaaggaggctgagtttttcggggacattgttattgtgccattcatggatagctatgatttggttgttctcaagacaattgccatatgcgagtatggggtccatgttgtatatgctagatacataatgaagtgtgatgatgatacttttgttagacttgattcagtaattgctgaagtgaagaaaatccagaacggtgaaagtctctatatagggaacatgaattatcgtcataagccattgcgtgatggtaaatgggctgttacttatgaggaatggccagaagaggattatcccatctatgcaaatggtcctggatatgttatatcctctgatattgcagactccattctatcagaatttttaaaccttaaattaaggcttttcaaaatggaggatgtcagcatgggcatgtgggtcgagcggttcaacagcaccagacttgttaaatacgtccacagcgtcaaattttgtcaatttggatgcatagatgattattacactgcacactaccaatcaccgaggcagatgttgtgtttgtgggacaagctgcaggctggaaaagctcaatgttgcaatatgagatagcaacattggaggtggtggtactggtaggcgtttctgtggtggtagtgcctatccttattcatgaaggagaacctagaagccttgaaaataaattaaaccctcgagatgactaacaaattgccatttaacggatttttttggtatagctgaacaggcggtgtttcagctggaaatggaaacagggggaatgggcagcggcctgtaacgactttctgattgagcttgcggcgctcttctttctcgacgtatagacggagttctgtgagcagtatggaacctgcttgggtcttgatttgtaaatgggacgggtagaaagcttagtcaaataactattgcttttggcacttatggctgtggttgcatttataggcaacccagttgtacagatggtagtgtacaagaattttgctgtgctcttaacatggtcataagttatggtttgattagc

SEQ ID NO: 96401 - DNA, 669 bp, Zea Mays
atgcatgcgctgccgcggccggccgttaagccatcagcacagcaggaccgcgacggagacgagcagcgccgacacgacgtagaagaagaccgtgccgggctgcctcccggcgccgtccgccgtcggcgccgcgctcgtgctcttcccggtcgccgcggcggcgccggttgcagcggcaggaatggtggtgccgttgttgctctcgtgcttcttcgcgtactccttgaagatctccgcctcgggggcgtcgggcgacatgcccaggatcttggggcagtcggagaaggtggcggggttgctgcagagcgagggcaggtccatggcgcgggtgacgttgatcttgaaccccagcgccggctcgtcgcggtccttgaccagcacgcacatgcacagcttgctggcggccaccacctgcttcagccccgcgcagcagtcgggcgtcggcgcgcgcgccgtcgccttgtcctgcacgaacgtcaggcacgtcgccagccccatcagccggtccgcgcacatggcgcggtcctgggcgaagtccgcgcgggccacgccggcccacgacaccgccagcaccgccgccaccatcaccagcgccgtcgccgccgccgctgccacgccgccgcgcgcgaaggaggccgccatggcgtcggtcgtcgtcctctgtgctag

SEQ ID NO: 96402 - DNA, 2355 bp, Zea Mays
atctccataagatttggctggtttttacgttggtttgctggacctaacacaaccctcctcctttaccgggcttgggaccggctatgttgaaacgactcaaggaagtcttccaatcaacataggcggagttaccaagtttatatagaaaagtatcaatatttatggtaccaaataagtaacattaggttgttcattgaatatattttaatattatgggtgtgtttgattcagctgcgagctgtgaaaaagctgatgaaccgcaaagagtcttgcataatgtgcccagagtgcatccaccacaatcaggtgggaaaataaagaaatcaactaaaaacctttgtcaatatagcgatgagtccttaaatggttcaggaagtttggattgttgtcatcaaggccagtcaggaaggcgaaaaaatcaggattacaccactgaccctggaaggaacgatttacctattgctgctcatggaccacaagttgttctcttaggatcagaccgcaggtataatagctattggctcttccttggtccttgtagggaagatgatccagggcatcgtagggtctacttcgagtcctcagaggatggtcactgggaggtgattgattcaccacaggaattactttccttgctatctatcctcgatagcaggggcactagggaagcacatctccttacatcgatggagaagagacaagcctgcctttttgaagccatgaaaaaacatgtggaaggagggaaggcagccaggcttccagcctcatctgattcatactgctcccagacaagtagtggagatggaacttcgcccaagacaagtagtgtggatggagcttcatctgtatcagacattgagaacacttctgttcctacaagcctcaaagatagtaatttggattcatcgtctgccgtagtaattgaaagtgggaggggaggtgatgagaaaatatctatgtgggaacggctgcaagcatttgataaatggatctggacttctttttactccatccttactgctgttaaaagtggcaagaagtcatttaaggagtcactacttcgttgtggaagttgtcatgatctatattggagagatgaaaagcactgcagaatatgccattcaactttcgaggttggttttgatcttgaagaaaaatatgctgtacatgtggcgacgtgcagggagcctgaactttcacatgaggtaccaaatcataaatttctgccatcacagctacaggcacttaaagcagccattcatgctattgaggcctctatgcctgaggcagcttttactggttcttggatgaagtctgctcacaagctgtgggttaagcggctgcgacgaacgtcatcattgccagagcttttgcaggttcttgtcgattttgtaggggcaatggatgttgattggttgtacaaaagttcatctgcgagattgagaacaaatctggatgacatcattgtcgactttcagacaatgccacaaacaacatcagcagttgcactttgggttgtccaattggatgccctcattgcgccttatttggataatgccatggcaagacagctggtgaatgctaggtagcttacaaagatggattcttttgcgtgatgcacaagcaccccgagctgacttctttttctggcaccatctgcaagttttttcttgatgaaagcttttcatctaggtgagacagaacatggggtctgctttgagttcgagaacaagatcttgcgacttgctgtaaagcatggaatatattgttccctcccagcagagcattgcgtcatagacaatgaaaaagttttgttaataatcgttgcttcagatatgtgaaagttttggctttccatgtagcgacacaattgggatgtaagcaatttctgaaacagaccgctgtttgcaggtggtgctgtttgggacttgattaccagctgtgcccttagttttaacggaggggtggttataattttgttccttctatatctgtatgtgctaagttgctcctagtccgtgagagctttctacattaggctatttttgtatgttatgtaaccagtttctattagagtgcagttgtagacatttagaacatgtacaccaatattgtgactgtttgaacaagtgagggaggcatagaagacttcatacggatgaattcatgattagaataaaattgcaccaaaaatcaattttgaaccgttacctttttggtatctcgtatatgttttttttttgtctatgtagtgctagttgataaatttcggatagatgtaaataggaaactgaaactctattcggatagatgtaaatagaaaaatgaaactctatttgtttaaaataagttaga

SEQ ID NO: 96403 - DNA, 2187 bp, Zea Mays
atctccataagatttggctggtttttacgttggtttgctggacctaacacaaccctcctcctttaccgggcttgggaccggctatgttgaaacgactcaaggaagtcttccaatcaacataggcggagttaccaagtttatatagaaaagtatcaatatttatggtaccaaataagtaacattaggttgttcattgaatatattttaatattatgggtgtgtttgattcagctgcgagctgtgaaaaagctgatgaaccgcaaagagtcttgcataatgtgcccagagtgcatccaccacaatcaggtgggaaaataaagaaatcaactaaaaacctttgtcaatatagcgatgagtccttaaatggttcaggaagtttggattgttgtcatcaaggccagtcaggaaggcgaaaaaatcaggattacaccactgaccctggaaggaacgatttacctattgctgctcatggaccacaagttgttctcttaggatcagaccgcaggtataatagctattggctcttccttggtccttgtagggaagatgatccagggcatcgtagggtctacttcgagtcctcagaggatggtcactgggaggtgattgattcaccacaggaattactttccttgctatctatcctcgatagcaggggcactagggaagcacatctccttacatcgatggagaagagacaagcctgcctttttgaagccatgaaaaaacatgtggaaggagggaaggcagccaggcttccagcctcatctgattcatactgctcccagacaagtagtggagatggaacttcgcccaagacaagtagtgtggatggagcttcatctgtatcagacattgagaacacttctgttcctacaagcctcaaagatagtaatttggattcatcgtctgccgtagtaattgaaagtgggaggggaggtgatgagaaaatatctatgtgggaacggctgcaagcatttgataaatggatctggacttctttttactccatccttactgctgttaaaagtggcaagaagtcatttaaggagtcactacttcgttgtggaagttgtcatgatctatattggagagatgaaaagcactgcagaatatgccattcaactttcgaggttggttttgatcttgaagaaaaatatgctgtacatgtggcgacgtgcagggagcctgaactttcacatgaggtaccaaatcataaatttctgccatcacagctacaggcacttaaagcagccattcatgctattgaggcctctatgcctgaggcagcttttactggttcttggatgaagtctgctcacaagctgtgggttaagcggctgcgacgaacgtcatcattgccagagcttttgcaggttcttgtcgattttgtaggggcaatggatgttgattggttgtacaaaagttcatctgcgagattgagaacaaatctggatgacatcattgtcgactttcagacaatgccacaaacaacatcagcagttgcactttgggttgtccaattggatgccctcattgcgccttatttggataatgccatggcaagtatgtttttgttcacaatcgcaatgtctaatgacagctggtgaatgctaggtagcttacaaagatggattcttttgcgtgatgcacaagcaccccgagctgacttctttttctggcaccatctgcaagttttttcttgatgaaagcttttcatctaggtgagacagaacatggggtctgctttgagttcgagaacaagatcttgcgacttgctgtaaagcatggaatatattgttccctcccagcagagcattgcgtcatagacaatgaaaaagttttgttaataatcgttgcttcagatatgtgaaagttttggctttccatgtagcgacacaattgggatgtaagcaatttctgaaacagaccgctgtttgcaggtggtgctgtttgggacttgattaccagctgtgcccttagttttaacggaggggtggttataattttgttccttctatatctgtatgtgctaagttgctcctagtccgtgagagctttctacattaggctatttttgtatgttatgtaaccagtttctattagagtgcagttgtagacatttagaacatgtacaccaatattgtgactgtttgaacaagtgagggaggcatagaagacttcata

SEQ ID NO: 96404 - DNA, 1960 bp, Zea Mays
cttgccaatttctgggagcgaaaatctggcactcgaatgccgaacgcacaagcgtgttttcttttcctcaaacaataagcgagcgcaacaacgaaaccgaaactaccacggatcaagaagaaagaaagtccccgagacccagagccgcggtccagagcgggcggcggccggcaacaacgaaacgggccaacgccaccacctccacctcgtcctcctcggcacctcccccgtcgcgtccagcgttccaggtccagctccccccgcgatcccgacgaccccgtccgcctcggcctgcgcctccccgctacaagggtccgcccgcgggcgccgcggtaccagcgagcccctcctcctccacactctgcggcgcggagatcctgtccctgtgccccggaccgagaggagccagacgccggcgtctggaattcggacatggaagcggcggcggcggtcgtaggcttcggcgctggcgcgggcctgaccaggtggcaggcggcggcgctgtcggcggtggccggctgggtgtgggcggcctccttctacgacctcacgcgccgggcgcgcgcgctcgtccagccgtgggtcacgcgccgggtgcacgccgagacggcggccattctcaggttccagaggctggagcacaagttgctggacaatatcttctctgtgctgtcatgcgttgtctccgtgcccttctacacgggattcctccctctcctcttctggagtggacacggcaggctggctaggcagatgaccctcctcatggctttctgtgactacctcggcaactctgtcaaggatatagtgtcagccgctcggccgtgctctcctcctgtaagacgagtgacggctacagaagacgagaaggaaaatgccatggaatatgggcttccatcatcgcatgctctcaataccgtttgtttgacgggatatttactacactacatcctcacgtttggagaacatggtagtgttacagttgctgcgggtttatctctagctttcttgcttgtcatgctagttggcatcgcgaggatatatctgggtatgcacagcttgaccgacgttgttgctggaattggttttggcgtcgtcatccttgcgttctggttggctgttcatgaccgtgtcgatgccttcgttgtctccggggaaaatgttgcgaccttctgggcaggcctttctctgttgctgtgctttgcgtacccgaagccggagttccctactcctagcttcgaataccacacagcattcaacggggttgctttcggaatcgtgtacggcatccagcaaacatacttccacttccacacccctgacgccccggtcgtcttcagcgccgagctgcccctgctcacgttcgccgggcgcgtcctcgtcgggatcccgaccatcctggccgtgaaattctgcagcaaggcgctgtccaagtggctgctgcccgtggtgtgcagcaccctgggcatccccaccgtgtcgtcctgctacgtcccggccctgagagccgacagcggcagcggcagcggcaagaacaggcagggccccgggcacctgcagcggctgctgttctcccacttcccccggaaggcgtacgacgtggacacgggcatcaggttcgtccagtacgccagcctcgcgtggtccgtggttgacttggtaccggccatgttcgcccatctgaatctgtagccagctgcgtagaatttctgcttctcttttcgatgagctcccaatgcggccccctcctgctcgtaagacatggatcagcttacgaggctgtaaatccgattgtctggctggctggcttctccttctcgtatcgtatgtacctagctgttctcaccaggggtgttgtttctatgcaagtttgtgtgtgtagtaagtagcaaccagtagtattgattgatgatggatagctgagacattcttgacgtcaaagggatgccttttcttgcct

SEQ ID NO: 96405 - DNA, 2710 bp, Zea Mays
gcccgagcctgcgactgctcggcttccgcgcggcgcgcacagaaacggacgctacaggggggcagcagcgcaggcggcagtccggctgcagagcgagaaacccgcaagaggcgatcgctagccgcgagcgcgggcggccaccatggcggcgagcgcgagggggagcgtgtgggagatccagccgcgcgacgtggaggccgcggggctcgccgcagccgacgcggccgcgttccacgccgcgctccgctccgccgcgggctcggcagccgcctccggggacgccgtgtgggcggccgtggccgcggcgggggtgctgcggccggagcacccgcacgcgctccaccagctcgtctactactccgcctacgccgggtgggaccgcgccgcccggggcccgccgccgtactggttcccgtcaccaactgactgtaagcaaacgaacctggggagattgatggaagtaaatggaccaaagctgttaggatcatcatacagggatcctatatcaagttttaaccacttttacaggttttccgtagagaaccaagaggtctactggtcaatggtgctaaagcaactcgcagtcaagtttaaacaagaaccaatgtcaattctaagtacgtcagatagatcaaagaaaggggggacatggcttcaaggtgcagtgctcaacatcgctgagtgctgtctgttgccttgtccttccctgaagaggacagatgacagtacagctatcatttggagggatgaaggccttgatgattatccagtgaaccgaatgtcactgaaggagcttcgcagtcaagtgataactgtcgcacatgccttagatgccatatttgagaagggggacccgattgcaatagacacgcctatgacatgcaatgcagtcatcatatatttggcgatcatccttggtggttttgttgttgtatctatagcagatagttttgcacctcaggagattggtagtcgtatgggtgtctccaaagcaaaggcaatttttacccaggatttcattgttagaggagggaagaaagttccattgtacagccgtgtcatacaagggacttcatctaaagctgttgtgattcctgcaattggagattctcttggaattatgctaagggatggtgatatgtcctggaaagattttctttctcacgctgctggaaggtcatcttcatattctccagtttatcaatctgtggatgcactaactaatatactattttcttcaggaacaaccggggagccaaaagcaataccgtggacacaactttctcccataagatgtgcatccgatacctgggcacatttggatgttcgtccgtgtgacataggttgctggcctactaatctgggctgggttatgggaccaataatcatctactcatgctttctgactggggcaactttggctttataccatggatctccacttggacgcgatttctgcaaatttgtacaggatgctggtgtgactgtattaggaagtgtgcctagcttggtgaagtcatggaaagctgggaactgcgctgaagggcttgactggaccaaaatcagagtactaggcacaacgggggaggcttctgatattgatgacaacctgtggctaacttcgcgtgcctcatacaagcccattgttgagtgctgtggaggcacagagttggcatcctcatacattcaagggagtcttctgcgaccgcaggcctttggagcttttagtggcgcatcaatgtccactgggtttgtcatacttgatgaacagggaactccgtatcctgatgatataccttgctctggagaagtgggtctcttccctttgtattttggtgctactgatcggcttctcaacgctgatcatgacaaggtttacttcgatggaatgcccatttataaaggaaggcaactcagacgacatggagatataatccagaggacagtaggcgggtactatattgtacagggaagggcggatgacaccatgaacctcggtggaattaagaccagttcagtagagatagaacgggtgtgcaacagagctgacgagtgtctgctagaaacagcagcagttagcatcaaaccttccggtgggggaccagaacatctagccatcttggcggtgctaaaagatagatcggcccagtacgacgtgaatcttctcaagaggaagttccagactgccattcagaagaacctcaatcctctcttcaaggtgagctatgtcaaagtcgtcgctgagttcccgagaacggcttcgaacaagctgctgagaagggttctgagggatcagctcgcgcaggaactctcaaatcgcagcaagctatgacctttgagactgttctgcctttgtttcagcatcaaagctatcgattttcttgttccatttcaataaagcactgcttcaatgaaggaagcataccaagatgatcctacaaattccccccgcccctgtaaaacttcaaatctggttgtccttttgaaaagggaaccgtagtccagagaacgtttgtaaaggtctgtacattttatctgatcgttacagtgctgatgaacaaactaggcgcatgcatagttgtgtcacttagtatgtaccaatcggtggtaattgcatcgaatcatttgctgcgatttttttttatcttgcgagacaagtgggagtcagtgcttcgttgtatcgtactgtttgaacgtctatcacctagtt

SEQ ID NO: 96406 - DNA, 567 bp, Zea Mays
ttctttattagtacatcataaagtgattatctggacttagttttcctttcttattttattctgcattcaacagtgtgatcctagcctcctaggtgatttccttttcaggtctactggtcaatggtgctaaagcaactcgcagtcaagtttaaacaagaaccaatgtcaattctaagtacgtcagatagatcaaagaaaggggggacatggcttcaaggtgcagtgctcaacatcgctgagtgctgtctgttgccttgtccttccctgaagaggacagatgacagtacagctatcatttggagggatgaaggccttgatgattatccagtgaaccgaatgtcactgaaggagcttcgcagtcaagtgatgtgtgtttgtcatttccaaacaaagagttgaagtacactcttttttctgtaaattattcttcattgtgtctttctgtgttgctatttcctttcttcagaactgtcgcacatgccttagatgccatatttgagaagggggacccgattgcaatagacacgcctatgacatgcaatgcagtcatcatatatttggcgatca

SEQ ID NO: 96407 - DNA, 898 bp, Zea Mays
gatgtggtgattcggtatgcgtggcatgtgcaggtgatctcgactgcttcctcgccccccatggcgacggcgctcaaatcgttcctgaacagccccgtcggccccaagaccacccacttctggggccctgtcgccaactggggcttcgtcatcgcgggtttggttgacatgaacaagcctcctgaaatgatatctggcaatatgacagcagccatgtgtgtgtattctggactctttatgaggtttgcatggatggtacagccccgaaattatttgcttctggcatgccatgcttccaatgaaagcgtccagctctatcagttatctcgctgggctaggtctcaggggtacctggagaagaaagaaccagaggccaaacagtaaagagggtatccaacactgcagtcatttgttcaataaagaaaatatgctgtggaaaacattcattctgttgccaatgcagttttttttgtatgtttgcaaaatatgctgaggaaatttcatgatacctagcgcagttacaagtgtctgcttacttttatgtgcatttgtcaagacacatttgttttttacattgctgccttcctactatttggcactatttattttacctggctcatccgctcatgtgcccaaaatgcttagtaaaataaattcatgttcacttatacaacacaattccagattttattcaagtcaaggaatattttgacgttctgttcctagaccgaacgaaatacttagaatataatattctaattaattcctattatacaaaaagtccagatagactgaacaaaaagggcttcatttctattttccaatttggcaaatcacatatttgtttccttcgtatgaacagaaaaatacaatgactcaaagaagttcctaccacgaa

SEQ ID NO: 96408 - DNA, 846 bp, Zea Mays
ccgccgggcagggcggcagtataaactagtgatagccactagtggtagtggcgtctgggtctctatatatgtacgtctgccatcatcccatccctatccccccgatcactctttcactctactccaaccactccgcggaatcgtaccttacccagccttcttcctcgtcgccgggctcgccgccagccatgtcggcggcgttcaaggcgttcctgaatagcccagtgggccccaagacgacccacttctggggacccgtctccaactggggcatcatcctcgcgagcgtggcagacacgaaaaagcctcctgagatgatatccggcaacatgacaggagtgttgtgcgtgtactctgcgctcttcgtcaggttcgcgtggatggtgcgacctcggaactatttcctcatggtaacccacagctgcaacgagtgcgttcagctctaccagctgtcgcgctgggctagggcgcaggggttctttgagaagaaagaagaggagaggcccaagagcgaagattgaccgacggcccggccctaaaccatacaatactacaatgtgctcggttgtaccacaaaggcaatatttgatgcatgtattgtaacgtgaaaaaaagcctcggttatacatgttgtaggttcatctgcggatattgaactatgaatttccgagcataaagcatcaatttccactgccgtcgtttctcccacatttaaattatataaaaaactaaaattatacataaatgaggatttgaattatgactattgattctaaatcgttcctcccacattcaagttataaaaaaactaaaattagacataaatgatgatttgaattatgatta

SEQ ID NO: 96409 - DNA, 867 bp, Zea Mays
ccgccgggcagggcggcagtataaactagtgatagccactagtggtagtggcgtctgggtctctatatatgtacgtctgccatcatcccatccctatccccccgatcactctttcactctactccaaccactccgcggaatcgtaccttacccagccttcttcctcgtcgccgggctcgccgccagccatgtcggcggcgttcaaggcgttcctgaatagcccagtgggccccaagacgacccacttctggggacccgtctccaactggggcatcatcctcgcggaacacagaaaaatgaagtccggcacaaactaggcccgtgcgcgccatgcgtgagttgctgaggcaaccaatcacgtagactgtgaatgaacgctcactacagagtacagacgcaccatacaatagctccacaaaactctgcagcccactgttgacacttgacagcgccgacagaatctcttcttttattttaatccttttattttaattcatcatctcctttaatttgccttcttcaacaagcgtcttttggacttccattattacgtaccgtttgatttacatattggtaacgtaatggataatctatcgacgaaaccaattgtatattatttgatgaaatcactctcttatcaaggaacgaattatttgctcatccggtctgaaagtatctgacatccaatccaaaaaagaaaaagaaataaaatgttgtcccatgctaggatgcaagttgcaacccaaataatagaactccaatcattgatactcagtctgatagctcatatgtgtcttacctctacgctctgtaagttgttttaggggtggaacatgaaacaggacatttctccccccaaaccgtcct

SEQ ID NO: 96410 - DNA, 1454 bp, Zea Mays
gctcgcgaagcacggcacggccgcggacacgaccgggtcccttccgcgtccgggtcgcggtcgccgaagaaccctcgctcgagaccgaagaagacaaaatcgcatctcctcgcctcctcccctcctcccgagatccgggcaaagcgcgccgcgcgagaaccaggatatcgatttaggtatatggacaaggtgtctgaaggtactaagtgagatggataagaagaaagggaccgatggcaccgaaccaggaccagctccatctcgtgccgtcgacagatttggttttataaagccagaacaaggcaattcacctgatggaattccaaaaggcaagtctatacatgagcgtgaaagggaggaaagaaggataagaaaatggaggaagatgataggtgttggtggtaatgactggaagcattatgttagaaggaaccctcatgtggttaaaaggcgaataaggaaaggaattcctgattgtctcagaggacttgtttggcagttgatttcaggcagtcgggacctcttactaatgaacccaggggtttacgagacactggtgatatatgagacatcggcctctgaattggaaattattcgtgacatatcacgcacatttccatctcatatattctttcaacaaaggcatggtccaggccaaagatcattgtataacattttgaaagcatattctgtctatgacagggatgttggatatgtgcagggaatgggatttttagctgggctgctgcttctttatatgagtgaggaggatgcattctggttattagtcgcgttgctaaagggagctgtccatgcaccaatggaaggcttgtatcaggctggtttgccgcttgtgcagcaatatttgtctcagtttgagaaattagttattgagctcatgccaaaattgggacaacactttgttgaagaaatgataaacccaagcatgtatgcaagtcaatggtttatcacagttttctcatattccttcccatttcatctaactcttagagtttgggatgtgtttctttatgagggtattaaggttgtattccaagttggattggctctattgagactctgtcacgatgatttagtcaaattaccttttgagaaactgctctatgccttgagaaatttccctgaggaagcgacagatccagatgtattattgccgcttgccttttcatttaaggtatcgagtcgtctcgaggagcttcagaaggagtatcagaagcgacaggagggcaccagtgaaacttcaagcggcgagcggctacagcccctcgtatcgaagacgatgagcagggtcggtagccgtgttgtgtcgaacttaacgaccgctgacagaaaatgacagacacgttctcttgtttgtttgtaactcgcatgtacactgtacagaaagaacggccttataatccatccatctaacagtatttgttttgcgtttc

SEQ ID NO: 96411 - DNA, 1647 bp, Zea Mays
gctcgcgaagcacggcacggccgcggacacgaccgggtcccttccgcgtccgggtcgcggtcgccgaagaaccctcgctcgagaccgaagaagacaaaatcgcatctcctcgcctcctcccctcctcccgagatccgggcaaagcgcgccgcgcgagaaccaggatatcgatttaggtatatggacaaggtgtctgaaggtactaagtgagatggataagaagaaagggaccgatggcaccgaaccaggaccagctccatctcgtgccgtcgacagatttggttttataaagccagaacaaggcaattcacctgatggaattccaaaaggcaagtctatacatgagcgtgaaagggaggaaagaaggataagaaaatggaggaagatgataggtgttggtggtaatgactggaagcattatgttagaaggaaccctcatgtggttaaaaggcgaataaggaaaggaattcctgattgtctcagaggacttgtttggcagttgatttcaggcagtcgggacctcttactaatgaacccaggggtttacgagacactggtgatatatgagacatcggcctctgaattggaaattattcgtgacatatcacgcacatttccatctcatatattctttcaacaaaggcatggtccaggccaaagatcattgtataacattttgaaagcatattctgtctatgacagggatgttggatatgtgcagggaatgggatttttagctgggctgctgcttctttatatgagtgaggaggatgcattctggttattagtcgcgttgctaaagggagctgtccatgcaccaatggaaggcttgtatcaggctggtttgccgcttgtgcagcaatatttgtctcagtttgagaaattagttattgagctcatgccaaaattgggacaacactttgttgaagaaatgataaacccaagcatgtatgcaagtcaatggtttatcacagttttctcatattccttcccatttcatctaactcttagagtttgggatgtgtttctttatgagggtattaaggttgtattccaagttggattggctctattgagactctgtcacgatgatttagtcaaattaccttttgagaaactgctctatgccttgagaaatttccctgaggaagcgacagatccagatgtattattgccgcttgccttttcatttaaggtagtgtttggttccagggccagttgggatgttgtggctccgtacagaagattttgggagccggatggttcggcattggaccagcatgttaccagtatcagttcgttacattcagacgtgaaggaaatctagcaatagattccatggcatctgcttgatctgggtttcatctaagtatctaacagtattttttttttcaggtatcgagtcgtctcgaggagcttcagaaggagtatcagaagcgacaggagggcaccagtgaaacttcaagcggcgagcggctacagcccctcgtatcgaagacgatgagcagggtcggtagccgtgttgtgtcgaacttaacgaccgctgacagaaaatgacagacacgttctcttgtttgtttgtaactcgcatgtacactgtacagaaagaacggccttataatccatccatctaacagtatttgtttt

SEQ ID NO: 96412 - DNA, 831 bp, Zea Mays
cgggccacgtcacgtcacaagctcgcgaagcacggcacggccgcggacacgaccgggtcccttccgcgtccgggtcgcggtcgccgaagaaccctcgctcgagaccgaagaagacaaaatcgcatctcctcgcctcctcccctcctcccgagatccgggcaaagcgcgccgcgcgagaaccaggatatcgatttaggtatatggacaaggtgtctgaaggtactaagtgagatggataagaagaaagggaccgatggcaccgaaccaggaccagctccatctcgtgccgtcgacagatttggttttataaagccagaacaaggcaattcacctgatggaattccaaaaggcaagtctatacatgagcgtgaaaggtatgacctgccatacaagatatgtattatcggaatgcagtgggctgtatgatatattagggtcgttgtatcttgtttctaccgatttgatatgttagtcgattccaataggtggttgttaagaccatcctagattccattttcttctttctagcagctcttactacatttctacgcataagattggatcttagctttgccagcacttactggtggaatggttctaatacattagactgcttcactgataaacacacctttttattactaccttactcatgcctccgacaccatattaccattctttcccccgtatcagactatttacttgtgtaaatcagttattgtcttacttcaccttcctatttctctaaataaactaccttacaagtgcttttattctatttcttttttatgttgctatagggaggaaagaaggataagaaaatggaggaag

SEQ ID NO: 96413 - DNA, 606 bp, Zea Mays
gagtttttgttgaggagaagtcattcacatatctgtatcaggaaggagatactgtgactcttatggagcctgaaacgtttgagcaacttgaagtttcgaaggaactgtttggcaaagctgctgcatacctaaaagatgaaatgaaagtgaatctacaatactttgatggccggccaatgtctgggacagttcctcaacgagtgacttgcactgttgttgaagcacaaccaaatacaaaagggctaactgctcaaccacagtataaaagggtcttgctggataatggtcttacagtgcttgcaccaccttttattgaagcgggtgagaatattgtaatcagtacagccgatgattcttatatgacgagagcgtaaggggtatcgtggatgacgttttgttctaccaaatggggatcgattacaatgtggctaccagaataattttatttacactcagttgtggagttgccgtaaacagtgagccttggcggacaccaaccaagaacttttagttcttcgctaataacccacacattttgtactcacatgtcttttcgttttgttcctcacttcaaatatttatgcaacagaatccattcatggcaaa

SEQ ID NO: 96414 - DNA, 107 bp, Zea Mays
atactaggtgagtgcccgtgcgttgcaacggaaccgtataataacacgataacttatgtatatatatattatattgttatagtacgatgcccgtgcgttacgacgac

SEQ ID NO: 96415 - DNA, 78 bp, Zea Mays
cttttctatgcaatacatcaagtatttgcagtccaatactgcccacagtcagattctaagaaaagctcgtaaaaaaaa

SEQ ID NO: 96416 - DNA, 929 bp, Zea Mays
atgagcaagtgccctgagccccagaggcccctgatacattatgcaaaatgcctttctgtcagcaggaaatcagattcactagtgaacgagtacaggcactcgatggctctatcgctggagaaggacaagtattacacaacgaggggttcaccgttcgatggaaacgggttcgactttggtagcatagctgaggagaagggaaccaccgcgttgcctagattcttcgtagcattgtcgaacaaggagaaggaggaggacttcatggcaatgaagggctgcaagctgccacagaggccaaagaagcggcccaagctgatgcagaagtgcttgcttgtaatgctcactcccactgattcagtctatggtgagcccaggagcttggttatcagatttgtcgcatgagagatatgaagttagagagaagaagagttctaaaaagagagctagaggcttgaaggctttgaccatggagagtgattcagagtagaggtcgaggcgaatgaatttttgggcttgacttcagctggtggcaaaaaactgtagtttaggtggcactgcctgctgcttatcagacaaacctcagcatctaatttggtgctatgagtgctctgatcaagatctattgatgtcaacagcaaagagcatgttagattcctgatctagtgggaaacctgcagctccatctgtgggcacctttgtgagaaacaatggaagctggatagtggatacagtatatggtttctcaaaattatatagggaggaatgttcagccgttcagaaacaatgaaagctggatgttggctgagaatcaatgaattatgatgtttaattgtcgcaaacttgtagctgtaagatctatggtgaatacagaacactcaatcaagactgatcaatggcgctccctcccaaatcctaatagcgctctatag

SEQ ID NO: 96417 - DNA, 901 bp, Zea Mays
atgagcaagtgccctgagccccagaggcccctgatacattatgcaaaatgcctttctgtcagcaggaaatcagattcactagtgaacgagtacaggcactcgatggctctatcgctggagaaggacaagtattacacaacgaggggttcaccgttcgatggaaacgggttcgactttggtagcatagctgaggagaagggaaccaccgcgttgcctagattcttcgtagcattgtcgaacaaggagaaggaggaggacttcatggcaatgaagggctgcaagctgccacagaggccaaagaagcggcccaagctgatgcagaagtgcttgcttatggtgagcccaggagcttggttatcagatttgtcgcatgagagatatgaagttagagagaagaagagttctaaaaagagagctagaggcttgaaggctttgaccatggagagtgattcagagtagaggtcgaggcgaatgaatttttgggcttgacttcagctggtggcaaaaaactgtagtttaggtggcactgcctgctgcttatcagacaaacctcagcatctaatttggtgctatgagtgctctgatcaagatctattgatgtcaacagcaaagagcatgttagattcctgatctagtgggaaacctgcagctccatctgtgggcacctttgtgagaaacaatggaagctggatagtggatacagtatatggtttctcaaaattatatagggaggaatgttcagccgttcagaaacaatgaaagctggatgttggctgagaatcaatgaattatgatgtttaattgtcgcaaacttgtagctgtaagatctatggtgaatacagaacactcaatcaagactgatcaatggcgctccctcccaaatcctaatagcgctctatag

SEQ ID NO: 96418 - DNA, 1084 bp, Zea Mays
atgagcaagtgccctgagccccagaggcccctgatacattatgcaaaatgcctttctgtcagcaggaaatcagattcactagtgaacgagtacaggcactcgatggctctatcgctggagaaggacaagtattacacaacgaggggttcaccgttcgatggaaacgggttcgactttggtagcatagctgaggagaagggaaccaccgcgttgcctagattcttcgtagcattgtcgaacaaggagaaggaggaggacttcatggcaatgaagggctgcaagctgccacagaggccaaagaagcggcccaagctgatgcagaagtgcttgcttgtaatgctcactcccactgattcagtctgtaagttttcacttccattgctatgaccatgctcatccttttgaccctgccttctgctttatttctggacgaactatagatggtgagcccaggagcttggttatcagatttgtcgcatgagagatatgaagttagagagaagaagagttctaaaaaggtagcctgcatttagatatacattttttacctgtacctgtatattcagcttcaaatcggcattctcttactgcctgttggctgttgctgatatgagtgaaacaaccttgcagagagctagaggcttgaaggctttgaccatggagagtgattcagagtagaggtcgaggcgaatgaatttttgggcttgacttcagctggtggcaaaaaactgtagtttaggtggcactgcctgctgcttatcagacaaacctcagcatctaatttggtgctatgagtgctctgatcaagatctattgatgtcaacagcaaagagcatgttagattcctgatctagtgggaaacctgcagctccatctgtgggcacctttgtgagaaacaatggaagctggatagtggatacagtatatggtttctcaaaattatatagggaggaatgttcagccgttcagaaacaatgaaagctggatgttggctgagaatcaatgaattatgatgtttaattgtcgcaaacttgtagctgtaagatctatggtgaatacagaacactcaatcaagactgatcaa

SEQ ID NO: 96419 - DNA, 1309 bp, Zea Mays
ggctgcctgcctgtcagtcctgtctggtgtgtgcaccgcgcgtccgcgcgtccgcctggctgccttcgtctcgcccagaacgcgtaggcgcagcaacaaactaggaagcaacacccagctgcctcggcgcaacccgtcctcttctactccagaggcacctcggcatccgccgaccggtttccgagaggtttgctggagtgcaccagcggtggggcagcaaatctgtaactgacacacgatgaatcaggaggcgaaggactcgaggccctcaaggtctcccagcgagccaaacctcttcctgcaatggggcagccggaagaggctgcgatgcgtcaagacgcgtgacgatggctcgccatcgccgtcgccgtctgaaggtcttagacgcgccataccccgtgctactaggcccctccttggagctgacattgcggcattccggcgccctagcacctttaaccgcaggaaatcagattcactagtgaacgagtacaggcactcgatggcgctatcgctggagaaggacaagtattacacaacgaggggttcaccgttcgatggaaacgggttcgactttggtagcatagctgaggagaagggaaccaccgcgttgcctagattcttcgtagcattgtcgaacaaggagaaggaggaggacttcatggcaatgaagggctgcaagctgccacagaggccaaagaagcggcccaagctgatgcagaagtgcttgcttgtaatgctcactccactgattcagtctatggtgagcccaggagcttggttatcagatttgtcgcatgagagatatgaagttagagagaagaagagttctaaaaagagagctagaggcttgaaggctttgaccatggagagtgattcagagtagaggtcgaggcaaatgaatttttgggcttgacttcagctggtggcaaaaaactgtagtttaggtggcactgcctgctgcttatcagacaaacctcagcatctaatttggtgctatgagtgctctgatcaagatctattgatgtcaacagcaaagagcatgttagattcctgatctagtgggaaacctgcagctccatctgtgggcacctttgtgagaaacaatggaagctggatagtggatacagtatatggtttctcaaaattatatagggaggaatgttcagccgttcagaaacaatgaaagctggatgttggctgagaatcaatgaattatgatgtttaattgtcataaacttgtagctgtaagatctatggtgaatacagaacactcaatcaagactgatcaatggcgctccctcccaaa

SEQ ID NO: 96420 - DNA, 1282 bp, Zea Mays
ggctgcctgcctgtcagtcctgtctggtgtgtgcaccgcgcgtccgcgcgtccgcctggctgccttcgtctcgcccagaacgcgtaggcgcagcaacaaactaggaagcaacacccagctgcctcggcgcaacccgtcctcttctactccagaggcacctcggcatccgccgaccggtttccgagaggtttgctggagtgcaccagcggtggggcagcaaatctgtaactgacacacgatgaatcaggaggcgaaggactcgaggccctcaaggtctcccagcgagccaaacctcttcctgcaatggggcagccggaagaggctgcgatgcgtcaagacgcgtgacgatggctcgccatcgccgtcgccgtctgaaggtcttagacgcgccataccccgtgctactaggcccctccttggagctgacattgcggcattccggcgccctagcacctttaaccgcaggaaatcagattcactagtgaacgagtacaggcactcgatggcgctatcgctggagaaggacaagtattacacaacgaggggttcaccgttcgatggaaacgggttcgactttggtagcatagctgaggagaagggaaccaccgcgttgcctagattcttcgtagcattgtcgaacaaggagaaggaggaggacttcatggcaatgaagggctgcaagctgccacagaggccaaagaagcggcccaagctgatgcagaagtgcttgcttatggtgagcccaggagcttggttatcagatttgtcgcatgagagatatgaagttagagagaagaagagttctaaaaagagagctagaggcttgaaggctttgaccatggagagtgattcagagtagaggtcgaggcaaatgaatttttgggcttgacttcagctggtggcaaaaaactgtagtttaggtggcactgcctgctgcttatcagacaaacctcagcatctaatttggtgctatgagtgctctgatcaagatctattgatgtcaacagcaaagagcatgttagattcctgatctagtgggaaacctgcagctccatctgtgggcacctttgtgagaaacaatggaagctggatagtggatacagtatatggtttctcaaaattatatagggaggaatgttcagccgttcagaaacaatgaaagctggatgttggctgagaatcaatgaattatgatgtttaattgtcataaacttgtagctgtaagatctatggtgaatacagaacactcaatcaagactgatcaatggcgctccctcccaaa

SEQ ID NO: 96421 - DNA, 1464 bp, Zea Mays
gaggagcaaccggctgcctgcctgtcagtcctgtctggtgtgtgcaccgcgcgtccgcgcgtccgcctggctgccttcgtctcgcccagaacgcgtaggcgcagcaacaaactaggaagcaacacccagctgcctcggcgcaacccgtcctcttctactccagaggcacctcggcatccgccgaccggtttccgagaggtttgctggagtgcaccagcggtggggcagcaaatctgtaactgtacgcaccacttctttcccgtccccattcttctgggatttgggagctctcttctccggtttggatttcggagtccgtctcgtcttggggttggactgagtgcgctcgtcctgtgaatctggatcctgggcaccagtcgcgttggtgtagctggagcctggagccggaaaggacacacgatgaatcaggaggcgaaggactcgaggccctcaaggtctcccagcgagccaaacctcttcctgcaatggggcagccggaagaggctgcgatgcgtcaagacgcgtgacgatggctcgccatcgccgtcgccgtctgaaggtcttagacgcgccataccccgtgctactaggcccctccttggagctgacattgcggcattccggcgccctagcacctttaaccgcaggaaatcagattcactagtgaacgagtacaggcactcgatggcgctatcgctggagaaggacaagtattacacaacgaggggttcaccgttcgatggaaacgggttcgactttggtagcatagctgaggagaagggaaccaccgcgttgcctagattcttcgtagcattgtcgaacaaggagaaggaggaggacttcatggcaatgaagggctgcaagctgccacagaggccaaagaagcggcccaagctgatgcagaagtgcttgcttatggtgagcccaggagcttggttatcagatttgtcgcatgagagatatgaagttagagagaagaagagttctaaaaagagagctagaggcttgaaggctttgaccatggagagtgattcagagtagaggtcgaggcaaatgaatttttgggcttgacttcagctggtggcaaaaaactgtagtttaggtggcactgcctgctgcttatcagacaaacctcagcatctaatttggtgctatgagtgctctgatcaagatctattgatgtcaacagcaaagagcatgttagattcctgatctagtgggaaacctgcagctccatctgtgggcacctttgtgagaaacaatggaagctggatagtggatacagtatatggtttctcaaaattatatagggaggaatgttcagccgttcagaaacaatgaaagctggatgttggctgagaatcaatgaattatgatgtttaattgtcataaacttgtagctgtaagatctatggtgaatacagaacactcaatcaagactgatcaatggcgctccctcccaaa

SEQ ID NO: 96422 - DNA, 1296 bp, Zea Mays
gaggagcaaccggctgcctgcctgtcagtcctgtctggtgtgtgcaccgcgcgtccgcgcgtccgcctggctgccttcgtctcgcccagaacgcgtaggcgcagcaacaaactaggaagcaacacccagctgcctcggcgcaacccgtcctcttctactccagaggcacctcggcatccgccgaccggtttccgagaggtttgctggagtgcaccagcggtggggcagcaaatctgtaactgacacacgatgaatcaggaggcgaaggactcgaggccctcaaggtctcccagcgagccaaacctcttcctgcaatggggcagccggaagaggctgcgatgcgtcaagacgcgtgacgatggctcgccatcgccgtcgccgtctgaaggtcttagacgcgccataccccgtgctactaggcccctccttggagctgacattgcggcattccggcgccctagcacctttaaccgcagcaggaaatcagattcactagtgaacgagtacaggcactcgatggcgctatcgctggagaaggacaagtattacacaacgaggggttcaccgttcgatggaaacgggttcgactttggtagcatagctgaggagaagggaaccaccgcgttgcctagattcttcgtagcattgtcgaacaaggagaaggaggaggacttcatggcaatgaagggctgcaagctgccacagaggccaaagaagcggcccaagctgatgcagaagtgcttgcttatggtgagcccaggagcttggttatcagatttgtcgcatgagagatatgaagttagagagaagaagagttctaaaaagagagctagaggcttgaaggctttgaccatggagagtgattcagagtagaggtcgaggcaaatgaatttttgggcttgacttcagctggtggcaaaaaactgtagtttaggtggcactgcctgctgcttatcagacaaacctcagcatctaatttggtgctatgagtgctctgatcaagatctattgatgtcaacagcaaagagcatgttagattcctgatctagtgggaaacctgcagctccatctgtgggcacctttgtgagaaacaatggaagctggatagtggatacagtatatggtttctcaaaattatatagggaggaatgttcagccgttcagaaacaatgaaagctggatgttggctgagaatcaatgaattatgatgtttaattgtcataaacttgtagctgtaagatctatggtgaatacagaacactcaatcaagactgatcaatggcgctccctcccaaa

SEQ ID NO: 96423 - DNA, 1628 bp, Zea Mays
gaggagcaaccggctgcctgcctgtcagtcctgtctggtgtgtgcaccgcgcgtccgcgcgtccgcctggctgccttcgtctcgcccagaacgcgtaggcgcagcaacaaactaggaagcaacacccagctgcctcggcgcaacccgtcctcttctactccagaggcacctcggcatccgccgaccggtttccgagaggtttgctggagtgcaccagcggtggggcagcaaatctgtaactgacacacgatgaatcaggaggcgaaggactcgaggccctcaaggtctcccagcgagccaaacctcttcctgcaatggggcagccggaagaggctgcgatgcgtcaagacgcgtgacgatggctcgccatcgccgtcgccgtctgaaggtcttagacgcgccataccccgtgctactaggcccctccttggagctgacattgcggcattccggcgccctagcacctttaaccgcaggtgtagtttcaccgctttgttttcactgcccactacaactacaatatacatgagcaagtgccctgagccccagaggcccctgatacattatgcaaaatgcctttctgtcagcaggaaatcagattcactagtgaacgagtacaggcactcgatggcgctatcgctggagaaggacaagtattacacaacgaggggttcaccgttcgatggaaacgggttcgactttggtagcatagctgaggagaagggaaccaccgcgttgcctagattcttcgtagcattgtcgaacaaggagaaggaggaggacttcatggcaatgaagggctgcaagctgccacagaggccaaagaagcggcccaagctgatgcagaagtgcttgcttgtaatgctcactccactgattcagtctgtaagttttcacttccattgctatgaccatgctcatccttttgaccctgccttctgctttatttctggacgaactatagatggtgagcccaggagcttggttatcagatttgtcgcatgagagatatgaagttagagagaagaagagttctaaaaaggtagcctgcatttagatatatttgttttaattcaagaagtgcatttttacctgtacctgtatattcagcttcaaatcggcattctcttactgcctgttggctgttgctgatatgagtgaaacaaccttgcagagagctagaggcttgaaggctttgaccatggagagtgattcagagtagaggtcgaggcaaatgaatttttgggcttgacttcagctggtggcaaaaaactgtagtttaggtggcactgcctgctgcttatcagacaaacctcagcatctaatttggtgctatgagtgctctgatcaagatctattgatgtcaacagcaaagagcatgttagattcctgatctagtgggaaacctgcagctccatctgtgggcacctttgtgagaaacaatggaagctggatagtggatacagtatatggtttctcaaaattatatagggaggaatgttcagccgttcagaaacaatgaaagctggatgttggctgagaatcaatgaattatgatgtttaattgtcataaacttgtagctgtaagatctatggtgaatacagaacactcaatcaagactgatcaa

SEQ ID NO: 96424 - DNA, 1385 bp, Zea Mays
ggctgcctgcctgtcagtcctgtctggtgtgtgcaccgcgcgtccgcgcgtccgcctggctgccttcgtctcgcccagaacgcgtaggcgcagcaacaaactaggaagcaacacccagctgcctcggcgcaacccgtcctcttctactccagaggcacctcggcatccgccgaccggtttccgagaggtttgctggagtgcaccagcggtggggcagcaaatctgtaactgacacacgatgaatcaggaggcgaaggactcgaggccctcaaggtctcccagcgagccaaacctcttcctgcaatggggcagccggaagaggctgcgatgcgtcaagacgcgtgacgatggctcgccatcgccgtcgccgtctgaaggtcttagacgcgccataccccgtgctactaggcccctccttggagctgacattgcggcattccggcgccctagcacctttaaccgcaggaaatcagattcactagtgaacgagtacaggcactcgatggcgctatcgctggagaaggacaagtattacacaacgaggggttcaccgttcgatggaaacgggttcgactttggtagcatagctgaggagaagggaaccaccgcgttgcctagattcttcgtagcattgtcgaacaaggagaaggaggaggacttcatggcaatgaagggctgcaagctgccacagaggccaaagaagcggcccaagctgatgcagaagtgcttgcttatggtgagcccaggagcttggttatcagatttgtcgcatgagagatatgaagttagagagaagaagagttctaaaaaggtagcctgcatttagatatatttgttttaattcaagaagtgcatttttacctgtacctgtatattcagcttcaaatcggcattctcttactgcctgttggctgttgctgatatgagtgaaacaaccttgcagagagctagaggcttgaaggctttgaccatggagagtgattcagagtagaggtcgaggcaaatgaatttttgggcttgacttcagctggtggcaaaaaactgtagtttaggtggcactgcctgctgcttatcagacaaacctcagcatctaatttggtgctatgagtgctctgatcaagatctattgatgtcaacagcaaagagcatgttagattcctgatctagtgggaaacctgcagctccatctgtgggcacctttgtgagaaacaatggaagctggatagtggatacagtatatggtttctcaaaattatatagggaggaatgttcagccgttcagaaacaatgaaagctggatgttggctgagaatcaatgaattatgatgtttaattgtcataaacttgtagctgtaagatctatggtgaatacagaacactcaatc

SEQ ID NO: 96425 - DNA, 633 bp, Zea Mays
atgaatcaggaggcgaaggactcgaggccctcaaggtctcccagcgagccaaacctcttcctgcaatggggcagccggaagaggctgcgatgcgtcaagacgcgtgacgatggctcgccatcgccgtcgccgtctgaaggtcttagacgcgccataccccgtgctactaggcccctcaggcccctgatacattatgcaaaatgcctttctgtcagcaggaaatcagattcactagtgaacgagtacaggcactcgatggcgctatcgctggagaaggacaagtattacacaacgaggggttcaccgttcgatggaaacgggttcgactttggtagcatagctgaggagaagggaaccaccgcgttgcctagattcttcgtagcattgtcgaacaaggagaaggaggaggacttcatggcaatgaagggctgcaagctgccacagaggccaaagaagcggcccaagctgatgcagaagtgcttgcttgtaatgctcactccactgattcagtctgtaagttttcacttccattgctatgaccatgctcatccttttgaccctgccttctgctttatttctggacgaactatagatggtgagcccaggagcttggttatcagatttgtcgcatga

SEQ ID NO: 96426 - DNA, 770 bp, Zea Mays
gaggagcaaccggctgcctgcctgtcagtcctgtctggtgtgtgcaccgcgcgtccgcgcgtccgcctggctgccttcgtctcgcccagaacgcgtaggcgcagcaacaaactaggaagcaacacccagctgcctcggcgcaacccgtcctcttctactccagaggcacctcggcatccgccgaccggtttccgagaggtttgctggagtgcaccagcggtggggcagcaaatctgtaactgtacgcaccacttctttcccgtccccattcttctgggatttgggagctctcttctccggtttggatttcggagtccgtctcgtcttggggttggactgagtgcgctcgtcctgtgaatctggatcctgggcaccagtcgcgttggtgtagctggagcctggagccggaaaggtgtggccctgatttatctctttgtcgatctcgttttggcggatgggtcgtgcttgaagctgagcggtagatttctccctctaccgcctcgtcgactctctctttgggttctcacgggtgcttgagaccagatatttaggtcgatgaacacaagggcgacgtttggcctactctcatgcgcgcaatcttggtgcctcttgccagtttttgggactccggggttagatttttttgttcttgtgtccctgatttctttgtagcggcctagcgggtgagttcttgaagagaaagattagattttttttggctccgagacgtagtaattttctgtttgctaattctactgcatgctccgttc

SEQ ID NO: 96427 - DNA, 406 bp, Zea Mays
tctaaaaccaagagtttatagtcgattgatgatgaatgttgttccctgggagtggggaggagtacatgcacggacgaagtattctattcacacaaacggaaagaagatcagatcagaaagagtcgttgttggcgtcatcattgcaggaagtagccggagatgaagaagaggaagccgatgaggaggctaccgtagatgagcaggcccttctggccggaggtgagggagttgccgcccagcccgaactgctggttctgcgcgaacccggcgatctccacgctcttgctctcgaagaaggactgcgcggcgccgcaggtggggcaccgccagtcatcgggcagctgcgcgaaggggagggaagctaggatcgagcgagcgaatcgcaagaggagagagcactggatga

SEQ ID NO: 96428 - DNA, 578 bp, Zea Mays
aggccaggccatgggtggataagatatgtgtgcaccacgcgtaccctcctctaccactctgcctatgacatgctttgtgtctagtttgtacttttgttgcccacatattacaaccatggaggggatatgcgctcggtgttcctgtgaacttaacgatcaccgcatcaaatcaaaaaaaaaatctaaaaccaagagtttctagtcgattgatgatgaatgttgttccctgggagtggagaggagtacatgcacggatgaagtattctattcacacaaacggaaagcaaatcagatcagaaagagtcgttgttggcatcatcattgcaggaagtagccggagatgaagaagaggaagccgatgaggaggctgccgtagatgagcaggtccttctggccggaggtgagggagttgccgcccagcccgaactgctggttctgcgcgaacccgacgatctccacgctcttgctctcgaagaaggactgcgtggcgccgcaggtggggcaccgccagtcgtcgggcagctgcgcgaaggggaggcccggcggcaccgggtacgacgggtcccccgcctcctggt

SEQ ID NO: 96429 - DNA, 609 bp, Zea Mays
ggtgatggccacgggcatcaggaacacagatggaggccaggccatgggtggataagatatgtgtgcaccacgcgtaccctcctctaccactctgcctatgacatgctttgtgtctagtttgtagttttgttgcccacatattgcaaccatggagaggatatgcactcggtgttcctgtgaacttaacgatcaccgcatcaaatcaaaaaaaatctaaaaccaagagtttctagccaattgatgatgaatgttgttccctgggagtggggaggagtacatgcacggacgaagtattctattcacacaaactgaaagcagatcagatcagaaagagtccttgttggcgtcatcattgcaggaagtagccggagatgaagaagaggaagccgatgaggaggctgccgtagatgagcaggcccttctggccggaggtgagggagttgccgcccagcccgaactgctggttctgcgcgaacccgacgatctccacgctcttgctctcgaagaaggactgcgcggcgccgcaggtggggcaccgccagtcgtcaggcagctgtgcgaaggggaggcccggcggcaccgggtacgacgggtcccccgccgcctggt

SEQ ID NO: 96430 - DNA, 393 bp, Zea Mays
atggaggcgagcgccgccaccgccatagcgacgacgacgacgacgacgttctggtggcctgccgcaccgacccccgcgccgttggcattgggcgcaggcgcggtcgtggcgtcgggcgtgctgctgccgcccgaggccgacgacgcgccggtcgtctcggtggtggggctgggggtcgccgccgccgagcctgctgctgagcgcgcggagggcgccggggaaggggcgtcagaggagcgcgtcttgaggacgcggacgttgagcttctggcccgcggcgcagtggccgggcacgccgcagatgaagaagcggtggccggggctcttgatgacgatcttgtcgtcgcccgagctgtgcgtggcgatcggcgtcgagttggtgcagctgtcgtag

SEQ ID NO: 96431 - DNA, 1437 bp, Zea Mays
ctaaccacctgcactgcagcgtgattagctctacaaatcgcatccagcgggaagctgatgaagcttgtgtacatggtgaccctcctaccgttgctcttcatgtccggcgttcttgaggctgcaggagcgggcaatgacagctcggctgacggcacgaacggcaacttgcacagctctggcaccagcagacccgccgccgcgcccaggggaaggtcgctgcaagcatcgcagagcagcgtgtacagcgtcgaccgctacggtgcccgtggcgacgggaggaacgatgacacgcgggcgctggaaatggcgtggaaggcggcgtgcgcctcgccacggccggccgtcgtgctcgtccctgacggcaggcgttacctgctgaagctcctcaccctccgcggcccgtgcaagtccagcgtcacgctcacggtgaagggcactctggttgcatcgccaaaccgggcggattggagcgacaatgacaggaggcactggatcgtgttccggagcatcgacaagctcaccgtcaacggcggtggcgccatcgatggcaacggcgagaaatggtggcctcactcgtgcaagatcaacaaggctctcccttgcaaggaggctccgacggctctgtcattccactactgcgtcgacctgaaagtggaggatctgaaaatcgtgaacagccaacagatacacatgtcagtcgaggattctgcaaatgcgctgctggcgcggttgtccatcacagcgcctggcaccagccctaacactgacggcatccacatcactcgcagcaaagatgtacgcgtcacagactgcaagatcaagacaggggacgactgcatgtcaatcgagaacgggactcacaacctccatgtctccaaagttaactgtggtccagggcatgggatcagcatcggaagcctaggagacgacaactcaagagcagaagtctccggcatcaccatagattcagtgcaactacacggcacaaccaacggagcacgcatcaagacgtaccagggaggcagcggatacgccaaggacatcacgttccaaaatatggttatgtacgacgtcaagaacccgataatcatcgaccagaactactgcgacaaggctaagccatgcggagaacaagagtcagcagtgcaggtcagcggtgtcgtcttcaagaacattagagggacgaccagtaccaaggacgccatcaagatgaactgcagtgagaacgtcccatgccaaggcattaccttgcagaacatcgacctgaaaatgcaggacggcaagggcaacacaagaagcacttgtcagaatgcaaaatggacagaatttgggacagttcgcccgcagccttgcactgccataaagtagggggcaattgaagtctgttgctcgtgctttgtagtctgtacagatggagtagtcatactcatgtatata

SEQ ID NO: 96432 - DNA, 343 bp, Zea Mays
cacaatgtcgtcgcccctcccctgcctctccctcctccgcgcccggcaccgccatgaccaagcagcagctaggtctgcgtgcgtgtgcaaatggagagaagggatgcgttggagaagaagatggaaagagcatggtcgtgccgcccagtgcttgccggggcgcgctagcgacttgtgcccatggcctggccggcggccggtgtcctctgttgccaagcgttctctgttgccggagaagaaatgtgcgtgcgttctgaaggaagaagaagacccctttgggtctatgacgtgtgggcccaaggcaggctctggtgctccaaataggttgaaagttttacagtag

SEQ ID NO: 96433 - DNA, 3710 bp, Zea Mays
gtctcgtcggtgccgcgtcccttttcccctcccccctccgtcgccgcctcgagcgagctccaccacttgctcctgcgcgaggtgaacactgggttagggccactgccaccgctgggctgcctctgcttctgcctctcccgccagcgcgcgagcccgggggcgattcggcgccggcacgcgggaggggaagccgaggaatgcggtgagtcggcgggggtccggcgtttgtgaactcgtggagggctcggattggtgcgccatggacggcggcgacgccacgaattcggggaagcatgtggccgggcaggtgtgccagatctgcggcgacggcgtgggcaccgcggcggacggcgacctcttcaccgcctgcgacgtctgcggcttccccgtgtgccgcccatgctacgagtacgagcgcaaggacggcacccaggcgtgcccgcagtgcaagactaagtacaagcgccacaaagggagcccaccagtacacggtgaggaaaatgaggatgtggatgctgacgatgtgagtgactacaactaccaagcatctggcaaccaggatcagaagcaaaagattgctgagagaatgctcacctggcggacaaactcacgtggcagtgatattggcctggctaagtatgacagcggtgaaattgggcatgggaagtatgacagtggtgagatccctcgtggatatatcccgtcactaactcatagccagatctcaggagagattcctggagcttcccctgatcatatgatgtctcctgttgggaacattggcaggcgtggacatcaatttccttatgtaaatcattctccaaacccatcgagggagttctccggtagccttggcaatgttgcatggaaagagagggtggatggatggaaaatgaaggataaaggtgcaattcctatgaccaatggaacaagcattgctccatcagaagggcgtggagttgctgatattgatgcttctactgattataacatggaagatgccttactgaatgatgaaactcggcaacctctatctagaaaagtgccaattccttcatccagaataaatccgtacagaatggtcattgtgctacgtttggctgttctatgcatattcttgcgctaccgtatcacacatcctgtgaacaatgcatatccactgtggcttttatccgtcatatgtgagatctggtttgctttgtcctggattttggatcagttcccaaagtggtccccaatcaaccgtgaaacataccttgatagactggctttaaggtatgaccgagaaggtgaaccatctcaattagctcctgttgatatctttgtcagtactgtggatcctatgaaggagcctcctcttgtcactgcaaatactgtgctttccatccttgctgtcgattatccggttgacaaggtatcttgctatgtttcggatgatggagctgctatgctgacttttgatgctctctctgaaacttcagagtttgctagaaaatgggttccgttctgtaagaagtacaacatagagcctagggctccggaatggtactttgctcagaaaattgattacttgaaagacaaagttcaaacttcatttgtgaaagaacgccgggccatgaagagagaatatgaagaattcaaagttcgtatcaatggtcttgtagccaatgcacaaaaagttcccgaggagggatggatcatgcaagatggtacaccttggcctgggaacaatactagggaccatcctggaatgattcaggttttcctgggtcacagtggagggcttgacgttgaaggcaatgaacttcctcgtttggtttatgtgtctcgtgaaaaacgtcctggattccaacatcacaagaaggctggtgccatgaatgcacttgttcgtgtatcagctgtccttactaatgggcaatacatgttgaatcttgactgtgaccactacatcaataatagcaaggctcttcgagaagctatgtgcttccttatggacccaaacctaggaaggaatgtctgttatgtccaatttcctcagaggtttgatggtattgataggaatgaccgatatgcaaacaggaacactgtgtttttcgatattaacttgagaggtcttgacggcattcaagggccagtttatgtgggaactggttgtgtgtttaacagaacggccttatatggttatgagcctccagtcaagaaaaaaaagccaggcttcttctcttcgctttgtgggggaaggaaaaagacgtcaaaatctaagaagagctcggaaaagaagaagtcacatagacacgcagacagttctgtaccagtatttaatctcgaagatatagaggaagggattgaaggttctcagtttgatgatgagaaatcgctgattatgtctcaaatgagcttggagaagagatttggccagtccagtgtttttgtagcctctactctgatggaatatggcggtgttccacaatctgcaactccagagtctcttctgaaagaagctattcatgtcatcagctgtggctatgaggacaaaactgactggggaactgagattgggtggatctatggttctgttacagaagacattctcaccggattcaagatgcatgctcgaggctggcgatcaatctactgcatgcctaagcgaccagctttcaagggatctgctcctatcaacctttcggatcgtttgaatcaagtgcttcggtgggctcttggttccattgaaattcttttcagcaggcattgtcccatatgcagtttgtcttctcactgggaagttcatcatcccaaagattagtaacctagagagtgtttggtttatatcgctctttatctcaatctttgccactggtatccttgagatgaggtggagtggtgttggcattgatgaatggtggaggaacgagcagttctgggtcattggtggtatttctgcgcatttatttgccgtcttccagggtctcctgaaggtgcttgctggtatcgacacgagcttcactgtcacctctaaggccactgacgaagaaggtgattttgccgagctctacatgttcaagtggacaacgcttctgatcccaccaaccactattttgatcatcaacctggtcggcgtggtcgctggcatttcctacgcaatcaatagcggttaccagtcatggggacctcttttcgggaagctcttctttgcgttctgggtgattgtccacctgtaccccttcctcaagggcctcatggggaagcagaaccgcacgccgaccattgtcgttgtctgggctatcctccttgcgtcgatcttttccctgatgtgggttcgtatcgatccattcaccacccgggtcactggtcctgatatcgcgaaatgtggcatcaactgctaggatgagctgaagataattaaagagtggaactagacgcattgtgcatcgtaagttatcagtgggtggctctttttatagtatggtaggaacttggtcgggagacgttaattacatatgctatatgtacctccgctggtctttatccgtaagttaatatatatactgctttgagaattatgtatgggcaacaggttgtttacttgattttgtgtgtacatatttaaatgtctctgccaatatcaaatgcattaaccatgaagtatcaattgtcgttgcgtttccaaaaaaaaaaaaccgaatgctacaccaaccaattaacaaacacaa

SEQ ID NO: 96434 - DNA, 4005 bp, Zea Mays
aaaccaaggacagatcaactccaacctcgcaagcgaatccaaaattacccagcaaaatcccggggtttatcactcaatcaccgatcgctaaaccccggcaccacgcaagcaaggtggtaacacgccgatccaatccgcacggcattgcctcgtgtgcgcgtccccccaccccaccccaccccgtcgccgtctcgtcggtgccgcgtcccttttcccctcccccctccgtcgccgcctcgagcgagctccaccacttgctcctgcgcgaggtgaacactgggttagggccactgccaccgctgggctgcctctgcttctgcctctcccgccagcgcgcgagcccgggggcgattcggcgccggcacgcgggaggggaagccgaggaatgcggtgagtcggcgggggtccggcgtttgtgaactcgtggagggctcggattggtgcgccatggacggcggcgacgccacgaattcggggaagcatgtggccgggcaggtgtgccagatctgcggcgacggcgtgggcaccgcggcggacggcgacctcttcaccgcctgcgacgtctgcggcttccccgtgtgccgcccatgctacgagtacgagcgcaaggacggcacccaggcgtgcccgcagtgcaagactaagtacaagcgccacaaagggagcccaccagtacacggtgaggaaaatgaggatgtggatgctgacgatgtgagtgactacaactaccaagcatctggcaaccaggatcagaagcaaaagattgctgagagaatgctcacctggcggacaaactcacgtggcagtgatattggcctggctaagtatgacagcggtgaaattgggcatgggaagtatgacagtggtgagatccctcgtggatatatcccgtcactaactcatagccagatctcaggagagattcctggagcttcccctgatcatatgatgtctcctgttgggaacattggcaggcgtggacatcaatttccttatgtaaatcattctccaaacccatcgagggagttctccggtagccttggcaatgttgcatggaaagagagggtggatggatggaaaatgaaggataaaggtgcaattcctatgaccaatggaacaagcattgctccatcagaagggcgtggagttgctgatattgatgcttctactgattataacatggaagatgccttactgaatgatgaaactcggcaacctctatctagaaaagtgccaattccttcatccagaataaatccgtacagaatggtcattgtgctacgtttggctgttctatgcatattcttgcgctaccgtatcacacatcctgtgaacaatgcatatccactgtggcttttatccgtcatatgtgagatctggtttgctttgtcctggattttggatcagttcccaaagtggtccccaatcaaccgtgaaacataccttgatagactggctttaaggtatgaccgagaaggtgaaccatctcaattagctcctgttgatatctttgtcagtactgtggatcctatgaaggagcctcctcttgtcactgcaaatactgtgctttccatccttgctgtcgattatccggttgacaaggtatcttgctatgtttcggatgatggagctgctatgctgacttttgatgctctctctgaaacttcagagtttgctagaaaatgggttccgttctgtaagaagtacaacatagagcctagggctccggaatggtactttgctcagaaaattgattacttgaaagacaaagttcaaacttcatttgtgaaagaacgccgggccatgaagagagaatatgaagaattcaaagttcgtatcaatggtcttgtagccaatgcacaaaaagttcccgaggagggatggatcatgcaagatggtacaccttggcctgggaacaatactagggaccatcctggaatgattcaggttttcctgggtcacagtggagggcttgacgttgaaggcaatgaacttcctcgtttggtttatgtgtctcgtgaaaaacgtcctggattccaacatcacaagaaggctggtgccatgaatgcacttgttcgtgtatcagctgtccttactaatgggcaatacatgttgaatcttgactgtgaccactacatcaataatagcaaggctcttcgagaagctatgtgcttccttatggacccaaacctaggaaggaatgtctgttatgtccaatttcctcagaggtttgatggtattgataggaatgaccgatatgcaaacaggaacactgtgtttttcgatattaacttgagaggtcttgacggcattcaagggccagtttatgtgggaactggttgtgtgtttaacagaacggccttatatggttatgagcctccagtcaagaaaaaaaagccaggcttcttctcttcgctttgtgggggaaggaaaaagacgtcaaaatctaagaagagctcggaaaagaagaagtcacatagacacgcagacagttctgtaccagtatttaatctcgaagatatagaggaagggattgaaggttctcagtttgatgatgagaaatcgctgattatgtctcaaatgagcttggagaagagatttggccagtccagtgtttttgtagcctctactctgatggaatatggcggtgttccacaatctgcaactccagagtctcttctgaaagaagctattcatgtcatcagctgtggctatgaggacaaaactgactggggaactgagattgggtggatctatggttctgttacagaagacattctcaccggattcaagatgcatgctcgaggctggcgatcaatctactgcatgcctaagcgaccagctttcaagggatctgctcctatcaacctttcggatcgtttgaatcaagtgcttcggtgggctcttggttccattgaaattcttttcagcaggcattgtcccatatggtatggctatggaggtcggcttaaattcctggagagatttgcttatatcaacacaacaatttatccactcacatcaatcccgctcctcctgtactgcatattgccagcagtttgtcttctcactgggaagttcatcatcccaaagattagtaacctagagagtgtttggtttatatcgctctttatctcaatctttgccactggtatccttgagatgaggtggagtggtgttggcattgatgaatggtggaggaacgagcagttctgggtcattggtggtatttctgcgcatttatttgccgtcttccagggtctcctgaaggtgcttgctggtatcgacacgagcttcactgtcacctctaaggccactgacgaagaaggtgattttgccgagctctacatgttcaagtggacaacgcttctgatcccaccaaccactattttgatcatcaacctggtcggcgtggtcgctggcatttcctacgcaatcaatagcggttaccagtcatggggacctcttttcgggaagctcttctttgcgttctgggtgattgtccacctgtaccccttcctcaagggcctcatggggaagcagaaccgcacgccgaccattgtcgttgtctgggctatcctccttgcgtcgatcttttccctgatgtgggttcgtatcgatccattcaccacccgggtcactggtcctgatatcgcgaaatgtggcatcaactgctaggatgagctgaagataattaaagagtggaactagacgcattgtgcatcgtaagttatcagtgggtggctctttttatagtatggtaggaacttggtcgggagacgttaattacatatgctatatgtacctccgctggtctttatccgtaagttaatatatatactgctttgagaattatgtatgggcaacaggttgtttacttgattttgtgtgtacatatttaaatgtctctgccaatatcaaatgcattaaccatgaagtatcaattgtcgttgcgtttccaaaaaaaaaaaaccgaatgctacaccaaccaattaacaaacacaa

SEQ ID NO: 96435 - DNA, 91 bp, Zea Mays
tatgtagaactggatctggtatgtattcatcataccatgatgtgcattactcttctaatgtaaaacggatctgcattaagtatactgggac

SEQ ID NO: 96436 - DNA, 542 bp, Zea Mays
caatgccccgttccgttttagtgtttttaccaatggagttgaggagcgctcttatcagaagctcaaggtgcttgagattgcttgcaggtccagcttaagtgtgacttttggatcagaggcaatgaaaaaccttgatctgctgaaacttgactgctgcagtgggcagttacgtcggctttttggcctgcttcatctatctgaactcaaggaagtctggctgaagggctcctacgaggaaacgctgaagcatgacctagaggtccagcttgcagcccacccaaacaatcctgtgctgaaactggggaaaaatacgctgtgtacgctatcttggatggcgtagaggctgggaccttatttttttccattatctaaaaaaactgggggaagaagtgccacgtcagtagacctgatgtatgctaattaacctctggaatgccattcgcccattcccttctgtccacgcattaccgtttcttatatacaactcgatccgattttctccatcaaaatgcttgtgtacctgttctaggcataaaacaaaa

SEQ ID NO: 96437 - DNA, 1443 bp, Zea Mays
acaggtacgtgtcaaggtgtcagtgtcacccgcgcgcgccaatgcaaatggacgacgagcctcccatcacttcacttgacccggccagctcgggttgcccatcccatccgcctctccttgataaactccgtggtccgcagccaccgagccgagcccggcacagacgctactggcacgcacgcaccagcaccacaccacatgcatggtggagcctagcacgggcagctagctcccggccggcgacgtgacgaccaccaccaccacatgttgcatgagcagcaggcaccgccaccgccatccatcaaccccgacgacgacggcggccgcgatgtcgaggtcaccacgttccgcgacatccaccctctgacgcccgacgcgccgccgcccgcctccgcgtcctgggacacggccagccaccgctccttgtcgtcgtccgacgaccagcagtacatgacgatgagccgcgagttcacggccatggtcgccgccggggcgaccatgcagaccggcggctacgacggcgccgccgaccagctcaccagcatcggcgaggacgagctggaggagaccaacccgctggccatcgtccccgacagccaccccatcgccacgccagccaggtccagggcgtccgggctggaggtcgtgcccgcgggcccggcgccggcgccgcagccgcccgcgcacctggaggccagccaggtcaagaaggaggaggtggagaccaaggtcacggcctggcagacggccgaggtcgccaagatcaacaaccgcttcaagagggaggatgtggtcatcaacggctgggagaccgagcaggtggagaaggcctccgcgtggctcaagaagatcgagaggaagctggacgagcagcgcgccaaggcgctggagaagacgcagaacgacatcgccaaggcgcggcgcaaggcggaggagaagcgggcgtcggcggaggccaagcggggcctcaagctggccaaggtgctggagctcgccaacttcatgaaggccgtcggcagggtgcccaccaagcgctccttcttctagccagccgactacccccgtctctccctgcctgcgtgtgatcgatgtacgctcgctgctgcatccgagaacctaactgtaaagaaaaaaaaactgtaagctgtatacgtactgcgcctgctggttcccctgtgatgtctgtcagtgtcatccatcacagggtgccagttgttctcttctctttcttttcttttctcttctcttggcttgtatatcggatccatatatgctggtggtgcttgaacgaactgttgttgtttgcttaaccgtgcaaacatatacagtggtatatacactacattcagaacccaatactgcaactgttgttagagctgctacgtacttacttgtgcagagaacagagtatacgggcacgtcgtcacatcactgcgaataggg

SEQ ID NO: 96438 - DNA, 1016 bp, Zea Mays
atgagtgccgcgccgtgcgccgacgacagagctacagatactagccgcctcgagtcgagaggcgggccggctcctcctgcggcgacgacgatgaggatcatggcgcgtacgctccgcggggaccgggtggcgctggacgtcgacggcgccaacacggtggcgcagctcaagtccatgatcatggcccgcgagggcgtagccgccggcgaccagcggctcttcttcgccggccgacacctcgacgacgacggcatgcccgtcgcgcactacggcgtgcgccacggctccgtcgtcttcgtcagcctccgcctccgcgccgacgacgcctcgcaggagcaggagatgcgtaacgtgcaaacgcagccagtcaggaccgttagccaactactgatgattgaccagcagccgatgatgcgcttcgaagacggcgacggccacggccacgaggaggccgtggtcaaggccacgacgacgaggccgccggtgtcgcggcggtcgctccgcaagatcctgtcgcggctgcacgtggacgtgtggacggcccagcacgacgccaagttcctggacctgctgcagcggcgcacgcgcggctgcggcgtgggcgtgggcgacctcaccgcggacgactggtctgccatccgcgccgagctcaacgcggccacggggtccgcattccccgtcgaggatctgcagcggcggctgggcgagctccggcgcgagttcgacgccgtcagccggatcaaggaccacccccgcttcacctacgacgcgcgccgccatgtcgtcgtcgccaaggagaccgagtggaagcgctatgtgctggagaacccggatgcggtggcgtacgaggggagaagcacgcacttcggtcgcctccgggcgatcttctccggcagcggcgcagagacgcgcgggcgcggcgggcccatacgccgcgagtcacgggccaagagatgcctgagcaagctgctgcgcagctttgggctccggtgcaagctgtgagaacggtgacactg

SEQ ID NO: 96439 - DNA, 2357 bp, Zea Mays
ccgtggccggcgccggcgatattttccgtggccgggaccgggagcaggggacaaggcggtgcagactgcgcaggggacctgcatgctgtacgtgcacgccgggaccaaccctttcgacaccatcactcaggcggtcaaggtggtggagagacacatgcagacgttccatcacagggagaagaaaaaggtacggtaccggtctcattgccttcgattcttcggacggacagcttgttgtgttgggttgggtcactcgtgtagaatagaggctagagagagagagagagagagcagtggttggccggcgatgaagagccggcccggcccgggcggtgtcgctttgcgtgaaactgacggtggtggtggtggtggcgcagctgccgtcgttcgtggactggttcggctggtgcacgtgggacgccttctacaccgacgtcaccgccgagagcgtcaagcaaggcctcaagagcttggcggacggcggcacgccgccgcggttcctgatcatcgacgacgggtggcagcagatcggcagcgagaacaaggaggagtccgccaacgccgtcgtccaggaaggggcgcagttcgccagtaggctgacggggatcaaggagaacgccaagttccagaagaagacgaagacgaaggagagcggcggcggcggcggcgagcagcaggcgcaaacgccgggcctgaagctgctggtggaggaggcgaagcgcgagcacggcgtcaggtacgtgtacgtgtggcacgccatggcggggtactggggcggcgtgaagccggcggcggaggggatggagcactacgagagcgcgctggcgtacccggtgcagtcgccgggtgtgatgggcaaccagccggacatcgtcatggactcgctgtccgtgctgggcctggggctggtgcacccgcgcagggcgctgagcttctacgacgagctgcactcgtacctcgcctcctgcggcgtcgacggcgtcaaggtggacgtgcagaacatcatcgagacgctcggcgccgggcacggcggccgggtcgcgctcacccgcgcctaccaccgcgcgctcgaggactccgtggcgcgcaacttccccgacaacggctgcatctcctgcatgtgccacaacaccgacatgctctacagcgcgcgccagaccgccgtcgtgcgcgcctccgacgacttctacccgcgggacccggcgtcgcacaccgtccacgtctcctccgtcgcctacaacaccctcttcctcggcgagttcatgcagcccgactgggacatgttccatagcctgcacccggcggcggactaccacggcgcggcgagggcaatcggcggctgcccgatatacgtcagcgacaagccaggcaaccacaacttcgagctgctcaagaagctggtgctccccgacggctccgtgctccgcgcgcagctcccgggccgccccacccgcgactgcctcttcgccgacccggcgcgcgacggcacgagcctgctcaagatctggaacgtgaacaagtgcacgggcgtggtgggcgtgttcaactgccagggcgccgggtggtgccgcgtcaccaagaagacccgggtgcacgacgcggcgccggggacgctgacggggtcggtccgcgccgacgacgtggacgtgatcgccggcctcgccggggacggctggggcggcgaggccgtcgtgtacgcctacaggtcaggggagctagtcaggctgccccagggcgccacactgccggtgacgctcaaggtgctggagttcgaggtgttccacgtctcccccgtcagggcggtcgcgccgggcgtgtcgttcgcgcccatcggcctgctcgacatgttcaactccggcggggcggtggagcagtgcgaggtccgtggcggcgcgaacgcggccgccgccgtcgcgctcagggtccgcggctgcggccgcttcggcgcgtactgctcgcggcggcccgcgaggtgcatgctggacgcgacggaggtggagttcagccacgacgctgatacggggctcgtcacgctccacatccccgtgccggagcaggagttctacagatggagcctggagatcgaagtctagaggtgctcccggcctgtcggatctgtggcaattgcctcccattcttcagtggattcaccattacacgcgtgcctcagtgtgtggttggcgtgtgtgcgacgtagggaggcgtgtggaacgcatgaaacgggcacgtacgccattgacgcgcctctcttcgtccctagaagaataagctaagcctctgttctaccttgctgcatcgacctgcttgcaataaactgctactatactccatgtgtatgcaatgtgacacaaacaaaa

SEQ ID NO: 96440 - DNA, 2908 bp, Zea Mays
ccgaggatctcgtcagtcgtcacgaaatctccatggctggagcacgcgagaggccaggatatctcgccggagtaacaagggtagaaacatctccggcgtgccacgtgtcagccctttccacggcactacaatacacttatacaccccaggtccccagccgcgcccgcgctatataaagctcccgccccccattcccttcccctcctcccccagccccaggtagtagcttagctagcgtgataatcaccgcgctaaactgatcatatatacacagcaattggcgtgtgacaggacagaggaggagggggcaggctggtaatatctagcaaaagtacaagcgttcctccagtggcgtccagcgctatatagttcgctgtccggcgtcctttccgaccgagcgcgagcgatgacggtgacgccgaggattacggtgtgggatgggcggctggtggcgcacgggcggagcgtcctcgccggcgtgccggacaacatcgtgctcacgcacgcctccggggcggggctggtcgacggcgccttcgtcggcgccacggccgccgagcccagcagcatgcacgtcttcaccttcggcaccctccgggacctgcggttcgtgtgctgcttccggttcaagctgtggtggatgacccagcgcatgggcacctccggccgcgacgtcccgctggagacgcagttcatgctcctggagtgcggcccgggcgacggccacggcgacggcgacgcggcggtgtacgtggcgatgctgccgctgctggagggccagttccgggcggcgctgcagggcaacgaccgcgacgagctggagatcaccctcgagagcggggacaaggcggtgcagactgcgcaggggacctgcatgctggtggtggagagacacatgcagacgttccatcacagggagaagaaaaagctgccgtcgttcgtggactggttcggctggtgcacgtgggacgccttctacaccgacgtcaccgccgagagcgtcaagcaaggcctcaagagcttggcggacggcggcacgccgccgcggttcctgatcatcgacgacgggtggcagcagatcggcagcgagaacaaggaggagtccgccaacgccgtcgtccaggaaggggcgcagttcgccagtaggctgacggggatcaaggagaacgccaagttccagaagaagacgaagacgaaggagagcggcggcggcggcggcgagcagcaggcgcaaacgccgggcctgaagctgctggtggaggaggcgaagcgcgagcacggcgtcaggtacgtgtacgtgtggcacgccatggcggggtactggggcggcgtgaagccggcggcggaggggatggagcactacgagagcgcgctggcgtacccggtgcagtcgccgggtgtgatgggcaaccagccggacatcgtcatggactcgctgtccgtgctgggcctggggctggtgcacccgcgcagggcgctgagcttctacgacgagctgcactcgtacctcgcctcctgcggcgtcgacggcgtcaaggtggacgtgcagaacatcatcgagacgctcggcgccgggcacggcggccgggtcgcgctcacccgcgcctaccaccgcgcgctcgaggactccgtggcgcgcaacttccccgacaacggctgcatctcctgcatgtgccacaacaccgacatgctctacagcgcgcgccagaccgccgtcgtgcgcgcctccgacgacttctacccgcgggacccggcgtcgcacaccgtccacgtctcctccgtcgcctacaacaccctcttcctcggcgagttcatgcagcccgactgggacatgttccatagcctgcacccggcggcggactaccacggcgcggcgagggcaatcggcggctgcccgatatacgtcagcgacaagccaggcaaccacaacttcgagctgctcaagaagctggtgctccccgacggctccgtgctccgcgcgcagctcccgggccgccccacccgcgactgcctcttcgccgacccggcgcgcgacggcacgagcctgctcaagatctggaacgtgaacaagtgcacgggcgtggtgggcgtgttcaactgccagggcgccgggtggtgccgcgtcaccaagaagacccgggtgcacgacgcggcgccggggacgctgacggggtcggtccgcgccgacgacgtggacgtgatcgccggcctcgccggggacggctggggcggcgaggccgtcgtgtacgcctacaggtcaggggagctagtcaggctgccccagggcgccacactgccggtgacgctcaaggtgctggagttcgaggtgttccacgtctcccccgtcagggcggtcgcgccgggcgtgtcgttcgcgcccatcggcctgctcgacatgttcaactccggcggggcggtggagcagtgcgaggtccgtggcggcgcgaacgcggccgccgccgtcgcgctcagggtccgcggctgcggccgcttcggcgcgtactgctcgcggcggcccgcgaggtgcatgctggacgcgacggaggtggagttcagccacgacgctgatacggggctcgtcacgctccacatccccgtgccggagcaggagttctacagatggagcctggagatcgaagtctagaggtgctcccggcctgtcggatctgtggcaattgcctcccattcttcagtggattcaccattacacgcgtgcctcagtgtgtggttggcgtgtgtgcgacgtagggaggcgtgtggaacgcatgaaacgggcacgtacgccattgacgcgcctctcttcgtccctagaagaataagctaagcctctgttctaccttgctgcatcgacctgcttgcaataaactgctactatactccatgtgtatgcaatgtgacacaaacaaaa

SEQ ID NO: 96441 - DNA, 2486 bp, Zea Mays
ccgaggatctcgtcagtcgtcacgaaatctccatggctggagcacgcgagaggccaggatatctcgccggagtaacaagggtagaaacatctccggcgtgccacgtgtcagccctttccacggcactacaatacacttatacaccccaggtccccagccgcgcccgcgctatataaagctcccgccccccattcccttcccctcctcccccagccccaggtagtagcttagctagcgtgataatcaccgcgctaaactgatcatatatacacagcaattggcgtgtgacaggacagaggaggagggggcaggctggtaatatctagcaaaagtacaagcgttcctccagtggcgtccagcgctatatagttcgctgtccggcgtcctttccgaccgagcgcgagcgatgacggtgacgccgaggattacggtgtgggatgggcggctggtggcgcacgggcggagcgtcctcgccggcgtgccggacaacatcgtgctcacgcacgcctccggggcggggctggtcgacggcgccttcgtcggcgccacggccgccgagcccagcagcatgcacgtcttcaccttcggcaccctccgggacctgcggttcgtgtgctgcttccggttcaagctgtggtggatgacccagcgcatgggcacctccggccgcgacgtcccgctggagacgcagttcatgctcctggagtgcggcccgggcgacggccacggcgacggcgacgcggcggtgtacgtggcgatgctgccgctgctggagggccagttccgggcggcgctgcagggcaacgaccgcgacgagctggagatcaccctcgagagcggggacaaggcggtgcagactgcgcaggggacctgcatgctgtacgtgcacgccgggaccaaccctttcgacaccatcactcaggcggtcaaggtggtggagagacacatgcagacgttccatcacagggagaagaaaaagctgccgtcgttcgtggactggttcggctggtgcacgtgggacgccttctacaccgacgtcaccgccgagagcgtcaagcaaggcctcaagagcttggcggacggcggcacgccgccgcggttcctgatcatcgacgacgggtggcagcagatcggcagcgagaacaaggaggagtccgccaacgccgtcgtccaggaaggggcgcagttcgccagtaggctgacggggatcaaggagaacgccaagttccagaagaagacgaagacgaaggagagcggcggcggcggcggcgagcagcaggcgcaaacgccgggcctgaagctgctggtggaggaggcgaagcgcgagcacggcgtcaggtacgtgtacgtgtggcacgccatggcggggtactggggcggcgtgaagccggcggcggaggggatggagcactacgagagcgcgctggcgtacccggtgcagtcgccgggtgtgatgggcaatcggcggctgcccgatatacgtcagcgacaagccaggcaaccacaacttcgagctgctcaagaagctggtgctccccgacggctccgtgctccgcgcgcagctcccgggccgccccacccgcgactgcctcttcgccgacccggcgcgcgacggcacgagcctgctcaagatctggaacgtgaacaagtgcacgggcgtggtgggcgtgttcaactgccagggcgccgggtggtgccgcgtcaccaagaagacccgggtgcacgacgcggcgccggggacgctgacggggtcggtccgcgccgacgacgtggacgtgatcgccggcctcgccggggacggctggggcggcgaggccgtcgtgtacgcctacaggtcaggggagctagtcaggctgccccagggcgccacactgccggtgacgctcaaggtgctggagttcgaggtgttccacgtctcccccgtcagggcggtcgcgccgggcgtgtcgttcgcgcccatcggcctgctcgacatgttcaactccggcggggcggtggagcagtgcgaggtccgtggcggcgcgaacgcggccgccgccgtcgcgctcagggtccgcggctgcggccgcttcggcgcgtactgctcgcggcggcccgcgaggtgcatgctggacgcgacggaggtggagttcagccacgacgctgatacggggctcgtcacgctccacatccccgtgccggagcaggagttctacagatggagcctggagatcgaagtctagaggtgctcccggcctgtcggatctgtggcaattgcctcccattcttcagtggattcaccattacacgcgtgcctcagtgtgtggttggcgtgtgtgcgacgtagggaggcgtgtggaacgcatgaaacgggcacgtacgccattgacgcgcctctcttcgtccctagaagaataagctaagcctctgttctaccttgctgcatcgacctgcttgcaataaactgctactatactccatgtgtatgcaatgtgacacaaacaaaa

SEQ ID NO: 96442 - DNA, 2297 bp, Zea Mays
atcaagccaaacaacccggatccccacgggccacgaccccaccaggccaccacgtatacttgcccacgttccccttcccctcgcatccgtttcgtccgtgcgccgccgccagcatcttctcagcccaggccccagacagagcaaaccccccctctaaaattcggttatatttgggctcccgcctccgccgtcgccctacagtcctacaccaggtgccgaggccttcgccggtcaagagcgcccagcagatccgccactgggtttttggatttggagacatggcggaagtggatgacaagctcaaggactacgagatcaggaaggagggagaggcagagatcctcttgcacaagaggaacgccgtcttttacaatcccgtgcaggttcacaacagagacatgtctattgctgttttaaggacctttattgccaagcgcaaggaagaacatgaagcgctggtggacaagaggaacacatcgcatggaaaagacaaactgagtgaaatatcctgtcaaaatggagaggatgcgtcaactggccagcaagatgaaatggaactaaataaagctgaagttcaaattgatgatctgtcaaaagaagcaacaaaacctccttggaaagtaaccagagaacttaagccaccacttgtcctcgaggctttggctgcaactgggttgcgatctctccggtatgcccgtgaagttgagggcttaggaaagatagttgctctggacaatgataaagcttccgtcgaagattgcaagcgaaacataaagtttaatggtgcttccactactagtaaggtggaaacttacttggttgatgctcgaattcacatgctgatgcatccaaaagaatttgatgtggttgatcttgacccttatggatcaccatctatatttctagactcagctgtacaggctgttgctgatggcggtttattgatgtgcactgccactgatatggcagttctttgtggtgccaatggagaagtttgttactctaagtatggttcattcccaaccaagggcaagtattgtcatgaaatggctttgagaattctcctagccagtattgagagccatgcaaatcggtacaagcgatatattgtgcctgttctctctgtgttcatggatttttatatccgtgtttttgttcgagtattcacttctgcaagtgaaataaagaatacacctctaaaactttcttacatatatcagtgtgttggctgcgactcttttcatcttcaatgtcttgcgaggactgttccgaagaagaataatggtgtgaagcatgcacctgcttttggacctgttgttcctcaagagtgcagtgattgtggaaagaaatttaatgtaggtgggccaatatggtcagctcctattcatgatcaagactgggtagtttctactttgacaggtgttaagtcaatgaaggatagatatcctgcgtatgataaaattacttcagttctaactactgtgtcagaggagctagatgacattccactgtttttcagtctccataacatagcaggcactgtcaagtgcacgtctccgtctctggttatgttccggtccgcagttctaaatgcagggtatcggatctcaagcacccatgttaacccacttggggttaaatctgacgccccttgggatgttatttgggacatcatgcgctgctgggtgaagaaccatcctatcaaggaacaggcacgtgactcacctggcacggtgatcctttcaaaatcgccaaagctagaagcagacttttccagagcagttgctgccctcggcaaatctggggcaaagaagacgaaacgattccttccaaacccagagcggcactggggcccgaaggtcagagcaggccggaagatcacgagcaaacacgtctctctgttgggccctgatgccatcaacgctgccgtgaacggcggcggcggcggtgactgccacagagaagggagcggtgccgcgccagatagtagcaatacagccccagaacccgaggggctggaggacgaaccctcgaacaaacgccagaaagccagcggcgacggggaaccagaaggacagaaggccagcgacggggaaccggcaagcgaagcttgatctgtttggtagtcgttgttgtgcctgtcagcctgtgcttttgctcgttttgtggcccgatgggtgttacctgttttattttgatgcaacgaattttgcttggttttgacagcctgtgggttttagatataagaaaagcaggctccagacccaggcctcgtgcgtgtcgagcctggcaacgtt

SEQ ID NO: 96443 - DNA, 786 bp, Zea Mays
atcaagccaaacaacccggatccccacgggccacgaccccaccaggccaccacgtatacttgcccacgttccccttcccctcgcatccgtttcgtccgtgcgccgccgccagcatcttctcagcccaggccccagacagagcaaaccccccctctaaaattcggttatatttgggctcccgcctccgccgtcgccctacagtcctacaccaggtgccgaggccttcgccggtcaagagcgcccagcagatccgccactgggtttttggatttggagacatggcggaagtggatgacaagctcaaggactacgagatcaggaaggagggagaggcagagatcctcttgcacaagaggaacgccgtcttttacaatcccgtgcagaaaattttggtttgagctccttcggctgttcggtctccatgcctttgctccacagcataacgatttcctacaagagtggtggaggattcagagttcaaagctggatggcctttttcaaaagggttttaattctttggtggttcttggtgcttgggtcctttggaaacatagaaataggtgtgtgttccaagaggggtattcaaatctaaatatagctctaagtaatgctagggatgaggtcttggtgtggagtttggctggagcgaagggcctgtctttcctccaggggtttgacccaggaatccaggatagttagtttgtgtgtacgattgtattggggggtctttcccccttcttctcaatataatgatacacagctctcttgtgtgttctataaaaaaaa

SEQ ID NO: 96444 - DNA, 957 bp, Zea Mays
ccttagctggaccaacaagcatctcgcctgtgaaaattcaacaagacatgaaatcagattttttttcgagcagtgccaaagagtatgatgcacatcttaatttaactgcagattgcatataccggttgtgacacgcttcttttgtcctcctgagatacctctgatcatagagtctccaaccattgtatccacacagatctccagacccagaatctgcaaaagaaatacaattactgttaggggcatatatatccatttctcgtattttctttttctgcagtatatttttacttaccttgaggatgtaatctgttaccacgctctcctgaccttccacggagatagcctgtttgcacagaagcacaaataactttgagtaacctttgtcacttccaatgtaaacacatgatttggttagaattaaatggaattttaccttcatgtaaacatcaacatcaggatctggtttaatgttggcttctttctcccttcttgaaagctcagtaagcatgtctgcgtaatttgaaaacaccatcaggttcacttcaccgaaggtgaataattatctgtgttcctttccaatgtctgtgtttacataccataacgcgttccgactccttgacatcttgcagagaaggcaagtgtttctcggaccgtcatttcgccgacgtgaacatcgtgctacccgatgtatgccgatgtcctctgagggacaaattcatccatgccatgaccattattggagtcaagtttccctgccaaagccagaagtaggcttgttttcccggatccaggaggtccaagcagcaaggacattctgaacgaagtgccagttagtaagtacaactacagaaaaactgaaaaccttgcactttaaaattctttggcttcttacctgccgggtcttatgaccccactgatatcgtgaagaatggagacagacctcttcccgctaga

SEQ ID NO: 96445 - DNA, 2347 bp, Zea Mays
atgggcgccgatgccgcacgcacgccggcgccgcacgcgctgctgctcccttacccagcgcagggccacgtgatcccgttcatggagctggccgaccgcctcctcgaccgcggcttcgccgtcaccttcgtcaacaccgagttcaaccaccgccgcgtcgtcgtggccgccggcggcggccgggcgcccgatggccggctgcggctcgtgggtgtcgctgacgggatgggcgacggcgaggaccgcgacaacttcgtccgcctcaacgcctgcatgaaggaggccatgccgctgcggctcgacgcgctcctcgacgccgacgacgagcgcctcggcagggtcacgtgcgtcgtggtcgacgtcggcatgtcgtgggcgctggacgcggtcaagcggcgtgggctcccggccgccgcactctggcccgcgtcggcggccgtgctcgccgtcctgttcggcgccaagaagctcatacgcgatggcgtcatcgatgacgacggagctccagtgaagcaggagaaccactcgttccggctggccgagtcgatgccccccatggacgccgtcttcctggcgtggaactacatgggcaaccgcgacgtcgagcgcatggtcttccactacctgaccaccaccgcgtgggccgccgtggctaaggcggacgtcgtcctctgcaacaccttcgaggacctcgagccggacatcttcggcgcccactccccggcggccgcctccatcctcccgatcggcccgctgcgcacctgccagcgccggacgagcgaggcgccggccgggcacttttggcgcgccgacgacgaggcctgcgcgtccttcctggacgcgcagccccgtgggtccgtgacgtacgtggcgttcgggagcctgacggtcatgagccccgcgcagctccaggagctcgcgctggccctgctggcctccgcccgccccttcctgtgggtgttccggccggggctggcggccgagctcccgcccgcgttcacggatctcctgccacgccatgcgaggggcaaggtggtggagtgggcgccgcaggagaaagtgctcgcgcaccctgctgtcggctgcttcctgacgcattgcgggtggaactcgacgctggagggcgtccgccatggcgtgcctttgctttgctggccctacttcaccgaccagttcacgaaccaggcatacatttgtgatatctggaaggtggggttaagggtggtgcccgacggcggtgatggcattgtcgccaaggaaaggatcatggagaggttgacgagcctaatgggtgacagtggtgtgaaggaaagggtgaaaagattgaaggaattggcagagaggagcatggggcctgagggcaaatctttgaagaacatcaacgccttcatggaatccatgacgaagcgatctccggtccttgcccctcgtcacctcgtggtgggtcattggatcactgcttcctgcaacctccaaccgggcgggcgcgggccactggaccagcgacacatccggggagaagaaagctcggaggatccgaacgacgctgacggcgaggccgtaaccgcagagcagcggttgttgggatctcctgctcctggtcctggatgctggcacttgaattccagcatgaggtaagctgcagattcttccttctagtctgcaaagagaagagaggggtcatttcttccggcttgatgggcggttccttcgcttcatgggatcccggcccagttattgttatacaaaaagtcgctttgctttcgtagctgcgttcagtgcgtccttcaattggggatccaaatctagtgtcttataaagggccgtcgagttcgtcgtgttaatccctcttgattgaggtgaaaggagggatttttttcctcctggggagagttgactcagggtgctatggagctggattgttccgccactcagcctcgagtggattggaggattcctgagcctgtcaacgcaagtacgtaacacggatgcgtttgagcaatgactttggctgccatctgtattcaggggagtgctcacgttgcgcttgaacttctgaaagataaattagaatttatatacggtaatttctcagggaagtgaggattgtacaatgatctcgagactgaaaggtgccaatgtggtctctggaacaccgctacagtgtttagagagattctgaactgatgttggtaagacctcaggatagatccccttgagcaactaggagcgcttacattccaacgaaaccaaaaattatgtcagttctggagcatcagcgaggctccctgtttactagaagcattttctaactatggattagagagttggaaagttgcaaaccaat

SEQ ID NO: 96446 - DNA, 1717 bp, Zea Mays
gagactgatacacgctcagtcgcttacggctcacccaagaccaagaaccccgggcggacgaaaagatgggcgccgatgccgcacgcacgccggcgccgcacgcgctgctgctcccttacccagcgcagggccacgtgatcccgttcatggagctggccgaccgcctcctcgaccgcggcttcgccgtcaccttcgtcaacaccgagttcaaccaccgccgcgtcgtcgtggccgccggcggcggccgggcgcccgatggccggctgcggctcgtgggtgtcgctgacgggatgggcgacggcgaggaccgcgacaacttcgtccgcctcaacgcctgcatgaaggaggccatgccgctgcggctcgacgcgctcctcgacgccgacgacgagcgcctcggcagggtcacgtgcgtcgtggtcgacgtcggcatgtcgtgggcgctggacgcggtcaagcggcgtgggctcccggccgccgcactctggcccgcgtcggcggccgtgctcgccgtcctgttcggcgccaagaagctcatacgcgatggcgtcatcgatgacgacggagctccagtgaagcaggagaaccactcgttccggctggccgagtcgatgccccccatggacgccgtcttcctggcgtggaactacatgggcaaccgcgacgtcgagcgcatggtcttccactacctgaccaccaccgcgtgggccgccgtggctaaggcggacgtcgtcctctgcaacaccttcgaggacctcgagccggacatcttcggcgcccactccccggcggccgcctccatcctcccgatcggcccgctgcgcacctgccagcgccggacgagcgaggcgccggccgggcacttttggcgcgccgacgacgaggcctgcgcgtccttcctggacgcgcagccccgtgggtccgtgacgtacgtggcgttcgggagcctgacggtcatgagccccgcgcagctccaggagctcgcgctggccctgctggcctccgcccgccccttcctgtgggtgttccggccggggctggcggccgagctcccgcccgcgttcacggatctcctgccacgccatgcgaggggcaaggtggtggagtgggcgccgcaggagaaagtgctcgcgcaccctgctgtcggctgcttcctgacgcattgcgggtggaactcgacgctggagggcgtccgccatggcgtgcctttgctttgctggccctacttcaccgaccagttcacgaaccaggcatacatttgtgatatctggaaggtggggttaagggtggtgcccgacggcggtgatggcattgtcgccaaggaaaggatcatggagaggttgacgagcctaatgggtgacagtggtgtgaaggaaagggtgaaaagattgaaggaattggcagagaggagcatggggcctgagggcaaatctttgaagaacatcaacgccttcatggaatccatgacgaagtgattgttattgtgttattgttttattttcgggaatgactagccctgatgtccaaggcatgttccaacatccaacaagaccatataagatatctggagaaaatatcttcaacgatttatcaaaatacatgttgcaatatcaagaaatatgaagaaaaaatatcacagtaccatcaattcgaccgggagaaaaaaagcacacacgaaactaaagtagcatcattcatagattaatcaatgaaaaaa

SEQ ID NO: 96447 - DNA, 973 bp, Zea Mays
gagactgatacacgctcagtcgcttacggctcacccaagaccaagaaccccgggcggacgaaaagatgggcgccgatgccgcacgcacgccggcgccgcacgcgctgctgctcccttacccagcgcagggccacgtgatcccgttcatggagctggccgaccgcctcctcgaccgcggcttcgccgtcaccttcgtcaacaccgagttcaaccaccgccgcgtcgtcgtggccgccggcggcggccgggcgcccgatggccggctgcggctcgtgggtgtcgctgacgggatgggcgacggcgaggaccgcgacaacttcgtccgcctcaacgcctgcatgaaggaggccatgccgctgcggctcgacgcgctcctcgacgccgacgacgagcgcctcggcagggtcacgtgcgtcgtggtcgacgtcggcatgtcgtgggcgctggacgcggtcaagcggcgtgggctcccggccgccgcactctggcccgcgtcggcggccgtgctcgccgtcctgttcggcgccaagaagctcatacgcgatggcgtcatcgatgacgacggtgagtactcgtactgtcgtactcattattaatattaatggccgctacagtgcggggcagcacaactgtgactactttactcattattaatggcgtcggcgtcgtcgatggctgcgttcttgggctgggaaccaatggccaaaggcccaaaggccaaagctgaagaatggtgcgcgtgcgtgcaggagctccagtgaagcaggagaaccactcgttccggctggccgagtcgatgccccccatggacgccgtcttcctggcgtggaactacatgggcaaccgcgacgtcgagcgcatggtcttccactacctgaccaccaccgcgtgggccgccgtggctaaggcggacgtcgtcctctgcaacaccttcgaggacctcgagccggacatcttcggcgcccactccccg

SEQ ID NO: 96448 - DNA, 1413 bp, Zea Mays
gaggagtagaagttgccgaaccttattaaaccaaacgcaaaccctagcatcccgaattcgccagtcgccatgaagtcgttccggcgctgggctgacctgccgccggatttcctctgctgcatcggagaccggctcgagctcaagtggtacgccagcgcgcggggcgtctgcacgtcgtggcgccgcgcgctcgtgccgccgtcgcccgcgctcctcgtgatcgcgaagagcgacagctgttacccctacgccgccgcatccctgcccacggggaggtccttcgagctcaccgccttcatctcaggatggcgctgcgtcggatccagcaacggctggctcgcgttctccgtccacgagaccgtctacgtgctcctcaaccccatcgccgcggtgcaaatcatcctcccaccgcttaactacggggacgagtacaatagccactgggactggtgggtttccaagatcgtcttcaccccgagcaccgccaaggatgacttcgctgccgccgcgatctgcggcatcgacaggatcgcgtacatcaccgccggtgccacgaggtgggccttcatgggcgtccgcctcagcggggaggtcggggacaagctcaccgacgtcgtctacactgacaaaggtaaattctactgtctctccatgtacggggacgtgcatgtactccgtctccctgcgcgccggtgccggaagcctgccaacgccgaagaggcggggtcctcagagctaaagttctctgttctccggccgctgccgcctgctagacattcaagtattgtctccccgctgtgttgggaaaattatcagatgctattgatgagtgaggacgaagttccaccttcgcaaggacgacgcctgaatccaccggccactcttaaacccctgttgccgcggttcggccctaccactctatttgctccaccttatgacaccgtgagggatttcactagcgccaagaacttggtgttctgtgacggcaatctgtaccaagtttggaggaacgaaagctgcaccgtgactctgcgtctgcctgctgggggtcagcgtcgtgtggccgaaaatgagatagtggtgctgaagtactgtcctgggcgccagccttcctgggatgtggtgaaggacctaggaggttactcactctttgtgggaacgaacaatgcagtgtcaatgtatgcagagggtgtgccgggactgaggggcaactgtgtatactggattggcggccgtgctacgaggaataagggcatggtctttgacatgaaatctgggaggtccacgccgtgcagggctcctcaggctggctctttacctggtggtcatgattatagcacagtctgctggtacttcatgagcgatgtaatcaacaacagctacaacggtagcaggcaaaatgttgaagaatga

SEQ ID NO: 96449 - DNA, 84 bp, Zea Mays
cgacgcttgaagaaggacctaatgtgagcttttacatacttgatgaacagcttgagctcttgagcaaggtgctgaatgcagggg

SEQ ID NO: 96450 - DNA, 263 bp, Zea Mays
gatccttggttctgtactacaattctaaaacctgttttggagttggatcatttagttgtattccccaagagctttttacttaagtatctgggatgtgagagaacttagttttgttcacaataaagctgccattatatccttatttatcaaagaaacttggagacataatggaaatgatgtttggtgggcgttatgtaattatggtgatggcggttttttcaatctacagaggattaatatacaatgaattttctttattctat

SEQ ID NO: 96451 - DNA, 820 bp, Zea Mays
ccgagtcctctccatcctgctggactcccattcaatatagagtcgaaaccaaacgatgacatccgacgacgtggcttccgaatcgatcgatttcgaagcgtttcttttctcccatttccaagttccgggcactcccatggcgcatggcgccggtggccatggtccgccccacactggcggcgagggtcgatctcccccgggccacaggcggctggcagtgccaagggagaggactctttgcacgcggtggccgtgggccgcacatagggccagggcacagctgaaggagaccagtggcgtttggcggctgtatggcagcgatggccggcgaccgccgactccaagatcctgccccctgatgggcatgacaagcaatgatggtggcttcgacgatgcacaatcatcgattcttcaatatactacacctacgaaggcaattactatcaaattgctgcaatacgcgtttgaacacaacaatgacattgtgcctctggctgatataataatttttgaaagtgatagtgattgttatatggataactatatgaattgtcaagtaaactaccatgtcgttgatgcaagatatcctaatcgcattgggtacttggcaccttacaagggtgagagatacgacataccaaagtggtatagagcgaaatggcatactctctatagaatcccgttatatcctatatggaagcaaaatatgacagttgtggcgacaatggtgcttcataattatattcgtgagcatggcgtcgaggatatagattttgacagtgtggagcgtgatgaggattatgatccaacaatatcatga

SEQ ID NO: 96452 - DNA, 2244 bp, Zea Mays
ataataatcacattgtcctcgtcgtcctatcctccttcgcctgctcgctagtcgctagccgctccccccaacaaacaaccctaatccgtgaccgtggacacgccgcaagctccatcgcgcgaatagattggggggattcaatagaggctacgcggggattggtcgcgctcgagatctcagcaccctcgcgcctgaaatctttctattgttgtcgtggtgatgagatcttggggagcgcgactcgctcggtcctgagatgctggcgggctacggcggcggtggccgcagcgtccatctctcctcccacaaggacctcctcctcggccgctgcggccggagcttcctcttcggcaacacgtggtttctcctctccacttacccggcgcgcctcctgcacaccacggaccgtcgcgctccctccgctttcgtcgccgccatcaaccgggtcccctgcgtgcggtcgcactgcacggggcagggcctgctgcagagaggcagcattgtcatggctgcctgcggctatgttcttaggcgagctgagctgggtgctgccaagcgccagcagccggataaggacccatctggcggaacacgcgcctcccgtattgcagccatggggtcactgggcagtgctgcgcggccagaggtgtctttcaggtacagggggctggagcattgtaagaagattggtgcaagcttgaaatgccgtgagccatgggggaatagtgcgttctggacaaatgccactgggccgggttggaagttgagctttacagttgagccatggactaaggactttagtacggcgtgtgcagcgccgtattctgctggagccacagaggatcaattgccgctcaatgagaagatgaatagctccactgttggaatgtccccagtttctgaaaaattgaagttgctctctggttcatgttacttgcctcaccctgctaaggaggcaactggtggtgaggatgcacatttcattagcattgatgagcatgtgataggcgtagcagatggtgttggtggttgggcagatctcggtgtcgatgctggactatatgctaaggagctaatgagaaattcaatgagcgctatcaaagatgagccagaagggaccattgatccaaccagagttttggaaaaggcttatattagtacgaaagcaagggggtcatctaccgcgtgtatcatcactcttaaagatcagggtatccatgctgtaaatcttggggatagtggtttcgtagtagtccgagatggccgcactgttctcaggtcaccctcacagcagcatgatttcaattttacttatcagcttgagagtggaggtggcagtgatcttcctagttccgcacaagtatttcactttccggttgccccgggtgatgttatcgttgctggcacggatggactatttgacaatttatacaacaatgagataagtggtgttattgttgaagctctccgggttggacttgagcctcagattgcagcacaaaaaattgccgccctggctcgacaaagagctacggacaaaaataggcagtcaccttttgcatcagctgctcaagaagctgggtaccggtattatggtgggaagcttgatgacataacagtcgtggtctcatatgtgaaaagcgctggagccccatgatctgagcctttcttttattagatgtaatgtacataaatcattgtcccgaactggcggcgtatgtatgcaccagggcatagaagcttattctcaaggtgtggaatcccctgatcctagaagcacctgtgctgggttcagtatggttgcgctttagccctggaacatgttagcaaaccattgcaccattttacttgtttgccactgtgagaaatcgttttctctaattatctgaactcttgaagccagggtgggtttgtttccccccttggagttggaggataatgaccagctggaaccaaattttgttgtaaacagcgttgattgccgaatgatagttatagacatcttggactaaatggtgaaccagcgatgctgtttgaaatgcctttttggtctcggggtctttttgtttcactgctggcttaaaaattgttgagttgtgtgctgtaaaaaaatgttgtgagttttgtgatgtgaaaatatgtcatcctagagatttatatttgtatgtgtttttgtaaggatgcacgtgcccctcctgagctaccattatctaattatgattgtggtattcaatcgagacatct

SEQ ID NO: 96453 - DNA, 2252 bp, Zea Mays
aaataataatcacattgtcctcgtcgtcctatcctccttcgcctgctcgctagtcgctagccgctccccccaacaaacaaccctaatccgtgaccgtggacacgccgcaagctccatcgcgcgaatagattggggggattcaatagaggctacgcggggattggtcgcgctcgagatctcagcaccctcgcgcctgaaatctttctattgttgtcgtggttcaggtgatgagatcttggggagcgcgactcgctcggtcctgagatgctggcgggctacggcggcggtggccgcagcgtccatctctcctcccacaaggacctcctcctcggccgctgcggccggagcttcctcttcggcaacacgtggtttctcctctccacttacccggcgcgcctcctgcacaccacggaccgtcgcgctccctccgctttcgtcgccgccatcaaccgggtcccctgcgtgcggtcgcactgcacggggcagggcctgctgcagagaggcagcattgtcatggctgcctgcggctatgttcttaggcgagctgagctgggtgctgccaagcgccagcagccggataaggacccatctggcggaacacgcgcctcccgtattgcagccatggggtcactgggcagtgctgcgcggccagaggtgtctttcaggtacagggggctggagcattgtaagaagattggtgcaagcttgaaatgccgtgagccatgggggaatagtgcgttctggacaaatgccactgggccgggttggaagttgagctttacagttgagccatggactaaggactttagtacggcgtgtgcagcgccgtattctgctggagccacagaggatcaattgccgctcaatgagaagatgaatagctccactgttggaatgtccccagtttctgaaaaattgaagttgctctctggttcatgttacttgcctcaccctgctaaggaggcaactggtggtgaggatgcacatttcattagcattgatgagcatgtgataggcgtagcagatggtgttggtggttgggcagatctcggtgtcgatgctggactatatgctaaggagctaatgagaaattcaatgagcgctatcaaagatgagccagaagggaccattgatccaaccagagttttggaaaaggcttatattagtacgaaagcaagggggtcatctaccgcgtgtatcatcactcttaaagatcagggtatccatgctgtaaatcttggggatagtggtttcgtagtagtccgagatggccgcactgttctcaggtcaccctcacagcagcatgatttcaattttacttatcagcttgagagtggaggtggcagtgatcttcctagttccgcacaagtatttcactttccggttgccccgggtgatgttatcgttgctggcacggatggactatttgacaatttatacaacaatgagataagtggtgttattgttgaagctctccgggttggacttgagcctcagattgcagcacaaaaaattgccgccctggctcgacaaagagctacggacaaaaataggcagtcaccttttgcatcagctgctcaagaagctgggtaccggtattatggtgggaagcttgatgacataacagtcgtggtctcatatgtgaaaagcgctggagccccatgatctgagcctttcttttattagatgtaatgtacataaatcattgtcccgaactggcggcgtatgtatgcaccagggcatagaagcttattctcaaggtgtggaatcccctgatcctagaagcacctgtgctgggttcagtatggttgcgctttagccctggaacatgttagcaaaccattgcaccattttacttgtttgccactgtgagaaatcgttttctctaattatctgaactcttgaagccagggtgggtttgtttccccccttggagttggaggataatgaccagctggaaccaaattttgttgtaaacagcgttgattgccgaatgatagttatagacatcttggactaaatggtgaaccagcgatgctgtttgaaatgcctttttggtctcggggtctttttgtttcactgctggcttaaaaattgttgagttgtgtgctgtaaaaaaatgttgtgagttttgtgatgtgaaaatatgtcatcctagagatttatatttgtatgtgtttttgtaaggatgcacgtgcccctcctgagctaccattatctaattatgattgtggtattcaatcgagacatct

SEQ ID NO: 96454 - DNA, 2012 bp, Zea Mays
aaataataatcacattgtcctcgtcgtcctatcctccttcgcctgctcgctagtcgctagccgctccccccaacaaacaaccctaatccgtgaccgtggacacgccgcaagctccatcgcgcgaatagattggggggattcaatagaggctacgcggggattggtcgcgctcgagatctcagcaccctcgcgcctgaaatctttctattgttgtcgtggttcaggtgatgagatcttggggagcgcgactcgctcggtcctgagatgctggcgggctacggcggcggtggccgcagcgtccatctctcctcccacaaggacctcctcctcggccgctgcggccggagcttcctcttcggcaacacgtggtttctcctctccacttacccggcgcgcctcctgcacaccacggaccgtcgcgctccctccgctttcgtcgccgccatcaaccgggtcccctgcgtgcggtcgcactgcacggggcagggcctgctgcagagaggcagcattgtcatggctgcctgcggctatgttcttaggcgagctgagctgggtgctgccaagcgccagcagccggataaggacccatctggcggaacacgcgcctcccgtattgcagccatggggtcactgggcagtgctgcgcggccagaggtgtctttcaggtacagggggctggagcattgtaagaagattggtgcaagcttgaaatgccgtgagccatgggggaatagtgcgttctggacaaatgccactgggccgggttggaagttgagctttacagttgagccatggactaaggactttagtacggcgtgtgcagcgccgtattctgctggagccacagaggatcaattgccgctcaatgagaagatgaatagctccactgttggaatgtccccagtttctgaaaaattgaagttgctctctggttcatgttacttgcctcaccctgctaaggaggcaactggtggtgaggatgcacatttcattagcattgatgagcatgtgataggcgtagcagatggtgttggtggttgggcagatctcggtgtcgatgctggactatatgctaaggagctaatgagaaattcaatgagcgctatcaaagatgagccagaagggaccattgatccaaccagagttttggaaaaggcttatattagtacgaaagcaagggggtcatctaccgcgtgtatcatcactcttaaagatcagggtatccatgctgtaaatcttggggatagtggtttcgtagtagtccgagatggccgcactgttctcaggtcaccctcacagcagcatgatttcaattttacttatcagcttgagagtggaggtggcagtgatcttcctagttccgcacaagtatttcactttccggttgccccgggtgatgttatcgttgctggcacggatggactatttgacaatttatacaacaatgagataagtggtgttattgttgaagctctccgggttggacttgagcctcagattgcagcacaaaaaattgccgccctggctcgacaaagagctacggacaaaaataggcagtcaccttttgcatcagctgctcaagaagctgggtaccggtattatggtgggaagcttgatgacataacagtcgtggtctcatatgtgaaaagcgctggagccccatgatctgagcctttcttttattagatgtaatgtacataaatcattgtcccgaactggcggcgtatgtatgcaccagggcatagaagcttattctcaaggtgtggaatcccctgatcctagaagcacctgtgctgggttcagtatggttgcgctttagccctggaacatgttagcaaaccattgcaccattttacttgtttgccactgtgagaaatcgttttctctaattatctgaactcttgaagccagggtggctggaaccaaattttgttgtaaacagcgttgattgccgaatgatagttatagacatcttggactaaatggtgaaccagcgatgctgtttgaaatgc

SEQ ID NO: 96455 - DNA, 2488 bp, Zea Mays
atggacacggagccgttcgacgaggcggagctcctggcgctcccaccgtcccccgtcgcgtccccgcctcgtcgcctcaagcgtctcaagaaatcctcctcccaagccaccgccaccaccgccactaccaccagccctcatgtcggctccccgcctccgcctttgtcgcctccgcctccgccgctgctggcggaggcgacgccgggcgaggaaaccctggcgttcccttcccgcgacacctccccacacccgccgacgccgccagatgcggatgccccgactccgctaccgcatccctctcccgcccccgtgtcgccgccgctgcagccgaccgtcacccccgacaacgacagcgacgaggaggacgacgggctcgacccgctgttctccggggccgccggcgtcgcgcagtgggacccgctgggcgcgccggccgaaggggacggtgagggcgacgacgacgacgacggactggggggcggcggcctcatcgaggagctacggagggaacagaggtctgcgaagaagcgtctcgacatggacgaagcggacggggaggtggcttcgggtgcgggggcgagggcggaggcaaaggggaagaggagcaagaggaagaggaaagaggaggcaccgaccatggagtcggcccgggagaagaagcgatctgagaaggaaaggagggcgcagcttgattcgatccatgccgagtcacagaggctgctgcgggagacgaggaaggcgtcgttcaaaccaactgtgcagccagttcacaagcccatctcatctgtcctggagaagatccgccttcgtaagatggaggttctgaagaagtacagatttttctctctgagatcaaatacttctattgaagacagtgatgacaatgatgctgttccggagccagtggttgatttggctgagcaattggatgtgcctcagtctaaagaagtggcacttgataaagacttgaggattgatggcgctgaaaaggagcttggagcaaatggccacagccttgatcggtgtgatagtgttcaagaggatgaggatggtttgagttgcaaggagaaatatctctataactgtggtaccaaagcttcagatgaggaattttctgatagattgcaagagaatcacgagaacacccagccaagtaataatcataacgattcagtagatcagagtcaactgcccccttcttcaagccctactgagagtacagatgaaatttcatcagaagacgaagaaaataatgataaagagaacatggatccaagcgctcagaataatgatgtacatactcttgaacacctccaacaagccatcggaggaaactcacgtccagatgatgctatcttaaaggattttctagatgatgaagctgaggaagaggatgatagtgacaatgacatgactagatttaaggacaatgaagaagatgatggaagcgatgaaaacgaggtgttcaatgacctaatagcagctggttatgaagaaaaagaagtagatcacgagaagcgtaatgaactccaccaaaagtggcttcaacaacaggatgctgctgaaacaaataatgttgataataatacattgatatccccattagaagatgacaactcaagggaggtatttagtctaataaagaagctcaatattgctcctaaacctaagatgagaggaaagcaatcaacatcaaatcatgaaatgcttatggctggaaggaacaccattgcttcaaagtcatcgtttcttggacgaacagccagtggttcactggcatcttctcacagatcagtctatagatcctatgtatttggtcgtgatgacagcaatagcagcagtaggagctgcatttctacttcagagagtaatttagatctggatcagaccaattcctctcaacccaagaaggccaagttcagttcacagccgaaaccagaggggacaagggcaactccagagtgtaacacgagttcaggtgtttccctcttcgacgtcctgcgcaggacttcagagcagagcagtcaggaaagctgtagcacaatcacagaaagtcaagctgtgcaccagttctcggcattcaagttatcaaggaggttttccaaggtgggttcaaaaaattgacaaactctagatggctgttagtatcgagagggttactgttggagcttatggggcaacgcgttgagttagtttcgagcttcaaaccgccaaaatgttccggattgcaccatgagcgccaggtgttttatgcacgaactgagaatgctgagacctggccctgttgtagattatgaaacccagaatcttgttgtgtgtactcgtatgctcttgagaacgcacgctgagtttcctgagatgtttaaagtggagtgtaatgtttgcttattctctctgcattgtctcatgagataggtagatgttgtaaggcttttaccaaaaccaaatgttcgaaatattagatgtaaccatacattctgttcatgga

SEQ ID NO: 96456 - DNA, 464 bp, Zea Mays
taaattgagtttgccatcacctccccctcgccacaacgatccgttcgaacccttccctgagcgcagccatgaccggcgatgcccgcgccatcgccgcagcaggctgccaccgcgggctcgcgtggccaggccacctggagctgccgccggcccagccaactccttggctgtgcgcgcgctccaccagggacggctcggctggccccgccgcgctcggccgacgccggcgagccccgaccaggaaaggccgatcccctttccctgtacgttccaaggaagaagacgatggaccaatctgcaaattccagaacagcaggggggtaagtgaagggtttgtgactcttgtgaatagtgctgaaagggcatatgtgctgatgtgtaggcacgtttgtttcagggacctgggtgaaagtttgttgttcccattttcggttttatatctcagattttgtgctgaagtttga

SEQ ID NO: 96457 - DNA, 2647 bp, Zea Mays
cggccatcgcataggtgacgccaccgtccctgtcccgccgtcgctacgaatttgctacacctacacgttttcatttgctggtttcgccgatgatctgatcacggcgcgctacttcgcctacttgcctgcttcagcttcaatccatcggggggttcctttcagttaataagatcgatttgaaaagcgcacccggcaacctgctccgctcctgcgctgtttaggttccggcctgtgtcaaagcgtgcatctcacgcgaggcgcaccaaggccggagccctggccacctagggtcacctccctgcgatcgggccgcggcgacggggacggccgcgatgggcttcgagcgtgtggagctgcgttgccccagggacctggacccgcgcccgagctggacgctcggcgacgtgctcgccgagctcgacgcgctagacgccacccgccgcgctgcgccgcccacgcccctgaagcagccgccccattgggttaacggcgtcggtacgagggagaaggcatttgtgatgcgggttgatggctacgacgaagacgacttagaagatgaagacgatggtacaagtgctgggaagtcccgggctctcatggctaaaggagcaaggttctcgtgtaacgatctccaatcaagtgattcagaggatgaattagatggccaagttaccccatacaacttaatggagaaaagggacctagcgaagagcattcttcttgagcttgaaagcgagcatcatctaaaagttcaagaagaagttagaagtaagctagctttgttggaggtatgccaccaaaatgaaatccatagaaccatttctgcatttgcccgacttcagaaatatgcagaatcaagaaaagagatcgacagaagacttgatgtacacttccagagaagaatggcagaagtactcgataagcacttatctatggtccaaagggatcatgaacaaaaatcccagattgttgaacgtcgaataagagatgatgcagctcttgaagaagctaaaagaaaagagcaagctgtcaaggaagaaaagttaaggcaggaaagagcccagcaagaagcagaggctaggcagaaggaagctgcaaagttagcagctgaagcgcgaaaaacagcatttgaggctgctaaaaaggaagcggcagaaaagcaggctgctaaattgagagatgcagcagcaacttcccaatctagtccagatttgcagaataatattgcagacatcaaagtttttggcgttaaatatgcattagaagcagagtcacggaggtatgcattagtacagaatcaagtgccagaaaacattcatcacaacaaggaattcagcaaatatgaccgacaaattgccaaatccataagtaaacttatgccaactactgatagtgtcagagcaagggctagtgagcttattaaagctttagatggacaggattgtccccgtccaatctcttgttgtctatttgcaaacaagattatttctattgtcaagagtagaaatacaaaggacagaaccttcggaaatttggcctttgcgtgtggatatgtcatgctattagtcacaaatcaggtaccagatgcaatggactatcttttagctgagttcaacagagtttgcatatacacggttccaaagcatttgcatgctttaaatgtaagtctgcatggtatgactctgtaatatatttggaatttgtttatttctgactcttatatgggatgccatgagaaaacgccctaatagacacagcaatgctcagaattatttataatgcatttttaacaattgtatgcagcagatttgtggaccaaaatgctgtgacatactgtcacccactgttttatataaatgtatcgagctttggatttttttctcacgatatctgtaattttataggcagaagcacgaaatagagattattacagactgataggttaccaggaagaaaatggacaattcgagagcactgaaagttatctaacatatgtcgttgcatatgtcaaattgtacgcggcaatgattcaaacagaaatcaagggtgtacgccatcctcatggcttagctgagggatggaaatggctcgccatgttcctcaattctcttccagctactacagccactgcttgtgcccttcacgccttcctcaagatggctggttttgcacttcacaagaaatatggatcgcagttcatgaaaatcctatatgtgatttcacggtactttttaccggctttgaaggaacaaggcaacaagatgcaggctgaggctgtcaacaatctacagaattatctgaacgacaagatctacctggaggaaccagaagggcagtacctcgtccagcaattactatcgaaagagttgttcatgtaaagttcaaaacaccagatcgtgtgattgactctgaagggcgcacctcgtataagctactactatcgaaagagctgttcgtgtttcagaaacgcaagcgagccttgtagagatgacctgcaaggaaatcagtaccaaatctccccaacatttgtagtcttaaccgtagaggagatgaccctgcatgaaatatattgaatattatttgtacgtgctattaccttagtgtttgaaattattgattatttatttttaactcttcatttatcaaa

SEQ ID NO: 96458 - DNA, 1456 bp, Zea Mays
cacctctcctttctctctctagccccgcacaaatctctcctcccctctcgccctcgccgcattgcccgccgacgaccccccggcccccgccggatagagaggaggaggagcggcgcggctgcgggagagccgggcggcggcggcggagcgggcttcatgtgcgacctagtggcccgcacgggccggcatcagcagcggtacgaggatggccgtcggctagtggccggagtatccaatgaccgattaccagcgacactgatatgacgtgcagaaattctaaagactagaagaaaggaaatagaaacacaaccactggctccacatgtagcagcggcatcagtctttaactccagtggtgtgaaacatcatcagcaagccagcttcccagctgatgaaggcagtaacacttaacacagcctcccagatgatgagggatgagccacgcacccatcaagttggtctgcccgccgccgacccccatgctcagccactgctgcgacgacggtgacggtggcctggaagtcctcctcgcgcaggggatgcgaagcctgccggcctgcacgaaggcgaactcctctgcggcgcgctccatgatctcctagaacgccgactggctgagatgcataccatttaggtatagagctaacaatgatgaaacctctggtgacaaaactaagaaactcgtggaagttctcatgataaattcccaaagcggacctggtcttttgtttccaaagggaggatgggagaatgatgaaactgttgaagaggcagcagctcgagaagctatagaagaagctggagttcgaggtgatatagtgcattttctggggctctatgacttcaaaagcaagacgcatcaagatgcgtgctgccctgagggtatgtgcagagctgcagtgtttgcgctgcatgtaaaggaagagctggcctcatggcctgagcagagcacccgacagaggacctggctcacggtccctgaagctgcatcaagttgccgataccagtggatgcaagaggccttgctgacaggcttctctgactggcacgacaagtggagcagaggcggcggcggcacaaactgtgacccggcctaactgctgacaggcccatctgcagtcgtccaatttgttcatctcctctctttccctaggcccccaaccttgcagaatgcaataatacagtgtacttgtcttgatgctgggttggtcattgacatgttatcttagttgtagtgggacgaggtacatctcatcaagacgagaattctcacaacttttaagtgtcaattctcgtgccctattatttctcggtttcatccgctgtcgtcgcggtgctgcagcctgcaggcacgcgccgcacgcattttgtaactccgctcctgattctggagatgcatatgctatatgtatgaactggtataactttgaaatcaaaagttgccactgttgactcg

SEQ ID NO: 96459 - DNA, 1360 bp, Zea Mays
ccttttccaccgaaaaccagcccggccgcccggcggcgaggaggaatccccattccccccctcctcacgcacgctcctcgccatctttagcctggaccccacctcccgtgccccggccattaaagcgggggacgccgacccgggctctccctgcctcctcgtcccgtccctcccagcgccccgttccattcgaccgccgaccagatccacccccaacacgtccagccatgccggcgccgccgcatccaacgccgctgctgccaccggcgggggagccgttccgcgtgttcgtggggtacgacccgcgggagcacgaggcgtacgaggtgtgccgccgcagcctgctccggcgctcatcgatcccgcttgacgtgcgcccgatccggcaggcggagctgcgcgccgcggggctgtacacccgggcgcgcggccccacggagagcaccgagttctccttcacgcgcttcctcaccccgtacctggcggggtaccgcggctgggcgctcttcgtcgactgcgacttcctctacctggcggacctggccgacctcctcgccgccgcggccgccgccgaccgcgcggccggcgccggccgcattgccgtcgcctgcgtgaagcacgagtaccagcccgccgaggccaccaagatggacggcgccatccagacggtgtacccgcgcaagaactggtcctccatggtgctctacaactgcggccaccccaagaacgtggccgcgctcactccggaggccgtcagcacccagacgggtgccttcctccaccgcttcgcctggctcgacgacgacgagatcggggaggtgcccttcgcctggaacttcctcgtgggccacaaccgggtcgacccggccgacccggccacgcgccccagggccatccactacacctccggcgggccgtggttcgagcgctacagggactgcgagttcgccgacctctggctcaaggaggccgaggagctgagggccgacaaggacaaggaaaacgacaagctcaagctcctcaaggacatggacgacgccaacggcaagcaggaggtggaggaagagacggcgcaggagaaggagaaggagaagggcaagtgatggtggtattcatccatggatcggtggtgctgcattgtgtggaagtggattggttcgtttctgtgctttgctgctatagagatttcattctttcatctgtcttcaacaccaatgtagcgttccattccatcgatctgttactgctgatgtctgggagattaggatgattggtaggcctgtatggagtaagaaggaataatttgtagctgcaatcggatcatcatcctttaataaggaatgccaaccctatgtgcttc

SEQ ID NO: 96460 - DNA, 2534 bp, Zea Mays
aaaaaatccttatgaaacgagttgtcccgatcaagccaatatcacacccaaatcccgcaaaaccctaagccaagcagggagggagaagacgcgaggagagagagagagagaggaggtgcgcggcatggcgggtgcgacgtccctggcggcggccgctaatctggcgggcaagtcgagcgtgcgggtcgtcgtgatcggcgaccccggcaccggcaagtccagcctcatcgtcgccctcgccaccgagcagttccccgagaacgtaccacgcgtcatgccccccacccgcctccccgccgactacttccccgatcgcgtccccatcactatcatcgacacgtcgtccagcccggagcagaagccgaagttgatcgccgagtgccaggcagccgatgcggtcgtgctcacctacgcctgcgaccggcccgccacactggagcggctcagttcgttctggcttcccgagctccggcgacttcagttgaaggctccagttatcgtggtggggtgcaagctggacctgagggacgaacagcaggttagccttgaacaggttatggcgcccatcatgcagtccttccgcgagattgagacatgcattgagtgctccgctcttcggcagatccaggtgcctgaggtcttctattatgcccagaaggcagtacttcacccaactgctccgctcttcgatcaagagttacaagctctgaagcctcgatgtgtgagagcgttgaagcggatatttattatatgtgataatgacaaggatggtgctctcagtgatgtggagctcaatgaattccaggtccgatgctttaatgctccactccagcctactgaaatttcaggagttaagagagttgttcaggagaagatgcctgaaggcgtaaatgaaagcggccttaccttgactgggttcctttttctgcatgccctctttattgaaaaaggtcgtttggaaactacttggactgtattgaggaaatttggttacgacaatgacatcaagcttagggatgatctcattgcaatgccaattaaaagagctcctgatcaaactctggaaatgacaagcgaagtggtcgatttcttgagagggatattcaacatgtttgacattgataatgatggagctttactacctactgagctggaggaccttttctcaacagcacctgaaaacccatggatttctgatccctataaagactgtgctgaaaagaatgtgttgggtggtctgtcacttgaaggttttctctcaaagtgggctcttatgacacttctagatccaacaaatagttatgccaaccttgcatatgttggttatcctggtgagttcagttctgcatttactgtcacaaggagaagacgagtggatcgtaaaaagcaacatacgcagagaaacattttccagtgttatgtttttggtgccagaggctctggaaagacgtcgttgctacaatcattcattggaaggcaaccttctgacactctgccatctaacagcgaacgctttgcaacaaattctgttgaaatggctgatggaactagaaagacgctaatactgcgagagatacctgaaggtgacgtgagatcgttactttctgacagggaatcgttggcgccatgtgatgtagcagtatttgtttacgatagctgcgatgaatattcatggcaaagagctagagacttgcttgtgcaagtggctacacatggagaaaatactggctacgaagttccttgcttgatagttgctgcaaaagatgatcttgaccaatcttcacaagctctacaagaatcgactagagtgagccaagacatgggaattgaaacaccaattccgatcagcgtgaagctgagagatttgaacaacattttctgcagaatcgtgcatgctgcgcagcagcctcatttgagcattccagagactgaaactggaaaagcacgtcggcaatatcggcaacttctaaaccgttcgctaatggttgtctctgttggagctgctgttgcagttgttggattagctgcttatcgggtttatgcagctcggaagaactcgtcctcttgaagcctcccctactggacaattggggaaataaggcccttccttcctgcgacctcagctggatccatgctggttgaagttcgtcgcttgggtttttacccggcaggaaaccaacgtttttgtacagacatgtcatcagctatgaattatccggccaattggggtttcagattcagacatcacctggctccgtaaaaatgccgtatctgatgatctgttggctaaattggcccagctaattattgttactactagcctaagttcttattattcgaattttttttcgttggcaaacatgctgagacatttagttgaacaagcatgagtttgtgttgtaccttgatttctttcggggatttatcaaatcggaattacctagtcacactgccactgaggcctcgtgcacacggttatactttgtatgaataatttgatatacatgtaaatgcatgcagtcacactttgcttt

SEQ ID NO: 96461 - DNA, 2185 bp, Zea Mays
aaaaaatccttatgaaacgagttgtcccgatcaagccaatatcacacccaaatcccgcaaaaccctaagccaagcagggagggagaagacgcgaggagagagagagagagaggaggtgcgcggcatggcgggtgcgacgtccctggcggcggccgctaatctggcgggcaagtcgagcgtgcgggtcgtcgtgatcggcgaccccggcaccggcaagtccagcctcatcgtcgccctcgccaccgagcagttccccgagaacgtaccacgcgtcatgccccccacccgcctccccgccgactacttccccgatcgcgtccccatcactatcatcgacacgtcgtccagcccggagcagaagccgaagttgatcgccgagtgccaggcagccgatgcggtcgtgctcacctacgcctgcgaccggcccgccacactggagcggctcagttcgttctggcttcccgagctccggcgacttcagttgaaggctccagttatcgtggtggggtgcaagctggacctgagggacgaacagcaggttagccttgaacaggttatggcgcccatcatgcagtccttccgcgagattgagacatgcattgagtgctccgctcttcggcagatccaggtgcctgaggtcttctattatgcccagaaggcagtacttcacccaactgctccgctcttcgatcaagagttacaagctctgaagcctcgatgtgtgagagcgttgaagcggatatttattatatgtgataatgacaaggatggtgctctcagtgatgtggagctcaatgaattccaggtccgatgctttaatgctccactccagcctactgaaatttcaggagttaagagagttgttcaggagaagatgcctgaaggcgtaaatgaaagcggccttaccttgactgggttcctttttctgcatgccctctttattgaaaaaggtcgtttggaaactacttggactgtattgaggaaatttggttacgacaatgacatcaagcttagggatgatctcattgcaatgccaattaaaagagctcctgatcaaactctggaaatgacaagcgaagtggtcgatttcttgagagggatattcaacatgtttgacattgataatgatggagctttactacctactgagctggaggaccttttctcaacagcacctgaaaacccatggatttctgatccctataaagactgtgctgaaaagagatacctgaaggtgacgtgagatcgttactttctgacagggaatcgttggcgccatgtgatgtagcagtatttgtttacgatagctgcgatgaatattcatggcaaagagctagagacttgcttgtgcaagtggctacacatggagaaaatactggctacgaagttccttgcttgatagttgctgcaaaagatgatcttgaccaatcttcacaagctctacaagaatcgactagagtgagccaagacatgggaattgaaacaccaattccgatcagcgtgaagctgagagatttgaacaacattttctgcagaatcgtgcatgctgcgcagcagcctcatttgagcattccagagactgaaactggaaaagcacgtcggcaatatcggcaacttctaaaccgttcgctaatggttgtctctgttggagctgctgttgcagttgttggattagctgcttatcgggtttatgcagctcggaagaactcgtcctcttgaagcctcccctactggacaattggggaaataaggcccttccttcctgcgacctcagctggatccatgctggttgaagttcgtcgcttgggtttttacccggcaggaaaccaacgtttttgtacagacatgtcatcagctatgaattatccggccaattggggtttcagattcagacatcacctggctccgtaaaaatgccgtatctgatgatctgttggctaaattggcccagctaattattgttactactagcctaagttcttattattcgaattttttttcgttggcaaacatgctgagacatttagttgaacaagcatgagtttgtgttgtaccttgatttctttcggggatttatcaaatcggaattacctagtcacactgccactgaggcctcgtgcacacggttatactttgtatgaataatttgatatacatgtaaatgcatgcagtcacactttgcttt

SEQ ID NO: 96462 - DNA, 3469 bp, Zea Mays
ttcctcctttggaactggagaaaggagaggagacaaaaccatccaagcgatccgtttctcccacttgtctcgcgccaccattattgcccgcccaatgggacgccgccgtatcctcgccgcgccatagttttaaccttgcgtccacgcctgcccaagtgcccatcccacttttcttccacgcaaaggattttctctctctctccttttccattttaatactgcacgatctctgatcgattgattcggccgagataactggagccttgtgtttttatttcgggggtcttgtaccaaaatagcgtcgattttatctacttgacccctgacccattctctctctctctctcccttttcaatttcgggggctttatttctctcctcccacgccttgcatcttcttgatgcgttgcgtcccgactcgaggcagacatcggaggcgcgccactgacttagctcgcgatttctagatccgcaaccctgcgctgctcaactccgattcttttagttcggattcgggtagcagcagggcttcggtggcgatgacttgattgatacgaattggggatttcttgctgtttgcgcctctcttcgtatcggcgctgaagggctcagctcgagattagaacaatttgggttttggggtcttttcttcttctactactgctggtcaagttcacagaaatcgctggctccgtggtccaatggacgagtccggggaagcgagcgtcggctccttcaggatcgggccgtcgacgctgctgggccgcggggtggcgttccgcgtgctcctcttcagctcgctgtggcgcctgcgggcgcgcgcgtacgcggccatctcgcgcgtgcgcagcgcggcgctgccggtggcggcgtcctggctgcacctcaggaacagccacggcgtcctcctcatggccgtgctcctcgccctcttcctgaggaaactctcggccgcgcggtcgcgggcggcgctcgcgcgccggcgcaggcagcacgagaaggccatgctgcatgccgggacgtacgaggtctgggcgcgcgccgccaaggtgctcgacaagatgtctgagcaggtccacgaggcggatttctacgacgaggagctcatcaggaataggctcgaggaactccggagacggagggaggacgggtcgctccgggacgtggtgttctgtatgcgcggcgatcttgttaggaacttggggaacatgtgcaaccctgaacttcacaagggcaggctagaggttcctaagcttataaaggagtacattgaagaggtttctactcaactaagaatggtgtgcgaatctgacactgacgagttgctgttggaagagaaacttgcctttgttcaggagaccaggcatgcctttgggaggacagcgctactcttaagtgggggtgcttcactcgggtctttccatgtaggtgtagtgaaaacattggttgagcataagcttctgcctcggattatagcaggatcaagcgttggttccatcatatgttcgatcgttgctacccgtacatggcctgagattgagagcttcttcacagactcattacagaccttgcagtttttcgacaggatgggcggaatttttgcagtgatgaggcgtgtcaccacttatggtgcactgcatgacattagccagatgcaaaggcttttgagggatctcacaagtaacttaacatttcaagaggcttatgacatgaccggccgtgttcttgggatcaccgtttgctctcctagaaaaaatgagccaccccgctgcctcaactacctgacggcaccacatgttgttatttggagtgcagtaaccgcctcttgtgcatttcctgggctctttgaagctcaggaactgatggcaaaggataggttcggcaacatcgttcccttccatgcaccctttgccacagatcctgaacaaggtcctggagcatcgaagcgcaggtggagagacgggagcttggagatggatttacccatgatgagacttaaggagttgtttaatgtaaaccatttcattgtgagccaaactaaccctcacatttctccactcctccggatgaaagagcttgttagagcctatggagggcgctttgctggaaagcttgctcgtcttgctgaaatggaggttaagtatcgatgcaaccaaatcctagagatcggtcttccaatgggaggacttgcaaaattgtttgcccaggattgggagggtgatgtgaccatggttatgccagcaacacttgctcagtacttgaagatcattcagaatccaacatacgcggagctccaaatggctgccaaccaaggccgcaggtgcacatgggagaagctctccgcaatcagagcgaactgcgccattgaacttgcacttgacgaatccatagcggttctaaaccacaaacggaggctaaaacgaagcatggagaggacggcggcggcttcgcagggtcactctaactatgtccgacccaagactccgaggaggataccgtcatggagccgcatcagtcgagagaactctttggagtctctctcggaagagatctctgcggttgctgcttcgtccatgcagcaaggcgctgctcttgttgtcggcgcaccaccaacgactctttctcagcatgttcggcgcagttctcatgacggaagtgagagtgagtcagaaaccattgaccttaattcctggaccaggagtggagggcctctaatgaggacagcgtccgccgacaggttcatcagtttcatccataacattgagattgacacagaattaagtaggccctgtgctgtggaaggtgatgctgcaggtattttgtcagaatctaccttcccaaacggtccacgaccgaacaatagctcaagtgttagtatgccaggtagatgcacagaaaattctgggaccgagtcgtgcaacactgtcaacaccagagcttctactcccacaagcatggctgttcgtgaaggagatttgctgccgcctgaaagcactactgataatgtcctacttaacattgtgaaaagagacgccctgcaggatggtgtaactgaattggcggaaagctcctgcgctgaaggatatgcggcaaactgtgacaccgtctcagggctagactgctgaaggtaacaagacgctcgctgctgacttgagcaatcaacaattagctgatgattagattcttcttgattttgatgatgaaaggtcatttatatgtagctcactacagcaacgcagtgtaggaaaattgtacctgctcgatttaaactttaaagagcatgccatgagtagctttgttaatgttaatattcacatccattgtggaattgttggttgatgcatttcttagcacgtcgagcaaccatatcacagcatgccatgagttcggcactggtacttggaatgtccaaatcatctgttcgctacatgtaacatgcagtggtttattagtcttgcagacacttcat

SEQ ID NO: 96463 - DNA, 115 bp, Zea Mays
ccaggccgttccaggccaaaccgaaccaggccttaatcccattcgatttccatgaaaccgaacaagggcttaatagtcagcgcatcgcaggttagtgattacaaactgggtgagg

SEQ ID NO: 96464 - DNA, 1695 bp, Zea Mays
attcctctcgtgcgccacaaagcctatatcctttctctggcttgctccatacctggtcccgtgctagttaaatctgcatagggtccttgctgcgccccttctagggttcgcttgcaagtttgctgtggcctccgccctgccgccaccacccccgcgagagatgccacgaggctcgtcgagcaggggcgcaagaaggggccgcggaagaaatcagggaaggggtggcgctaggggaaaggtgcacagggcaaccctggtttggtcagatctggattctggtggccacacaaacaaagagacccatggtaatcgtgttgaaggaaaacatggcaacgggcatgaaatttttccatcttctgaccttgttcgcaagagcaaaaggattcccaagaagaaaacacttgacggagattctgatgatgaagatggtgaattacgctatctggaaaaactcaaaggggctaaagttgcaccagatcctgtgaacactagccataaaggttatgattttggtgatgatgctctcaagaaaaagaagctatccaagctttctagaaacaagagcaccccatatgaagtggacgacgacttcagaatgtctcgatctggcagggatggtaggaagaagttgaatttaggggatgacaatgagtttatagaagaggaggaatctgagatggatgaaacgaatgggctaaaggaacctgattcacctcaaggtgtgaagattgaaacccctggtcttacaacaagacagcgagcccttcaaggcaggggtggcaatggtgaaagctttattgagtttcctgatggattaccagcagcttcatcaagaaagcaaaaggagaagctctcagatatggagatacaagccaaaaaggcagaagctgcgctgaggcgcaagatgcaagttgagaaggcagagaaagaacagcaggctgaagcgatgaggaagatactgggaatagattctgagaagaaaaaggaagagaagaagctgaaagaacgagaagagagggaaaaacaggcaagattggaagaatacaggaaaaactgcgtccagactgtcatgggcccaactgggactgtgattacattccctgagagcatggggcttccgagtatatttaactccaaacctgtcagctatccgcctccgagggagaagtgtgcaggcccatcgtgcacaaacccgtacaagtaccgccactccaagactctggtccctctctgcagccttgcttgctataaggccgtcgaggaccgtcctcctgcccaggggagtgaaggtggtggtggccagggaagcgatgctgggcagggaactgatgccgcccaggagagtgctgggaagcaagcatgatgaatctagctgcctgacgcgattcaaccgtgaccgtcagttggctggagaagtgtaatgtcgacatggccagctcgctggtgtgttgttttcttggtctctcctctggtagtgtgtcgtctaacaaccaatcaacctgacaaaagataggtgtgtgactgccggtttccttctgcccgtcgtgaaccaagccgggcttcgtaatggtggattggatcgagtttaaaacctatggtgtggtcggttcgatgtatgagactactctagtcgagaaatatgaagggaaacaaggtcgtgggagacctcgggctgtgggcgtctttttcgggttc

SEQ ID NO: 96465 - DNA, 2267 bp, Zea Mays
agcccgcgcacccccacccgcgcgctcctccccttccccgacctcacccgcgtcatccacccggcacccccctcccctccacctcgtcacgctcacgccgcacgggcccggcccaaataccctcgcactcgcgcccccacctctcgccacaaaccctaacctgacctccccaccggctcgacgccgccgtcgccggtccgtcttcgtcgtcggcccactctgtgcgaggtagcagagttgcttgcgtgcgaaggccgcttggtctggagttaagcgcgtgttgtaatggaggggcgtgggaaccctccgcacaccaccactgatgctgtgatcaagaagccaaggagcgtcgcatccaggaagccaaggtccacggagcagctcacgtatgagtacaatggcatttgcccgccatcttggagcgctccccatgacgatgacactggcgttggagctggtggacatcggaggaaagagctacacctaaatagccctgaaatgaagggctccatggctcataggagcgacgtgcccaggaagataaggagggatgatagatctggaggcgaccatgatggccatggtcggagcagcaaagcaaaggatgctgccaagcatggaagtgaaaatgttcttgccctagagtgcacagcaagaaacaatggatcccctgataacccacagttggtccccagagatgactctatgccttgtgaaaataggtcgagaaaagtaaagctcaaagttgttagtcgaaccctacatgccaaaaatggccaggatgctggtggcagtggtattcctgccacgttggatggctctattcatcagtacaagcaaaaggattctggtggccacacaaacaaagagacccatggtaatcgtgttgaaggaaaacatggcaacgggcatgaaatttttccatcttctgaccttgttcgcaagagcaaaaggattcccaagaagaaaacacttgacggagattctgatgatgaagatggtgaattacgctatctggaaaaactcaaaggggctaaagttgcaccagatcctgtgaacactagccataaaggttatgattttggtgatgatgctctcaagaaaaagaagctatccaagctttctagaaacaagagcaccccatatgaagtggacgacgacttcagaatgtctcgatctggcagggatggtaggaagaagttgaatttaggggatgacaatgagtttatagaagaggaggaatctgagatggatgaaacgaatgggctaaaggaacctgattcacctcaaggtgtgaagattgaaacccctggtcttacaacaagacagcgagcccttcaaggcaggggtggcaatggtgaaagctttattgagtttcctgatggattaccagcagcttcatcaagaaagcaaaaggagaagctctcagatatggagatacaagccaaaaaggcagaagctgcgctgaggcgcaagatgcaagttgagaaggcagagaaagaacagcaggctgaagcgatgaggaagatactgggaatagattctgagaagaaaaaggaagagaagaagctgaaagaacgagaagagagggaaaaacaggcaagattggaagaatacaggaaaaactgcgtccagactgtcatgggcccaactgggactgtgattacattccctgagagcatggggcttccgagtatatttaactccaaacctgtcagctatccgcctccgagggagaagtgtgcaggcccatcgtgcacaaacccgtacaagtaccgccactccaagactctggtccctctctgcagccttgcttgctataaggccgtcgaggaccgtcctcctgcccaggggagtgaaggtggtggtggccagggaagcgatgctgggcagggaactgatgccgcccaggagagtgctgggaagcaagcatgatgaatctagctgcctgacgcgattcaaccgtgaccgtcagttggctggagaagtgtaatgtcgacatggccagctcgctggtgtgttgttttcttggtctctcctctggtagtgtgtcgtctaacaaccaatcaacctgacaaaagataggtgtgtgactgccggtttccttctgcccgtcgtgaaccaagccgggcttcgtaatggtggattggatcgagtttaaaacctatggtgtggtcggttcgatgtatgagactactctagtcgagaaatatgaagggaaacaaggtcgtgggagacctcgggctgtgggcgtctttttcgggttc

SEQ ID NO: 96466 - DNA, 2375 bp, Zea Mays
ccctgtcccccgctcctgcctcgcctcaccaccattagagcgcgcgcgccaagctcgtggtgaggttttcgagatgaaggttatcgagaagatcctggaggcggcgggggatggccggacggcgttctcgttcgagtacttccctcccaagacggaggagggggtcgagaacctgttcgagcggatggaccgcatggtggcgcacggcccctccttctgcgacatcacctggggcgccgggggatccaccgctgaccttaccctcgaaatcgccaaccgtatgcagaacatggtgtgtgtggaaaccatgatgcacctgacatgtacaaacatgccagtagagaagattgaccatgccttggaaaccatcaaatccaatgggattcaaaatgttttggccctcagaggggatcctccacatgggcaagacaaatttgtgcaagttgaaggcggatttgcttgtgctcttgatttggtgcagcatattagagccaagtacggtgattattttggcataactgtagctggttatccagaggcacaccctgatgcgatacaaggcgagggaggtgctacattggaagcatatagcaatgatcttgcgtacttgaagagaaaggttgatgctggtgctgaccttattgttacacaacttttctatgataccgacatctttctcaagtttgtgaatgactgccgccaaattggtattacttgtcccattgttcctggcataatgccaataaataactacaaaggtttcctgcgcatgactgggttctgcaaaactaagataccttctgagatcactgctgcactagatcctatcaaagacaatgaggaggctgttagacaatatggaatccaccttggaactgagatgtgcaagaaaattcttgctactggcattaagactttgcacctttacacactaaacatggacaagtctgctataggaattttgatgaatcttggattaattgaggagtccaaggtttcaaggccattaccttggaggccagcgactaatgttttccgtgttaaagaggatgttcgacctatattctgggccaacagaccaaagagctatcttaaaaggacattaggttgggatcagtatccccatggacggtggggtgattctcggaacccatcatatggagcacttactgaccaccagttcacaagaccacgaggccgtggtaagaagctccaagaggaatgggctgttccactgaaatctgtggaggacattagtgagcgcttcacaaacttctgtcaagggaaactcacaagcagcccatggtcagaattggacggtcttcaaccagagacaaagattatcgatgaccagttggtgaatattaaccagaagggtttccttacaattaacagccaacctgctgtaaatggagagaaatccgactcgcctactgttggttggggtggtcctggaggctacgtttatcagaaggcctacctcgaattcttctgcgcaaaggagaagttggaccaactaattgagaagatcaaagcattcccttctctcacttacattgctgtgaacaaggatggagaaacattctccaatatttcaccgaacgccgtgaatgctgtcacgtggggtgttttccctggcaaggagattatccagcctacggttgtggatcatgcaagttttatggtttggaaggacgaagcatttgaaatctggactcgggggtggggttgcatgttccctgagggtgattcatcgagggagctactagagaaggttcagaagacctactacctggtcagcctcgttgacaacgactacgtccagggggacctgtttgctgccttcaagatctgattatgctctcatggtctgtattgttgtatggttggacccaacaatattcttgcatccccgactacaggtctgatcgccatgaaagcttctgttcatttgagctcgggggagtccgctagtcttatttttcttgatttctcttggctttctggaaccatacgaatcaataagaaatgagctgtgttcactttccagttcctccgtgcaagtggcgcaacggccaggttctagatgtaaaattcgtcctctaatacagagattggtattgtatgttagtgtaggatgcgctgctcgcattgcactgttattgtgcttctgtttggtggaaataaagattggtcgaaatctgagggccagattgaaagccatataactgaggggattggaggggctaaattttattttttgattaattttaaataagaaggagaatctagcccctccggtttctcgctcccaatctagtcctgaatgttcacaagcccccatttgaatttagccgggtaaccccattaattag

SEQ ID NO: 96467 - DNA, 1321 bp, Zea Mays
gttctcttttcccccaccccatcaacacaatttacccttcgtcttcccgcttccagcgcacccccatcttgagtctcgccgccgcaagcttgtgtaaggtgtaaccctaaccctaaaacacttaccttcgcctccagcaccacgcttccatggaggggcgcggaggctaagtatagccaacctctacaccatatccccatggattgagcggattcccaaggcatgggtacaaaccctcacctgcaagagctggccgcttcggcggtggcggcttctgaaccaccaccgcgggcgcgcgtggtgcggatcctagtgcacgatgctgacgccaccgattcgtcctccagcgaggatgaggcaccgccacttcttcctcggcggaggtcgaggggtggtagcagcagcctgagcgtgaggcgccgtgttatggaaccggctggggcaagctcggccgttcggttccgtggcgtccgtcgtaggccgtgggggcgctgggctgcggagatccgcgagccgcacaaccgccgcagactgtggctcggcaccttcgacaccgctgaggaggctgccaacgcctacgacgctgcgaacatccgcttccgcggtgtcagcgccactaccaacttccctgcggcccgctactcgccccctccaaagccagcgaagcctatcatctcgctgactcctgaacccggaaaggtgatcaccttgccaccggtacctgtgaagccaaccttccctgttcaggtgaaggaagtgggtgggagctggggcggcctggtcaagggagctaggtcggaggtcaaggcgtttgcaccgaagccagtatggaagatgatccccagggtgcaccagaagtttccgggttgtgccgatggctctggcctgcgtgccgtccatgctgcctccatctacgtggaggaggttggcggtggctgatggtccaagtatctgcaattactatcgctagaggttttattgtctatctccatggcatcattataacctggtactgtattattttggttagtgttaaactgttgatgtggaaacctatgactcttgctgtgttatgatcggtggtaatataatgtgtatatggtgacatttggtaatatgttcctgatctatgtgatgcaatgtgctgtgctttgattgtgggatcaaacctgtcatatagtagtacaatctagatcctttcacatgaacagtgatacctagatgtatttgatggttatttcagttgaattatttgtctggtgcgtgtgtgtcaggttcacggtatatttgtttggtaattataatatacatgtcctgtcgt

SEQ ID NO: 96468 - DNA, 1459 bp, Zea Mays
aaaactagcgcttactgttttgcacggccatagtctcgatccccaccgagtccagcaaacagcaccaccccaccctcttcgcggctccggcagccgcgccaccatggcttctcctgcgggggctaacagcggggcctcctcctcgagagggacacccttgcctttgcccttccccttccccgctgcggcgcacttcccctcccgcggcgccggtcccttcctgtcgcagcactatcacccgccctccacctccgacggcgacgatgaggtcgaagaagacgagggaagcatggacgacggcagcgccgaagaggatgatgccgagctgtccgacggaggggctctcggctcgccgcggcgacgcgccttctccgctccaggtattggacgtatggagataaatgggggaaatggagtgaggtcaatccaagaggggcagcaatggcatttatgtaaccatggaatcgagattgggcgtccatcaccaggaggggatgaacctggtaccatccccagagatgtgagagtggagaatgggcatggagttgttggaagaagagacgggggtcctgcatccagctattgggacctgttgagagcacacctctctgatcctttaacaggtgttctcatggatgatgcattgattttatcatgtggccattcatatggaagtagtggaatgcaacatgtctacagaatgaaagcttgtggtaagtgtggcatgccaattactgaggccgccattcgaccaaacttggctcttcgccttgcagttcaggcattcaaacgtgaagaagactcagcaaagtcattgaaaagaagaagagagcgccttgaactgaggtaaaggtgtgcagtttcctttttctgtcttcgacagggtcataatcaagggaaacaagaggaccccggaacggtttgtgggacgtcaagcagttgtgacagcgcagtgcttaaatggatggtatgttgtgaagacttcagacaacgcagagagtgtgaagctgcaataccgttccttggcaaaggttgctgatggcaatgggccttctggtcttgtcccaagcaatgtccaaagtacaagctggctataggctacaacagtaccggtagtaggccccaagcccctcttcaacttcacgcatttgctgaggttctgcgatgacgtgagcatgccaaattcagattaggcttgctttgcctttgtcccctctttttgtatcctggggacgcggatcttgtgagtatggccaaagaaatgtttactactttagcagtgttggaaacgcgtgacatcactggttacgagtagttttagccgtcttctgtctagcggtgtggccggtagtggcagcatgcgtctgcagagaacatatctggtacacataaaagtttagtgcacatgatttatatattaaattatcactatctattttagatctaacgtctctgttga

SEQ ID NO: 96469 - DNA, 1461 bp, Zea Mays
tctcgatccccaccgagtccagcaaacagcaccaccccaccctcttcgcggctccggcagccgcgccaccatggcttctcctgcgggggctaacagcggggcctcctcctcgagagggacacccttgcctttgcccttccccttccccgctgcggcgcacttcccctcccgcggcgccggtcccttcctgtcgcagcactatcacccgccctccacctccgacggcgacgatgaggtcgaagaagacgagggaagcatggacgacggcagcgccgaagaggatgatgccgagctgtccgacggaggggctctcggctcgccgcggcgacgcgccttctccgctccaggtattggacgtatggagataaatgggggaaatggagtgaggtcaatccaagaggggcagcaatggcatttatgtaaccatggaatcgagattgggcgtccatcaccaggaggggatgaacctggtaccatccccagagatgtgagagtggagaatgggcatggagttgttggaagaagagacgggggtcctgcatccagctattgggacctgttgagagcacacctctctgatcctttaacaggtgttctcatggatgatgcattgattttatcatgtggccattcatatggaagtagtggaatgcaacatgtctacagaatgaaagcttgtggtaagtgtggcatgccaattactgaggccgccattcgaccaaacttggctcttcgccttgcagttcaggcattcaaacgtgaagaagactcagcaaagtcattgaaaagaagaagagagcgccttgaactggataaatgtggtgacgatgatccaaatcgaactgaacttgctactagaggtaaaggtgtgcagtttcctttttctgtcttcgacagggtcataatcaagggaaacaagaggaccccggaacggtttgtgggacgtcaagcagttgtgacagcgcagtgcttaaatggatggtatgttgtgaagacttcagacaacgcagagagtgtgaagctgcaataccgttccttggcaaaggttgctgatggcaatgggccttctggtcttgtcccaagcaatgtccaaagtacaagctggctataggctacaacagtaccggtagtaggccccaagcccctcttcaacttcacgcatttgctgaggttctgcgatgacgtgagcatgccaaattcagattaggcttgctttgcctttgtcccctctttttgtatcctggggacgcggatcttgtgagtatggccaaagaaatgtttactactttagcagtgttggaaacgcgtgacatcactggttacgagtagttttagccgtcttctgtctagcggtgtggccggtagtggcagcatgcgtctgcagagaacatatctggtacacataaaagtttagtgcacatgatttatatattaaattatcactatctattttagatctaa

SEQ ID NO: 96470 - DNA, 1134 bp, Zea Mays
aaaactagcgcttactgttttgcacggccatagtctcgatccccaccgagtccagcaaacagcaccaccccaccctcttcgcggctccggcagccgcgccaccatggcttctcctgcgggggctaacagcggggatgaacctggtaccatccccagagatgtgagagtggagaatgggcatggagttgttggaagaagagacgggggtcctgcatccagctattgggacctgttgagagcacacctctctgatcctttaacaggtgttctcatggatgatgcattgattttatcatgtggccattcatatggaagtagtggaatgcaacatgtctacagaatgaaagcttgtggtaagtgtggcatgccaattactgaggccgccattcgaccaaacttggctcttcgccttgcagttcaggcattcaaacgtgaagaagactcagcaaagtcattgaaaagaagaagagagcgccttgaactggataaatgtggtgacgatgatccaaatcgaactgaacttgctactagaggtaaaggtgtgcagtttcctttttctgtcttcgacagggtcataatcaagggaaacaagaggaccccggaacggtttgtgggacgtcaagcagttgtgacagcgcagtgcttaaatggatggtatgttgtgaagacttcagacaacgcagagagtgtgaagctgcaataccgttccttggcaaaggttgctgatggcaatgggccttctggtcttgtcccaagcaatgtccaaagtacaagctggctataggctacaacagtaccggtagtaggccccaagcccctcttcaacttcacgcatttgctgaggttctgcgatgacgtgagcatgccaaattcagattaggcttgctttgcctttgtcccctctttttgtatcctggggacgcggatcttgtgagtatggccaaagaaatgtttactactttagcagtgttggaaacgcgtgacatcactggttacgagtagttttagccgtcttctgtctagcggtgtggccggtagtggcagcatgcgtctgcagagaacatatctggtacacataaaagtttagtgcacatgatttatatattaaattatcactatctattttagatctaa

SEQ ID NO: 96471 - DNA, 1568 bp, Zea Mays
aaaactagcgcttactgttttgcacggccatagtctcgatccccaccgagtccagcaaacagcaccaccccaccctcttcgcggctccggcagccgcgccaccatggcttctcctgcgggggctaacagcggggcctcctcctcgagagggacacccttgcctttgcccttccccttccccgctgcggcgcacttcccctcccgcggcgccggtcccttcctgtcgcagcactatcacccgccctccacctccgacggcgacgatgaggtcgaagaagacgagggaagcatggacgacggcagcgccgaagaggatgatgccgagctgtccgacggaggggctctcggctcgccgcggcgacgcgccttctccgctccaggtattggacgtatggagataaatgggggaaatggagtgaggtcaatccaagaggggcagcaatggcatttatgtaaccatggaatcgagattgggcgtccatcaccaggaggggatgaacctggtaccatccccagagatgtgagagtggagaatgggcatggagttgttggaagaagagacgggggtcctgcatccagctattgggacctgttgagagcacacctctctgatcctttaacaggtgttctcatggatgatgcattgattttatcatgtggccattcatatggaagtagtggaatgcaacatgtctacagaatgaaagcttgtggtaagtgtggcatgccaattactgaggccgccattcgaccaaacttggctcttcgccttgcagttcaggcattcaaacgtgaagaagactcagcaaagtcattgaaaagaagaagagagcgccttgaactggtatacgcccttttccagcttatcagtcacccttcaaatcgggcagctatatttgttgcatgttcttaaatccattctaccctatgtgaggataaatgtggtgacgatgatccaaatcgaactgaacttgctactagaggtaaaggtgtgcagtttcctttttctgtcttcgacagggtcataatcaagggaaacaagaggaccccggaacggtttgtgggacgtcaagcagttgtgacagcgcagtgcttaaatggatggtatgttgtgaagacttcagacaacgcagagagtgtgaagctgcaataccgttccttggcaaaggttgctgatggcaatgggccttctggtcttgtcccaagcaatgtccaaagtacaagctggctataggctacaacagtaccggtagtaggccccaagcccctcttcaacttcacgcatttgctgaggttctgcgatgacgtgagcatgccaaattcagattaggcttgctttgcctttgtcccctctttttgtatcctggggacgcggatcttgtgagtatggccaaagaaatgtttactactttagcagtgttggaaacgcgtgacatcactggttacgagtagttttagccgtcttctgtctagcggtgtggccggtagtggcagcatgcgtctgcagagaacatatctggtacacataaaagtttagtgcacatgatttatatattaaattatcacta

SEQ ID NO: 96472 - DNA, 1353 bp, Zea Mays
aaaactagcgcttactgttttgcacggccatagtctcgatccccaccgagtccagcaaacagcaccaccccaccctcttcgcggctccggcagccgcgccaccatggcttctcctgcgggggctaacagcggggcctcctcctcgagagggacacccttgcctttgcccttccccttccccgctgcggcgcacttcccctcccgcggcgccggtcccttcctgtcgcagcactatcacccgccctccacctccgacggcgacgatgaggtcgaagaagacgagggaagcatggacgacggcagcgccgaagaggatgatgccgagctgtccgacggaggggctctcggctcgccgcggcgacgcgccttctccgctccaggtattggacgtatggagataaatgggggaaatggagtgaggtcaatccaagaggggcagcaatggcatttatgtaaccatggaatcgagattgggcgtccatcaccaggaggggatgaacctggtaccatccccagagatgtgagagtggagaatgggcatggagttgttggaagaagagacgggggtcctgcatccagctattgggacctgttgagagcacacctctctgatcctttaacaggtgttctcatggatgatgcattgattttatcatgtggccattcatatggaagtagtggaatgcaacatgtctacagaatgaaagcttgtggtaagtgtggcatgccaattactgaggccgccattcgaccaaacttggctcttcgccttgcagttcaggcattcaaacgtgaagaagactcagcaaagtcattgaaaagaagaagagagcgccttgaactgggaaacaagaggaccccggaacggtttgtgggacgtcaagcagttgtgacagcgcagtgcttaaatggatggtatgttgtgaagacttcagacaacgcagagagtgtgaagctgcaataccgttccttggcaaaggttgctgatggcaatgggccttctggtcttgtcccaagcaatgtccaaagtacaagctggctataggctacaacagtaccggtagtaggccccaagcccctcttcaacttcacgcatttgctgaggttctgcgatgacgtgagcatgccaaattcagattaggcttgctttgcctttgtcccctctttttgtatcctggggacgcggatcttgtgagtatggccaaagaaatgtttactactttagcagtgttggaaacgcgtgacatcactggttacgagtagttttagccgtcttctgtctagcggtgtggccggtagtggcagcatgcgtctgcagagaacatatctggtacacataaaagtttagtgcac

SEQ ID NO: 96473 - DNA, 1691 bp, Zea Mays
aaaactagcgcttactgttttgcacggccatagtctcgatccccaccgagtccagcaaacagcaccaccccaccctcttcgcggctccggcagccgcgccaccatggcttctcctgcgggggctaacagcggggcctcctcctcgagagggacacccttgcctttgcccttccccttccccgctgcggcgcacttcccctcccgcggcgccggtcccttcctgtcgcagcactatcacccgccctccacctccgacggcgacgatgaggtcgaagaagacgagggaagcatggacgacggcagcgccgaagaggatgatgccgagctgtccgacggaggggctctcggctcgccgcggcgacgcgccttctccgctccaggtattggacgtatggagataaatgggggaaatggagtgaggtcaatccaagaggggcagcaatggcatttatgtaaccatggaatcgagattgggcgtccatcaccaggaggggatgaacctggtaccatccccagagatgtgagagtggagaatgggcatggagttgttggaagaagagacgggggtcctgcatccagctattgggacctgttgagagcacacctctctgatcctttaacaggtgttctcatggatgatgcattgattttatcatgtggccattcatatggaagtagtggaatgcaacatgtctacagaatgaaagcttgtggtaagtgtggcatgccaattactgaggccgccattcgaccaaacttggggatccggtttggtgaaccttggacatgactacggtttggtgctatgttgctagtcaagctcttcgccttgcagttcaggcattcaaacgtgaagaagactcagcaaagtcattgaaaagaagaagagagcgccttgaactggtatacgcccttttccagcttatcagtcacccttcaaatcgggcagctatatttgttgcatgttcttaaatccattctaccctatgtgaggataaatgtggtgacgatgatccaaatcgaactgaacttgctactagaggtaaaggtgtgcagtttcctttttctgtcttcgacagggtcataatcaaggtatcttataagcaagacaactaagcgaaggctttcattcactctgttgtgttttctgcaataactagtgcgtgaattgaatcttttcagggaaacaagaggaccccggaacggtttgtgggacgtcaagcagttgtgacagcgcagtgcttaaatggatggtatgttgtgaagacttcagacaacgcagagagtgtgaagctgcaataccgttccttggcaaaggttgctgatggcaatgggccttctggtcttgtcccaagcaatgtccaaagtacaagctggctataggctacaacagtaccggtagtaggccccaagcccctcttcaacttcacgcatttgctgaggttctgcgatgacgtgagcatgccaaattcagattaggcttgctttgcctttgtcccctctttttgtatcctggggacgcggatcttgtgagtatggccaaagaaatgtttactactttagcagtgttggaaacgcgtgacatcactggttacgagtagttttagccgtcttctgtctagcggtgtggccggtagtggcagcatgcgtctgcagagaacatatctggtacacataaaagtttagtgcac

SEQ ID NO: 96474 - DNA, 1601 bp, Zea Mays
aaaactagcgcttactgttttgcacggccatagtctcgatccccaccgagtccagcaaacagcaccaccccaccctcttcgcggctccggcagccgcgccaccatggcttctcctgcgggggctaacagcggggcctcctcctcgagagggacacccttgcctttgcccttccccttccccgctgcggcgcacttcccctcccgcggcgccggtcccttcctgtcgcagcactatcacccgccctccacctccgacggcgacgatgaggtcgaagaagacgagggaagcatggacgacggcagcgccgaagaggatgatgccgagctgtccgacggaggggctctcggctcgccgcggcgacgcgccttctccgctccaggtattggacgtatggagataaatgggggaaatggagtgaggtcaatccaagaggggcagcaatggcatttatgtaaccatggaatcgagattgggcgtccatcaccaggaggggatgaacctggtaccatccccagagatgtgagagtggagaatgggcatggagttgttggaagaagagacgggggtcctgcatccagctattgggacctgttgagagcacacctctctgatcctttaacaggtgttctcatggatgatgcattgattttatcatgtggccattcatatggaagtagtggaatgcaacatgtctacagaatgaaagcttgtggtaagtgtggcatgccaattactgaggccgccattcgaccaaacttggggatccggtttggtgaaccttggacatgactacggtttggtgctatgttgctagtcaagctcttcgccttgcagttcaggcattcaaacgtgaagaagactcagcaaagtcattgaaaagaagaagagagcgccttgaactggtatacgcccttttccagcttatcagtcacccttcaaatcgggcagctatatttgttgcatgttcttaaatccattctaccctatgtgaggataaatgtggtgacgatgatccaaatcgaactgaacttgctactagaggtaaaggtgtgcagtttcctttttctgtcttcgacagggtcataatcaagggaaacaagaggaccccggaacggtttgtgggacgtcaagcagttgtgacagcgcagtgcttaaatggatggtatgttgtgaagacttcagacaacgcagagagtgtgaagctgcaataccgttccttggcaaaggttgctgatggcaatgggccttctggtcttgtcccaagcaatgtccaaagtacaagctggctataggctacaacagtaccggtagtaggccccaagcccctcttcaacttcacgcatttgctgaggttctgcgatgacgtgagcatgccaaattcagattaggcttgctttgcctttgtcccctctttttgtatcctggggacgcggatcttgtgagtatggccaaagaaatgtttactactttagcagtgttggaaacgcgtgacatcactggttacgagtagttttagccgtcttctgtctagcggtgtggccggtagtggcagcatgcgtctgcagagaacatatctggtacacataaaagtttagtgcac

SEQ ID NO: 96475 - DNA, 1251 bp, Zea Mays
aaaactagcgcttactgttttgcacggccatagtctcgatccccaccgagtccagcaaacagcaccaccccaccctcttcgcggctccggcagccgcgccaccatggcttctcctgcgggggctaacagcggggcctcctcctcgagagggacacccttgcctttgcccttccccttccccgctgcggcgcacttcccctcccgcggcgccggtcccttcctgtcgcagcactatcacccgccctccacctccgacggcgacgatgaggtcgaagaagacgagggaagcatggacgacggcagcgccgaagaggatgatgccgagctgtccgacggaggggctctcggctcgccgcggcgacgcgccttctccgctccagaggtgttctcatggatgatgcattgattttatcatgtggccattcatatggaagtagtggaatgcaacatgtctacagaatgaaagcttgtggtaagtgtggcatgccaattactgaggccgccattcgaccaaacttggctcttcgccttgcagttcaggcattcaaacgtgaagaagactcagcaaagtcattgaaaagaagaagagagcgccttgaactggtatacgcccttttccagcttatcagtcacccttcaaatcgggcagctatatttgttgcatgttcttaaatccattctaccctatgtgaggataaatgtggtgacgatgatccaaatcgaactgaacttgctactagagggaaacaagaggaccccggaacggtttgtgggacgtcaagcagttgtgacagcgcagtgcttaaatggatggtatgttgtgaagacttcagacaacgcagagagtgtgaagctgcaataccgttccttggcaaaggttgctgatggcaatgggccttctggtcttgtcccaagcaatgtccaaagtacaagctggctataggctacaacagtaccggtagtaggccccaagcccctcttcaacttcacgcatttgctgaggttctgcgatgacgtgagcatgccaaattcagattaggcttgctttgcctttgtcccctctttttgtatcctggggacgcggatcttgtgagtatggccaaagaaatgtttactactttagcagtgttggaaacgcgtgacatcactggttacgagtagttttagccgtcttctgtctagcggtgtggccggtagtggcagcatgcgtctgcagagaacatatctggtacacataaaagtttagtgcac

SEQ ID NO: 96476 - DNA, 1406 bp, Zea Mays
aaaactagcgcttactgttttgcacggccatagtctcgatccccaccgagtccagcaaacagcaccaccccaccctcttcgcggctccggcagccgcgccaccatggcttctcctgcgggggctaacagcggggcctcctcctcgagagggacacccttgcctttgcccttccccttccccgctgcggcgcacttcccctcccgcggcgccggtcccttcctgtcgcagcactatcacccgccctccacctccgacggcgacgatgaggtcgaagaagacgagggaagcatggacgacggcagcgccgaagaggatgatgccgagctgtccgacggaggggctctcggctcgccgcggcgacgcgccttctccgctccaggtgaaccaagggtttgcgcagaggctttcaggtattggacgtatggagataaatgggggaaatggagtgaggtcaatccaagaggggcagcaatggcatttatgtaaccatggaatcgagattgggcgtccatcaccaggaggggatgaacctggtaccatccccagagatgtgagagtggagaatgggcatggagttgttggaagaagagacgggggtcctgcatccagctattgggacctgttgagagcacacctctctgatcctttaacaggtgttctcatggatgatgcattgattttatcatgtggccattcatatggaagtagtggaatgcaacatgtctacagaatgaaagcttgtggtaagtgtggcatgccaattactgaggccgccattcgaccaaacttggctcttcgccttgcagttcaggcattcaaacgtgaagaagactcagcaaagtcattgaaaagaagaagagagcgccttgaactggataaatgtggtgacgatgatccaaatcgaactgaacttgctactagaggtaaaggtgtgcagtttcctttttctgtcttcgacagggtcataatcaagggaaacaagaggaccccggaacggtttgtgggacgtcaagcagttgtgacagcgcagtgcttaaatggatggtatgttgtgaagacttcagacaacgcagagagtgtgaagctgcaataccgttccttggcaaaggttgctgatggcaatgggccttctggtcttgtcccaagcaatgtccaaagtacaagctggctataggctacaacagtaccggtagtaggccccaagcccctcttcaacttcacgcatttgctgaggttctgcgatgacgtgagcatgccaaattcagattaggcttgctttgcctttgtcccctctttttgtatcctggggacgcggatcttgtgagtatggccaaagaaatgtttactactttagcagtgttggaaacgcgtgacatcactggttacgagtagttttagccgtctt

SEQ ID NO: 96477 - DNA, 1311 bp, Zea Mays
atgcctcggttgtcctgcaagttcgcggaccccgacagcgccgtttcctccgctccggtggcgcgccgcgtgcggtcagacacgatgagctgcggcagcgacgtgtgccgggacggcggcagcagcagcggcagcgaggagttcaggcggccgcggcccagcaaggtcgccgctgatgattcggtggcgcccgcccggagctcggatgccgcggcgccggcgtcgtggatcgacaggaagctgcttgttgatccaaagatgctgttcgttggggacaagattggggagggagctcatggcaaggtctacaaggggaagtacggtgatcaaattgtagcgataaaggttcttaaccgtggcagcacccctgaagaaaaagcaacacttgaagcccgtttcatccgagaagtaaatatgatgtgtaaagtgaaacatgagaatcttgtcaagataatttattgcttacagcaaatcgcaagaagctaaaacttactgattttggacttgcacgtgaagaaactgtgactgaaatgatgactgctgaaactgggacttaccgatggatggccccagagctatacagcacagtcacacttcgacgtggtgagaaaaagcattacacaaataaagtggatgtgtacagctttggcattgttttgtgggaattattgaccaatagaatgccatttgaaggcatgtcgaatctacaagctgcatatgctgctgcttttcagcaaaagcgcccagctctccctgaggagaccccccaggagcttgtgttcatagtacaatcatgctgggttgaggatcctgccatgcgacccagtttcagccagatcatccgaatgcttgaaactttcattatgacaatacatccacctccgctttcagagccaaacgaaggcgaggaatcggaagaaacgaggtcgtcactgagcagtaggagctcctctggctcctcgctcgtttctcgcgcgacaagcaagctctcggtcgtccgccacctcttcgtctcaaagaagacaggcaatgggaaggcgtgatgcgccatgccctgagacgcttttcttcggtgctgtaaagatgctagcctaggtgatgcgcaatacaagagggaacttgttcagtgtagagtagctgttgtattgatgttacaaaaggggaaagttgaagtgcagcttttgcaagctatgtatagctcgcagctcctttactttactgaaagtccaaacagccggctttaatccgaagcgaaccgagatatatattaaatcaaacaaccgactttaattcgaagaacagagatatata

SEQ ID NO: 96478 - DNA, 1979 bp, Zea Mays
cccccgataccttctctccccgacttttccttcccttcctcgcacgacgagtgacgacgaccatcccccaaccccacgccgcggagccgcaccaaatctcaccccgcatcctttagggttagggttctgcccgcacctgtgaattccgttgcgaaatctctcatctcctgagtcgagaatcgcagtttcccgctcggctcgtttggggaaatcggttattttcgtccggccgcgtgggctctctgaagcgtttgggctgtcggctatttgccccgagttttcaggtttgaaaaatcgtcgtaatttgttcatcacgcggctgccgaactttaagtggtggtggaagtttcgtgcctcggcgtggcccccgtgctccgattcctgatcacctgcccgccccgcacgctatgagcgcagggcgcgcgggctggggctcttgctgctcgggcacgcgcgcggggtccccgtgttaatgcctcggttgtcctgcaagttcgcggaccccgacagcgccgtttcctccgctccggtggcgcgccgcgtgcggtcagacacgatgagctgcggcagcgacgtgtgccgggacggcggcagcagcagcggcagcgaggagttcaggcggccgcggcccagcaaggtcgccgctgatgattcggtggcgcccgcccggagctcggatgccgcggcgccggcgtcgtggatcgacaggaagctgcttgttgatccaaagatgctgttcgttggggacaagattggggagggagctcatggcaaggtctacaaggggaagtacggtgatcaaattgtagcgataaaggttcttaaccgtggcagcacccctgaagaaaaagcaacacttgaagcccgtttcatccgagaagtaaatatgatgtgtaaagtgaaacatgagaatcttgtcaagtttattggagcttgcaaagaaccattgatggtgatcgttagtgagctactaccagggatgtcactgaaaagttacctgcatagcatacggcctagccaattagatacacacactgcaataagctatgcactggacatagctcatgcaatggactgtttacatgccaatggcataatacatagagacctgaaacctgataatttattgcttacagcaaatcgcaagaagctaaaacttactgattttggacttgcacgtgaagaaactgtgactgaaatgatgactgctgaaactgggacttaccgatggatggccccagagctatacagcacagtcacacttcgacgtggtgagaaaaagcattacacaaataaagtggatgtgtacagctttggcattgttttgtgggaattattgaccaatagaatgccatttgaaggcatgtcgaatctacaagctgcatatgctgctgcttttcagcaaaagcgcccagctctccctgaggagaccccccaggagcttgtgttcatagtacaatcatgctgggttgaggatcctgccatgcgacccagtttcagccagatcatccgaatgcttgaaactttcattatgacaatacatccacctccgctttcagagccaaacgaaggcgaggaatcggaagaaacgaggtcgtcactgagcagtaggagctcctctggctcctcgctcgtttctcgcgcgacaagcaagctctcggtcgtccgccacctcttcgtctcaaagaagacaggcaatgggaaggcgtgatgcgccatgccctgagacgcttttcttcggtgctgtaaagatgctagcctaggtgatgcgcaatacaagagggaacttgttcagtgtagagtagctgttgtattgatgttacaaaaggggaaagttgaagtgcagcttttgcaagctatgtatagctcgcagctcctttactttactgaaagtccaaacagccggctttaatccgaagcgaaccgagatatatattaaatcaaacaaccgactttaattcgaagaacagagatatata

SEQ ID NO: 96479 - DNA, 2763 bp, Zea Mays
ttgtcaaaaaaaaatatgttcaagacaaaaaatatctcaggttcagttaaaaatttccacatgctgaagaaaagattgtttctaactcaagcgaaaagtgacatagctttatgcgaaagatgcaccaggttattctaagttcaattgaaaaaggtcctctagcttttccttcaatggggaaaatgtttgacctcaataaaatataaaaataataaatttgctcattttgtaatgtaatgttaatatcattattgtctcactcatttttcatttgaaattaaaatgttccactaggcagtgtccaggaatccaggatgtgaggctaaatacaaaatcaagaagaataaatataaataaaaataaaacgagagagagagaaagaaacacataagttaaggaggtgtggaaaaaacggcccagcagaaggcccgtgttgctgccctcccctgggccgacaaaccccggacgggcctaccgccgtcagccgcatccgtgattccgttcaccttcacggcttcaccagcctgcgctctctcctctcagcgcgacgactgggtgggcggggctaccgccgccgccgccgcccgacaccaggtgccgaggttttcgtcggtctcttcgccggcgacgagctccaaccaggtgctagcgcggtacaattttcgagaatttgtggtgttgaactgaacctccatgacacaagctaaacctgcccctagtggcaagaggaactggagcagtggcgggactgccgctggaaggaagaacaaggaaagaggagatgacaaagcaaaaggaatcagggttgctggttggaacaagggcgacaagaagaaagaagacaaagggcgccaagtaagtgcgggatcgaagaggcggtggagtgagggagtgccccgggttggtgtgaagagggctgtgtctgggtttgacaggaggaagaggaagatcgatgatgactcgtgggatgatgacggtggcaaggatgtttcatcttccaaatcaaagtttaccagaaagtgttcttccacaataagccgtcgaaaggtttctcctggaaaaggtgacagattgaagtctcaaacgttgtatgaggatgactaccgtgcagggaaaaggagtattagcaaagtttctgatgttagtagaggggtcaagaatcgactggtgaattctgtagcatccaaagggaagaagcttggtgcatccgaaggagtcatacgaacaaagaagggtggtgctaaagaagttgatttggatgaggaggctgttaatagcaagaagtcagatgacttggatcttattattgaagaagagaagcctcgccctcgccttactcgagtactggaccagactggtaagaaaataaagcccgctaagaaggttgtagttcctgacaatgaggaacgtgctcctcctaagaagagaaagcgaatgaagctagatccttatgacacttcaaacaaacggattgaagattcttctatccaagatgtttccagtgcagagaaggttctcgtgaattgtacacctgaagaagagactgaaatgtcaataaatgcaaaatttcgtgctatacagccaagttcttcaatcctttcatatgtggaagataatttactaggtcgtaggcgcttaattgagataaaaaatgctggctacaatgtcaagatttctgctcctctggataacgttcccttctcaaccagcacagaacgtgaacgcatagaagacattgcgttcagaaataagctggaattctttgctgctgcaaagatctcttcctcattccccactccaacactcccagagatagcatttgcaggtgtatcgaatgttggtaaatcctcactcctaaattcacttacaagacaatggggtgttgtgcgaacatcagataagcctggacttactcagacaataaatttctttcaacttgcttcaaagttatgtcttgttgatttacctggatatggttttgcttatgcaaaggacgaagttaaggaatcgtgggaggaacttgtgaaagagtatgtttcgaccagagttggcctagaaagggtgtgccttcttgtgcacactaaacgaggaatgaaaccgttggactatgagcttgtagacttaatggaaaggcacaagacgccataccagattgtactgacaaaaactgatttagttttcccaattgatgttgctcgccgtgccatggaaatccaagagagcctgaagaggaataagtcagtggtaaacccagtgatgatggtgagctctaaaacaggagctggcatacgcaacctgagaggcgtgcttggaaagttagctcgcttcatcaaaccgtagcaaagctgcagccaatttcggagtctgcgtctgcgtcggtcgagaccgtgagaggaaactcacaccaggctgtcttaggcaggtgccgcgctacgtcaacgctctaaccagtccaccgccacaagctttgtctgcatcagtttagactatcgaacacttgcagcaagcgttcctagttaggttatgctttggagcctagctgtatcacaggccattccggtaggattgaactgttcaacttttgagtggattatgcgatgctcagattaatccatgaaatatttgagtttccccatttggatatacggaatcgtacatccttaaaaactattatgcatcgttccttgatgtacaatactttttcagtgatgattcatcactcatcagtcattgatgttttatgtgttcttcacgaaaaaggta

SEQ ID NO: 96480 - DNA, 1882 bp, Zea Mays
ttgtcaaaaaaaaatatgttcaagacaaaaaatatctcaggttcagttaaaaatttccacatgctgaagaaaagattgtttctaactcaagcgaaaagtgacatagctttatgcgaaagatgcaccaggttattctaagttcaattgaaaaaggtcctctagcttttccttcaatggggaaaatgtttgacctcaataaaatataaaaataataaatttgctcattttgtaatgtaatgttaatatcattattgtctcactcatttttcatttgaaattaaaatgttccactaggcagtgtccaggaatccaggatgtgaggctaaatacaaaatcaagaagaataaatataaataaaaataaaacgagagagagagaaagaaacacataagttaaggaggtgtggaaaaaacggcccagcagaaggcccgtgttgctgccctcccctgggccgacaaaccccggacgggcctaccgccgtcagccgcatccgtgattccgttcaccttcacggcttcaccagcctgcgctctctcctctcagcgcgacgactgggtgggcggggctaccgccgccgccgccgcccgacaccaggtgccgaggttttcgtcggtctcttcgccggcgacgagctccaaccaggtgctagcgcggtacaattttcgagaatttgtggtgttgaactgaacctccatgacacaagctaaacctgcccctagtggcaagaggaactggagcagtggcgggactgccgctggaaggaagaacaaggaaagaggagatgacaaagcaaaaggaatcagggttgctggttggaacaagggcgacaagaagaaagaagacaaagggcgccaagtaagtgcgggatcgaagaggcggtggagtgagggagtgccccgggttggtgtgaagagggctgtgtctgggtttgacaggaggaagaggaagatcgatgatgactcgtgggatgatgacggtggcaaggatgtttcatcttccaaatcaaagtttaccagaaagtgttcttccacaataagccgtcgaaaggtttctcctggaaaaggtgacagattgaagtctcaaacgttgtatgaggatgactaccgtgcagggaaaaggagtattagcaaagtttctgatgttagtagaggggtcaagaatcgactggtgaattctgtagcatccaaagggaagaagcttggtgcatccgaaggagtcatacgaacaaagaagggtggtgctaaagaagttgatttggatgaggaggctgttaatagcaagaagtcagatgacttggatcttattattgaagaagagaagcctcgccctcgccttactcgagtactggaccagactggtaagaaaataaagcccgctaagaaggttgtagttcctgacaatgaggaacgtgctcctcctaagaagagaaagcgaatgaagctagatccttatgacacttcaaacaaacggattgaagattcttctatccaagatgtttccagtgcagagaaggttctcgtgaattgtacacctgaagaagagactgaaatgtcaataaatgcaaaatttcgtgctatacagccaagttcttcaatcctttcatatgtggaagataatttactaggtcgtaggcgcttaattgagataaaaaatgctggctacaatgtcaagatttctgctcctctggataacgttcccttctcaaccagcacagaacgtgaacgcatagaagacattgcgttcagaaataagctggaattctttgctgctgcaaagatctcttcctcattccccactccaacactcccagagatagcatttgcaggtaactgatggaaacaagaatgttttagtggtttaggcttatgaaatgtctctgtta

SEQ ID NO: 96481 - DNA, 855 bp, Zea Mays
aacactgtagatactgaatgaggcagaacactggtgcgggagaagctagaagagttgtcgatcaaagaacggcaacatagcaggagacgggaaggaaaagagaccatgagatcgaggagaactggtacacctataagatcaagagatgacaaggctaaaccgaccatgcagaagtgctacgagtctgaggccgagaaatatcatgctagtgagacaatttcggtaccgagggcctcgtcactcccaagtccaccctatagagcaaccggcatgtatggaacttccagatatgttacagatcagtcagtgctactgcaaaagagtgaagcactccatcaccgaggatttaccagaccggaagatggtgaaaacatgaaccatgttggcaaaggaaacgtggacaggtggctccatatgctcatggataaccaacaagaagatcatgctgcgtaccattcttcagacgaacacgataatgacgaggagaatgcttcggatgagcagcgaacgcagagccgggttgacgaagagagctgcaggaatgggataactgaatattctgatgagatcatcgaggtcgaggacgagattgtttctgaccagggagcagaaagagggaggaacaactttggaattaaagacagagaggaaaagaatatttggttccataggactgacagcacctggggtttctggtcactgccatcatcaccctccatgatcctgggaatgagaaaaggtgtggaacgcatggctgtcgacgatgaccgcaaatatggctatgaggattcagtgtctaggagcagcactaagtttccgcgcccagcagcctgtgcagctgcgcctcgacgctag

SEQ ID NO: 96482 - DNA, 1442 bp, Zea Mays
caagaacaaggaacgccgaaagaaaaagcgtgtccacatactcctccattcaccgcctctgccgctcacacgtgtactactactactactacctgacgaagtgaacgcggcacacagatttgtctttgctgaagaatccggctcctttcatttgttagaaggatcccagatctagatgcagcagcgcgatctgaaaccgtgttgtcggccagccaagctgcggagtacttggtactccctccgtttctttttatttgtcgctggatagtgcaaaattacactatccagcgacaaataaaaagaaacggagggagtatttgtttagtcaaatttgacggtggaaaccgaagctgccattgccagtaccgccgaggcgtaccgccgaggctgctgctactactagaggctatcgggctgcctgccgactcccgggcctacctggtcaaacttggcgagcctggggtcgcatcgcgtcgcgtccgcccttcgccgcagccgtcggtccgggtgcggcggccctccctagcccgtgcctgcgcgcggcgcggcgatggatacggaggcggtcccggcgctggcggtggtggacgcgcggttctgcgcggcgggcgcggccacgctggccgtggccaaggcgctgagcatgtccggcagcgacttcgccgtcacggacgcggccacgggcgcgcccgtgctgcgcgtcgacggcgtgctcttcagcctgcgccggcgctgcgtgctcgtcgacgccgaccgccgccccgtcctcaccgtccaagaatcggcgctgatgctgaacacgcggtggaaggtgttccggggcgacagcacccgccggcgggacctcatgttcagcgtcgtgaagccgtccgtgatccagctgcgggggcccaccaaggtcagcgtcttcctcgccagcaacgacgccgagcaggcctgcgacttcaggatcaccggcagctaccacgacggcgcctgcgccgtctccctcggcgactccgacaccgtcatcgccaagatcgaccggcggttcagcgtggtcagcgcgctgctggggaagaactcgtacagcgtcaccgtcaacccggggatcgactacgccttcgtcgtcgcgctcgtcgtcatcctcgacgagatgcattaccagcgatgacacgcacgcttcagttttggttccaagccgcgcgccttcccttctgctgttggctgttgcgtggaataaggctcgccccgttctcgaatgtttgtcgcgagagactacttaatttccatacgaggatcttaaccttcctaggcacttggcagttccatctggccgtgtactcgacacggacgttctctatttgttaaatacctatgctatttattgtacacttaaatattctacatattttacttttaattaatttattgtctaaagtataaaatctacaagagagaga

SEQ ID NO: 96483 - DNA, 1950 bp, Zea Mays
acccaacccaacccaaccgcgctttttgtcacctggaaagggaaggcaagtcgagattcgagaaggcaaatcgaattcgccatgggcatggctgctccgcgcgcgccgctgcctctcccccaactgctgctcctcctcgttgccgcgctcctcgccgccgctcccctccctagggcggccagggcggacgagttcgacgtccgccgccacctctccaccgtcaccaggtatgatgtggccagggagtccagtagtgtcatctccatgccgtcaatcccagacgggtgccgtgtcattcacctcaatttagtggcaagacatgggactcgcgctcctaccaagaagcgcatcaaggagctggatagattggcagttcgactggaagcccttctgaaagaggcaaatcaggtccttgatagtgattctctgaagaaaattccatcctggattaaaggctgggaatcacgctggaagggtaggactaaaggtggtgagctgattagtgaaggggaagaggagctttacaatttagctaccagaatgagggagaggtttcaagatctatttgatgacgaatatcaccctgatgtatattcaataagagcaacccaggttcctcgagcatcagctagtgcagtggcatttgggttgggactactttctgggaaaggaaagcttggacaagggaagaaccgagccttttctgttctgagtgagagtcgtgcaagtgatatttgtctgagattctttgacagctgtgagacatacaaggcatacaggaaaaggaaggagcctgatgtagagaagcaaaaggaaccaattctagagcatgtcacagctgcacttgtcaatcgttatcacctaaaatttacaactcgcgatgtttcttccctctggtttctttgtaagcaggaagcatctttgttgaatacaacaaatcaagcttgtgggctttttaatgaagctgaggttcgttttctggagtggacagatgatttggagggttttgttctaaaaggctatggtgagtcaattaactacaggatgggactgccattgctcaaggatgttgtccagtcaatggaagaagcaatcatagctagagaagaaaaccgtgctgatggtacgtttgaaaaggcaaggctccgatttgcacatgcagaaactgttgttccttttagctgccttcttggtctttttcttgaaggtccagaaattgagaagatacagagagaggaagcattggacctaccccctttgccgccacagggaagaaactggaagggcagtgttgttgcgccttttgctggtaacaatatgctggttttatatcaatgtccaagcaaaatttcggatggcagcacaatctctggaggccgaaacaactcttacttagttcaagttctacacaacgaagtcccagtttcaatgcctgggtgcggcaacaaagatttctgtccgttcgaggagttcaaggagaaaattgtgaaaccgcacctgaagcacgactacaacatgatatgcaaggtcaaatccccagcggcaagcgaggagcctgcctcgttcgcctccagggtgtccagtttcttcctaggactcctctcgcagaaagggtaccgcggtgtgggcgccgagggcgtcaagaccgagctgtaggcgtcaagacctagcttagcacggtgccgtctcctctcaccgtctgcgagcacgatcaggaaccagactaacccatgcactaacccgcagtgtttttgtacggggcgagtcgaatgtgtaggacaccaccacaggaggcgccagttcggttgtctccagggccagacgcctctgatactgtagtagcaataacataaataataaatgtgtttcgattcggactccctttcgcgcagaaagaaacaaatgcatgaatgaatgaatgaaatagtacgtgataagcatcttctgggg

SEQ ID NO: 96484 - DNA, 1900 bp, Zea Mays
acccaacccaacccaaccgcgctttttgtcacctggaaagggaaggcaagtcgagattcgagaaggcaaatcgaattcgccatgggcatggctgctccgcgcgcgccgctgcctctcccccaactgctgctcctcctcgttgccgcgctcctcgccgccgctcccctccctagggcggccagggcggacgagttcgacgtccgccgccacctctccaccgtcaccaggtatgatgtggccagggagtccagtagtgtcatctccatgccgtcaatcccagacgggtgccgtgtcattcacctcaatttagtggcaagacatgggactcgcgctcctaccaagaagcgcatcaaggagctggatagattggcagttcgactggaagcccttctgaaagaggcaaatcaggtccttgatagtgattctctgaagaaaattccatcctggattaaaggctgggaatcacgctggaagggtaggactaaaggtggtgagctgattagtgaaggggaagaggagctttacaatttagctaccagaatgagggagaggtttcaagatctatttgatgacgaatatcaccctgatgtatattcaattgggactactttctgggaaaggaaagcttggacaagggaagaaccgagccttttctgttctgagtgagagtcgtgcaagtgatatttgtctgagattctttgacagctgtgagacatacaaggcatacaggaaaaggaaggagcctgatgtagagaagcaaaaggaaccaattctagagcatgtcacagctgcacttgtcaatcgttatcacctaaaatttacaactcgcgatgtttcttccctctggtttctttgtaagcaggaagcatctttgttgaatacaacaaatcaagcttgtgggctttttaatgaagctgaggttcgttttctggagtggacagatgatttggagggttttgttctaaaaggctatggtgagtcaattaactacaggatgggactgccattgctcaaggatgttgtccagtcaatggaagaagcaatcatagctagagaagaaaaccgtgctgatggtacgtttgaaaaggcaaggctccgatttgcacatgcagaaactgttgttccttttagctgccttcttggtctttttcttgaaggtccagaaattgagaagatacagagagaggaagcattggacctaccccctttgccgccacagggaagaaactggaagggcagtgttgttgcgccttttgctggtaacaatatgctggttttatatcaatgtccaagcaaaatttcggatggcagcacaatctctggaggccgaaacaactcttacttagttcaagttctacacaacgaagtcccagtttcaatgcctgggtgcggcaacaaagatttctgtccgttcgaggagttcaaggagaaaattgtgaaaccgcacctgaagcacgactacaacatgatatgcaaggtcaaatccccagcggcaagcgaggagcctgcctcgttcgcctccagggtgtccagtttcttcctaggactcctctcgcagaaagggtaccgcggtgtgggcgccgagggcgtcaagaccgagctgtaggcgtcaagacctagcttagcacggtgccgtctcctctcaccgtctgcgagcacgatcaggaaccagactaacccatgcactaacccgcagtgtttttgtacggggcgagtcgaatgtgtaggacaccaccacaggaggcgccagttcggttgtctccagggccagacgcctctgatactgtagtagcaataacataaataataaatgtgtttcgattcggactccctttcgcgcagaaagaaacaaatgcatgaatgaatgaatgaaatagtacgtgataagcatcttctgggg

SEQ ID NO: 96485 - DNA, 1440 bp, Zea Mays
ctcgtgttccttctttcccctttcccctctcgcctctgctgccctcgccgagtccacccaatcccccgcgcggcgacgctagtcgcctccgatggcagcccggcgcgggccccacgtcatcaagcttcacgatcccaacccgcccctcctcggacgggcgccgggggccgcgccggccgccgtccccgcgtcctcgcgcgatgagggcctcctcgcgcagcacctgcgcgcctccgcggcgcacccggccttcgccctcatcgaggagcgcctcgccgcccgggaccaggatatccaggagctcctcgtcgacaaccagcggttcgctgccacccacgtcgcactccagcagcagctcatagcggcgcaacacgagctccgggcggtctccgtcgccgccaccagggcgcgcgccgagcgggagggcgaggtgcgctccctggccgaccaggcggcgcatatggaggctgaggcgcgggccatcgccgctgcgcgcgcggagatcgaccaggtccacgccgacgtccaggtgctcgccgcggcgcgcaccgacctcgtcaacaggctccaggtcctacgggagaagctcgcgcacaagaaggctgaggcgagtaagaccgattccgtccgtccccagattgaaaccatgcgccgggagatccagaacggcagagctgcggttgattttgaaaagaaggcacactctgataacctcgaacaaagtaaagcaatggagaaaaatatgattgctgtggctagtgagattgagaggcttcgaggagagcttgcaaatgctgaaaaaggggccactgctgtcaacccagcagcagctgttggtaactctgggtatgctgcgccttatggcaattctgcgtcaacatatactggaatgtatggcaatcctgatgcaacgtataccgcgcaggcttatcctgacgcttatagcactaatcagggtcacatgcacaccgtcgccaatccgcattacatgagtcaacctgttccctatggacaatacgagagccagcacaccaatgttcaaagatgactggctgcaagagatagctttgactcgcctgccatctcattgtaacaggatagtcgcagaatccaccatgttacattgaaagtgctgaagtcctcatgttcatgattttttttttatttatttggctaatttgttccagaatcgatgggttgaattttggagcaaaaacctctcgcgcctctccatttactaccctgatgattcctcagttagtgatggtgttattcagggacgatgatgcctctagccttttacgaatgcgaccgtccatgctcgccgagatcaagcttagggcatatttgggagtaaagtatttttatagtttcttgataatgctatgtttttaataatattttagtattttatatcataagatgtttggttgtgtttct

SEQ ID NO: 96486 - DNA, 1291 bp, Zea Mays
aaaaaacagagcagcatcgacggtttactgcccgtcctcaactcgtgttccttctttcccctttcccctctcgcctctgctgccctcgccgagtccacccaatcccccgcgcggcgacgctagtcgcctccgatggcagcccggcgcgggccccacgtcatcaagcttcacgatcccaacccgcccctcctcggacgggcgccgggggccgcgccggccgccgtccccgcgtcctcgcgcgatgagggcctcctcgcgcagcacctgcgcgcctccgcggcgcacccggccttcgccctcatcgaggagcgcctcgccgcccgggaccaggatatccaggagctcctcgtcgacaaccagcggttcgctgccacccacgtcgcactccagcagcagctcatagcggcgcaacacgagctccgggcggtctccgtcgccgccaccagggcgcgcgccgagcgggagggcgaggtgcgctccctggccgaccaggcggcgcatatggaggctgaggcgcgggccatcgccgctgcgcgcgcggagatcgaccaggtccacgccgacgtccaggtgctcgccgcggcgcgcaccgacctcgtcaacaggctccaggtcctacgggagaagctcgcgcacaagaaggctgaggcgagtaagaccgattccgtccgtccccagattgaaaccatgcgccgggagatccagaacggcagggtatgctgcgccttatggcaattctgcgtcaacatatactggaatgtatggcaatcctgatgcaacgtataccgcgcaggcttatcctgacgcttatagcactaatcagggtcacatgcacaccgtcgccaatccgcattacatgagtcaacctgttccctatggacaatacgagagccagcacaccaatgttcaaagatgactggctgcaagagatagctttgactcgcctgccatctcattgtaacaggatagtcgcagaatccaccatgttacattgaaagtgctgaagtcctcatgttcatgattttttttttatttatttggctaatttgttccagaatcgatgggttgaattttggagcaaaaacctctcgcgcctctccatttactaccctgatgattcctcagttagtgatggtgttattcagggacgatgatgcctctagccttttacgaatgcgaccgtccatgctcgccgagatcaagcttagggcatatttgggagtaaagtatttttatagtttcttgataatgctatgtttttaataatattttagtattttatatcataaga

SEQ ID NO: 96487 - DNA, 1790 bp, Zea Mays
gtcctgcccacgcgacgcgagagcgggagcggtgggtcgagggacgagctggaccccgccgctagtcccctacccctgcctgctcccccccgcctgccccgtgtttatatctgccgcgccgcacagggagagagtcgagtccagctcggcaggtcagtcagtagtggatagctccgctcgcggtcgcgggcggctcgagtcgcaccccagatcccaatgcgccccgccgcgccgctctaggccgcggaacggaagctaggtgcgtcacacgccggggccggtcgcggtcaccggaccggacgcacaggggcgccgtacgtgcagtcatcggccatgaaggtcctcgtcgtcgccgtgctggcgctcgtcgccgccgccgccgccgccgtgcagggcgaggaggggggcgggccgccgctgccgttcgcggtgggcgcggcgccggcgggctgcgacgtcgcgcagggcgagtgggtgcgcgacgacgacgcccgcccatggtaccaggaatgggagtgcccctacatccagccgcagctgacgtgccaggcgcacggccgccccgacaaggcgtaccagagctggcgctggcagccgcggggctgctcgctgcccagcttcaacgcgacgctgatgctggagatgctgcgggggaagcggatgctgttcgtgggtgactcgctgaaccgggggcagtacgtgtccctcctctgcctcctgcaccgggccatccccgacggcgccaagtcgttcgagacggtggactcgctgagcgtcttccgggcgaagaactacgacgccaccatcgagttctactgggcgccgatgctggccgagtccaactccgacgacgccgtggtgcactccgccgacgaccgcctcatccgcggcgcgcccatggacaggcactccagcttctggaagggcgccgacgtcctcgtcttcaactcctacctctggtgggtcgccggggacaagatccagatcctaaggggcgccgacaacgacccgagcaaggacatcgtggagatgaagtcggaggaggcctaccggctggtgctgcaccaggtggtccggtggctggagcgcaacgtggaccccgtcaagtcgcgggtgttcttcgtcaccgcttcgccgacgcacacggacggcagggcgtggggcgacgacgacgcggagggcagcggcaactgctacaaccagacgtcgccgatcagcgccgcctcgtcctaccgtggcggcacgagccaggagatgctgcgcgcgacggaggaggtgctggccacgtcgcgggtgcccgtcgggctggtcaacatcacgcggctgtccgagtaccgccgggacgcgcacacgcagacctacaagaagcagtgggtggagccgacggccgagcagcgcgccgaccccaggagctacgccgactgcacgcactggtgcctccccggcgtgccggacacgtggaacgagctgctctactggaagctcttcttccccagcaacgatcaggtcctctgatggtgcattggtgcctgcatacatacgcctggaaaccaactgctaggggctagcccaaagaaaatgtgtctagatgaacaaagacatggggttcaaatgttttgttttgatttcggatatggacgctgtcgatgctcttgttctctgtggaattcttcttaccaactgtgcctcccatatatacatcactactgatactagaatctatgctgatattttctttcgttaaaaaaagcgacagtgaagcgtagaagcacctacaagagttttcaaaa

SEQ ID NO: 96488 - DNA, 1798 bp, Zea Mays
gtcctgcccacgcgacgcgagagcgggagcggtgggtcgagggacgagctggaccccgccgctagtcccctacccctgcctgctcccccccgcctgccccgtgtttatatctgccgcgccgcacagggagagagtcgagtccagctcggcaggtcagtcagtagtggatagctccgctcgcggtcgcgggcggctcgagtcgcaccccagatcccaatgcgccccgccgcgccgctctaggccgcggaacggaagctaggtgcgtcacacgccggggccggtcgcggtcaccggaccggacgcacaggggcgccgtacgtgcagtcatcggccatgaaggtcctcgtcgtcgccgtgctggcgctcgtcgccgccgccgccgccgccgccgccgccgccggtcagggcgaggaggggggcgggccgccgctgccgttcgcggtgggcgcggcgccggcgggctgcgacgtcgcgcagggcgagtgggtgcgcgacgacgacgcccgcccatggtaccaggaatgggagtgcccctacatccagccgcagctgacgtgccaggcgcacggccgccccgacaaggcgtaccagagctggcgctggcagccgcggggctgctcgctgcccagcttcaacgcgacgctgatgctggagatgctgcgggggaagcggatgctgttcgtgggtgactcgctgaaccgggggcagtacgtgtccctcctctgcctcctgcaccgggccatccccgacggcgccaagtcgttcgagacggtggactcgctgagcgtcttccgggcgaagaactacgacgccaccatcgagttctactgggcgccgatgctggccgagtccaactccgacgacgccgtggtgcactccgccgacgaccgcctcatccgcggcgcgcccatggacaggcactccagcttctggaagggcgccgacgtcctcgtcttcaactcctacctctggtgggtcgccggggacaagatccagatcctaaggggcgccgacaacgacccgagcaaggacatcgtggagatgaagtcggaggaggcctaccggctggtgctgcaccaggtggtccggtggctggagcgcaacgtggaccccgtcaagtcgcgggtgttcttcgtcaccgcttcgccgacgcacacggacggcagggcgtggggcgacgacgacgcggagggcagcggcaactgctacaaccagacgtcgccgatcagcgccgcctcgtcctaccgtggcggcacgagccaggagatgctgcgcgcgacggaggaggtgctggccacgtcgcgggtgcccgtcgggctggtcaacatcacgcggctgtccgagtaccgccgggacgcgcacacgcagacctacaagaagcagtgggtggagccgacggccgagcagcgcgccgaccccaggagctacgccgactgcacgcactggtgcctccccggcgtgccggacacgtggaacgagctgctctactggaagctcttcttccccagcaacgatcaggtcctctgatggtgcattggtgcctgcatacatacgcctggaaaccaactgctaggggctagcccaaagaaaatgtgtctagatgaacaaagacatggggttcaaatgttttgttttgatttcggatatggacgctgtcgatgctcttgttctctgtggaattcttcttaccaactgtgcctcccatatatacatcactactgatactagaatctatgctgatattttctttcgttaaaaaaagcgacagtgaagcgtagaagcacctacaagagttttc

SEQ ID NO: 96489 - DNA, 2219 bp, Zea Mays
aaaaaaactctgcagccggtcaatgcaagtaggtgggattgcttgtgttgtgtcaattcggacccgcacccgcctaacaaatccagctggtggagtggaggcactgtatcccgtacccactctggcctactccatccaccaaaagtccagggccccaaacggccaaacgcaaaagcgagagcaaagcaagcttcggcctcacctccagcggcaggtggtgctgcggagcttctcctcgccctagatcccgcgcacccaacgccagatcagagatcagggcgcgccggccgtctccattgtccggcggatcctgcgttgcgagctggaccgagagggaggagcgagggagcgcgcgggtagagaaggcggggcggggggaggaaggaaggaaggagcgccggccggagcagacgtcccctcggggccctcggtcggatgagatcgacgatgaaggcgcagcacgccaacgggcgggggagcaggagccccttcctgacgtcctacgcgctcacgctcgccttcatcaccttcgtctccgtgctctactttaaggacttctcctccacgctgcaccgccccttcctccaccgcccccgccgccacgccgccccagacaaaagccaggcggggcgccgcgcggcggcggagcggctgccgttcgcggtgggcgcggcgccggcggggtgtgacgtcgggcgaggggagtgggtgtacgacgacgcggcgcggccgtggtaccaggaggaggagtgcccctacatccagccgcagctcacgtgccaggcgcacggccgccccgaccgggcgtaccagcactggcggtggcagccgcgcgggtgctcgctgcccagcttcaatgcaactctaatgctagagatgttgcggggtaaacgaatgttgtttgttggagattctctgaaccgtgggcaatatgtatctttggtttgcctcctgcaccgaatcatccctgagagctccaagtcaatggagacagttgattcccttacagttttcaaagcaaaggactacaatgccaccattgagttctactgggctccctttctggccgagtcgaattcggatgatgctgttgtgcaccggatcgcggatcggatcgtaagagggacatccattgagaagcatgccaagttttggaagggggctgacatcttggtattcaacacctacctatggtggatgactggacaaaagatgaagattttgcggaactccttcgaagataaaagcaaggatatcatagagatggaaacggaggaagcctatgagatggtacttaatgctgtgctgaaatgggtggagagcaacatgaaccccaggacatcaagaacattctttgtcactatgtcacccacccacacaaggagcagagactggggcgatgatactgacgggaactgctacaaccagacagcccccatcgaggacctgtcctactgggggccagacaccagcaagggcctgatgcgcgtgatcggagaagtgttcagcgcgtctaagtccaggatccccgtgggggttgtgaacatcacccagctctccgagtacaggaaggacgcgcacacccagatatacaagaagcagtggaacccgctgaccccggagcaggtcgcggaccctaagagctacgcggactgcacgcactggtgcctgccggggctccaggacacgtggaacgagctgctctactccaagctctttttcccctgagttaaaggtttgagttgcgaggtgcacggtgaagttggggtctctctctggcattggcacgctgcacaatactagttagcttggcattggcccagcagtctgaagatggatgctctgctgcggtatggcatggcatggtattgttgatgtacgattcattcgttggaaaacctggacgtgagtgctggaattgcaccatctggccttttctgtacatgcctgatgtaacggtggtgttgtgtttccccaccaccacctctcttttcacgatgatgacacagtgcatgaatagttgtatggggtaatgtgataatacatactgtaattctctggttccttcccttcttctctgtttgccctcccttttgttgggcctacgctagcatcaaatctgtctgataggctgggccttgcggagtgggccggtagacaaacatttcggcggctggtcacttggtcagtgacccgttgatattattattattattgga

SEQ ID NO: 96490 - DNA, 241 bp, Zea Mays
ctggaatacgcaggagagctgcgcatctttgtattaatagaagaaaagaaagggggagagaccccaatacagcacacacaccactagagactaactacggatcaacgactaaaacatgtaggaaacacgacccacaccgttgttttaagccagcaactcttcgacttggaggaaggacaaggccttggcaccagtcatggaccagagcaccgcctcttccctagccatcctaagggccgtg

SEQ ID NO: 96491 - DNA, 114 bp, Zea Mays
gtattttagttgccttatcctatggccctgtttccacttcgttggacttttttgctaatggatctgttttcgttaaggttatgtgcactgtatttattactaatttgattgtat

SEQ ID NO: 96492 - DNA, 93 bp, Zea Mays
aaattaagagaagaaacaatctaaaatggactaaagtacaatggcacataaggccaaacacaagaccaccaaatcctgaccaaacacaagacc

SEQ ID NO: 96493 - DNA, 351 bp, Zea Mays
tcaggcctagagaaagaagaaaatatagatgcgatgaaaatgaagtggacagctggccaagtggctttgtcactgcagggcagatgaaagttggggcaggttatcgtcgcacaaattcctcttgtttctttaggaggataattcttcctccatgcagatcacagcagggtgtaattagcctgtctccacttggactaactagaatttttaaaggttctattgcggatggaaacgagcatgtcaaaatttttcattccgagttgcttatgtattcatcttttcttggcaaaggagatattgatattggttttatggacgaaatgcttccatttaaaaaggattccgcttttg

SEQ ID NO: 96494 - DNA, 3704 bp, Zea Mays
aaataacacgcgagcaaagcgaaggatgaaaacaaattcaccacttaaacgaggtgtcaatgacaatattgaaagtagagctaatgagctggataacaattctaacactttacatagttcaaagattggtgaacaagctagaaatttgctctctgaagaggaatttgtaaagatggaagcatctttatctggttgggaacaaaatgttaggcctgtagatatggagaaggctgtgctctctttactggaatttgggcaaataactgctgctaagcaactccaacaaaagctgtctccatcatatattcctgaagaacttgtccttgttgatgttgctttaagaattgccaaaaacagcagtaatggagagatcaatttgtcatgctttgacacacaggctcttcggatacttcagtcactgagagtagcaaatagctgcgatatgattagcccatcacaggttatggagatactagctgcgaaatgtggtgagggtcgtgggcgagctcttattaggagaataataggagttgttcgaactgctagattattgggactcccattttccgaagcatttgagaaacaaccaattgaacttctacagttgctttccctgaaagctcaggattcttttgatgaagcgaaatttctagtggagacacacatcatgcctgcatctagcattgcaagaattctagctgattcgttcctaaaggggcttttggccgcacatcgtggaggctatttggattcccaaaaggaagagggtcctgcacctctattgtggagatcaagtgacttcttaaagtgggcaaaactatgtccatcagaatcagaaattggccatgctttgatgcgtttggtaatgactggacatgaagtaccacatgcttgtgaggttgaactcctaatattgtcgcaccacttctacatgtcatcttcttgtcttgatggagtggatgttctcgtcacatttgcagcaaatagagtggactcatatgttttagaggaggatttttcttgtttagctcgtttgatcactggagtgagcaatttccattccttgagcttcattctttcaatccttgtagagaatggccaattggagttgctgcttcaaaagtattctgccactgacacagccacagggacgcttgcatcggttcgaggatttaggatggctgttattacatcactgaaacagtttatcccgaatgatgacgacgctctctctatggtatacaagcactttgacatgaagcatgaagctgcttctctccttgaatcacgtgcagagcaatacatgaacagctggttatcacgatatgataaggaacggcgaaatgatgagcttctggacgctatgcatcatcttgtagagacagctgaggttctttcaactattgatgctggccaaagaacacatcgtgcttgtgcccgtgcttctcttctgtcacttcagatccgaataccagatcttttgtggattggtctttctgagaccaatgcccggcggatttttgtggaacaatctaggttccaggaagctcttattgttgctgaagcatacaacataaatcaacctatagaatgggccccagtcttttggaatcaaatgctaaaaccggatctaatcgagcaattcgtggctgagtttgtctcagtgctgcccctgcagccaccaatgcttctcgagcttgcaaggttttacagggcggaggttgcagccaggggggagcagtcacacttctctgtctggctttcacctggaggcttgcctgcagagtgggtgaaacatcttggtagatccttcaggagcctgctgcgtagaacaagggacatgaggctgaggctgcagttggcaactctggcgacaggcttcattgacgtccttgttatttgcaatagagttttggacaaagtcccggacaatgctggcccgctgatcctaaggaagggacatggtggagcataccttcctctcatgtagatatttcccttctctttttggtgcattggattcagaacttaattcttggcagttaggctatatattgaaaggcagatgaatcttgcaaatattatatgtatcagctttctttggttcagcatctttaaagtcaagcttggctgcagtcttggacatggattctcatcgatgatgccatgaaagacttttgtgattgtatgtgcagcattttgagcggaaaagctggcagaaatgggatttttgcagcttcatccggcaggtgttttcgcacccatgatatattgtatgttttgcatgtacgaagatccgccccgtatttgttttcctcttttttttttggttttgcaagtgtcatgtaggtcgatttgctgtctgtgatttggactgcaagtctgcaaccagacggcagatgcgtcgagacgtcgagtgtccagtccagcgaaagcgtaaatacaaagcacatggacgttaaccagacggcagatagcctttgtttgttgttctactggtaatgttcttattttctaaccatggttttacaacccaggggatcttgtcctggcaactgctgagatcaactcatcacaagttgaatctcagagctctatcggatacctgtactcaggcagtcttcaaaacgttttctactattccccgagtgaagtctttagcatggggatactgttctgatgcttttgatgactcaagttttaatgaaattctagtggtatcaagtgatgcttctatcacagtccatgcattctgccattctcgcaaaagcacactaacagttaattcaatgtctgatgctaaagagttgcatggggagtggaaagagtggcgccctactgaatgttcagtgttggaggatggtgagtcaggtccagataattggttttgttcttttcctaactacagtcactgcgtctgtttctaatggaaaaataccaagccagattgcccatgaaatctttattgcctaattcagcagaagttgtatcctttagcatatatgacattactctctctttcttgaaatattggtatagcaaatgttctctgaagactatggcggaaactgacagtgaatcaccacgacgttttcttagagcatcgtgcagttgtcagtgggagtgtctaaaagttttgtctagctcgtcatgttatttgatcggcttagttctgactcctaatgaatcagtacgttgtgaggcccatccatccaatgcggagtgtattttggttactgttctggagctaaaccactggggcatacagtggaactttgtggcagaccttcaggatgtatctgatggtattacgccaagtccaaaatgggttgattttcagttatcagatgtgtttcttgcctgccttaatacagcaggttttgttgccatttggaacgtgaaaactggtggtcttgtgacgtcattcagtgttcttcaacaatgcagaactgatctggagatgcctctgaggagctctatgtccattgtgacaaatttggacgagggaaatatccatgttgagaactttgttggcagaatgtttaagcggttagttttggcatcatattcttatcttcttgctgttgtagatgaggttggagtagtgtatgtgttctatgcggatgacatcttaaacttcaaagctaatgtgcacgaaaactttgatctgcctgttatgaatcagtttgctgattgtttttcta

SEQ ID NO: 96495 - DNA, 864 bp, Zea Mays
ggcccttttggaatgcaacttctatcaactgccccatcatctgaagagttattcactcacggtgtctccaattatatatacaattctactggatataccgaagccaatgcactgtccttagaagcatcgatccaaaaaagtgttgaagaagaattatattcttcccttgaggagaaagatgtgagagtggaacaccatttgcaccgtggtcgagccttagctgctttcaggcatcttattgctaagagggcttcacagttgaaatcagctagtgcacgtcaagtgatatccgcacagtctaatgttcaagcagatgtacaattgatacttgctcctctaagtcaagttgaacgatcaattcttatatcggtggctccactagctattacaaactttgaggactcgactctagttgcttcctgtatattcttgttggaactttgtggcctgtgtgccaacatgcttcgtttagatattgctgcactacgacgcatctcttcctactacaagtcagttcaagaaaataaacatgttgatctatctccaccaaggggcccagagctccatgtgcagtcccatggagctggtatagctcctgctctagctcgagcgctagctgaagattatgtccagtctgatcatctgcatgttttggagcagactcaaacctcgatggctcccaagcgggaacagacacaatatcctcttatttctattctgcaacaccttgaaaaagcaagtttgccatcattggaggaaggtaaaacttgtgggttttggcttttgactggtgttggtgatgcatctctttaccggtcgcaacagaatgaagcaagtcaacactggaatttggttactgaattc

SEQ ID NO: 96496 - DNA, 1787 bp, Zea Mays
gcacctctgaagcgccacaagccataggaaaaatttgcatttggggggaccaggaatgccaagccctgtcgcagtgctcaaagtatgttgatccaatgtaaagactctcgtaggctactttggcagagtattttccattatgagcaaaactgaagatgtgtttgtcctccctttgtggatttatgtttactgtcagaatagcatcccaaagatctaggaaatcagcaagaacttccactgtgagagctcctttgatgtcatttagccaacttctatttgctagagctgtatggacagttctaccgttttgaattcgccttggcactactgccagcaatctgggagcaatgtccttcacatttcgccctgtatccatctatcttcccagaaaagagtcgaacatccattgccaatttccgtgtgaatggcggcatggaagaaggatttcacctttgaaggaaaatgcatggggagccctgcccaaggtttaccaggctccactttagccatccacaaccatctcattctcatagctcatcctggctccttaaggctgaaaatgcccaaacctccgaactcaactggcctgcacactctaccccaagccaccaggcagtgtccccctctgacttcttttcttccacgccaaaggaatcattttctaattttatcaatgtccttgagggctcttggaggtaagtccaccgccattgcaaggtagatgaccattcctgtcataacatattgaacttgcactttttttccagctcgagtcatcaagtcagctttccacccagggagttggtcagctatcttgtcgattatgctttgagtttgatttctggatagcttgctcagagacagaagcagaccaaggtatttacaggggaaagaagagatctcacatgggatacacgttgcttttttaaatgttagttttcaggcctgaagcttctccaaaaatctctaatattttgagtacaatttgaatattagattcttttggatgcaagaacatgatcacatcatcatcatacaaggacactctgtgttgcaaaggtgtagaggacaagggttgcagaagattttctagctcagcttttgagattaaccaacctagcacgtccgtgactagtatgaacaacatagctgagagggggtctctctgtcttaagccctttttaagttgaattttttcaccatctagtccattaagcatcacttgtgtggacgaggtagaaagcagtccactcagaacatctgtccaaatctgcccaaaccccagtttttgaagcacttcgaggaggaatggccaggatactgagtcaaaaatttcaaaaggattcttgcctgtctttgctgatggaggagtctggcagtttgctgcacaatcataaaattgtcttggatgaaccggcctttaataaatgcactctgcatttgagagaccatagtttgtagcttatcccccagtctgttagctagaattttagtgactagcttggccatgctatgcactaaactaataggtctaaaatctttgacttggttagcttcctcctttttggaataagggtaacaagagctgaattcaacttgctaaagtggccaaatttcctatcccaaatagctgcaagcacctgcatcacactttccttaatagcaggccagcaagccttgaaaaatcttcctgtgaacccataaggtccaggagctttgtcagacgacagctctttaatggcttcaaagacttctttttctgtaattggcaagtccaaatcctccag

SEQ ID NO: 96497 - DNA, 2420 bp, Zea Mays
cggagggaacaactgccgcacggcacggagacagacgcggacagaccgagcgattggtcggcgaccacctcacctccgccgccatccactcctcggctcgggctccacgcaatgttactcgttaccatcattagctgttgatgggcatatgaacgatgtccacatctcgtcagatagatgatgggcctgctgtactacagttatgcagatggacattgctacaaccccatctcaaactatcaaaatttcgagaggcttttatatctccaacaaggcgtctttttggactgctctcagaccatggggatcttgtcctggcaactgctgagatcaactcatcacaagttgaatctcatagagctctatcggatacctgtactcaggcagtcttcaaaacgttttctactattccccgagtgaagtctttagcatggggatactgttctgatgcttttgatgactcaagttttaatgaaattctagtggtatcaagtgatgcttctatcacagtccatgcattctgccattctcgcaaaagcacactaacagttaattcaatgtctgatgctaaagagttgcatggggagtggaaagagtggcgccctactgaatgttcagtgttggaggatggtgagtcaggtccagaaaattggttttgttctttcctaactacagtcactgcgtctgtttctaatggaaaataccaagccagattgcccatgaaatctttattgcctaattcagcagaagttgtatcctttagcatatatgacattactctctctttcttgaaatattggtatagcaaatgttctctgaagactatggcggaaactgacagtgaatcaccacgacgttttcttagagcatcgtgcagttgtcagtgggagtgtctaaaagttttgtctagctcgtcatgttatttgatcggcttagttctgactcctaatgaatcagtacgttgtgaggcccatccatccaatgcggagtgtattttggttactgttctggagctaaaccactggggcatacagtggaactttgtggcagaccttcaggatgtatctgatggtattacgccaagtccaaaatgggttgattttcagttatcagatgtgtttcttgcctgccttaatacagcaggttttgttgccatttggaacgtgaaaactggtggtcttgtgacgtcattcagtgttcttcaacaatgcagaactgatctggagatgcctctgaggagctctatgtccattgtgacaaatttggacgagggaaatatccatgttgagaactttgttggcagaatgtttaagcggttagttttggcatcatattcttatcttcttgctgttgtagatgaggttggagtagtgtatgtgttctatgcggatgacatcttaaacttcaaagctaatgtgcacgaaaactttgatctgcctgttatgaatcagtttgctgattgtttttctatctgggaagctgctggtcatgagataggaagtctatcattttgtgctaatcagtccatacaacaagggtcacttagtctaaccaaattggttcctgagttctcagggaaaagcgatgatattgtcaggcctagagaaagaagaaaatatagatgcgatgaaaatgaagtggacagctggccaagtggctttgtcactgcagggcagatgaaagttggggcaggttatcgtcgcacaaattcctcttgtttctttaggaggataattcttcctccatgcagatcacagcaggatgtaattagcctgtgtccacttggactaactagaatttttaaaggttctattgcggatggaaacgagcatgtcaaaatttttcattccgagttgcttatgtattcatcttttcttggcaaaggagatattgatattggttttatggacgaaatgcttccatttaaaaaggattccacttttgtcggagattctgttgtttgctcctgccagggatatttgtatttaattacccagtatggcctttctgtggtccttcctccagtttctatatcatccttttcatctcaatgtgacgctatcaaattctggcaaatgggtcctgctgctggtagcacatgcaatgctctgaacttactatctgttgacaaatcagacacaagctggaaaacctggcaaatagaagtcctggatagagctttgttgtatgaaggtcccgcactagcagacaggctctgttgggagaatggtgtgttttctttttgttgcctatatcttttgtttttgtatgtgtggcaccctgttacatggatgagtctcactgtagtattttagttgccttatcctatggccctgtttccacttcgttggacttttttgctaatggatatgttttcattaaggttatgtgcactgtatttattactaatttgattgtat

SEQ ID NO: 96498 - DNA, 1441 bp, Zea Mays
tcacgctcgtggcccgtcgtgtcagtgtcagggccccacgaggcggcatcgcgtcgcgggccgccaggcgtgaccgaaacaaacgaacccttttgcctcggccgggtgccttgcccggcccatgccgtgcccggttgtgtaaatagaagataggcgacgaacacgaagcaagcaaggcagccgaatcccaactcctgtgtgtgcctgccaacgcctcgtcgcccgccgccgccgctgcttcgcccctctccgccagccgctcccgctcggagcacgccgccgccggcgtgggcgcgcaccgacggccgtcgtgtcgcatggatatggcccccgcggccgtctcctccaacccgcgctcggtcgaggaaatcttcaaagacttctccggccggcgcgcggggctcgtccgcgccctcacctccgatgtggacgatttctgcagcttctgcgacccagataaggagaacttgtgtctctacggccttcccaacggtagctgggaggtctcgccgccggcggacgaggttcctccggagttgcccgagccggcgctcggcatcaactttgcgcgcgatggcatgcagcgccgcgactggctctcactcgtcgcggtccactctgactcgtggctcatctcagtcgccttcttctacggcgcccgcctcaacgccaacgaccggaagcgcttattcagcatgatcagtgatcttccttctgtctttgaagcatttgcggacaggaaacacgtcagggataggtctggcgttgatagcagcggcaagtccaggcactcatcaaagagaggaaacgatggccatgcgaagaactccagggcagcagctcctgctgccaaagagtacgacgacgacgatgacgaggaggacgaggaacacacggaaaccttttgtggaagctgcggcggcctctacaacgcgaacgagttctggatcggctgcgacatctgcgagcggtggttccacgggaagtgcgtgcggatcacccctgccaaagcggaccacataaagcactacaagtgcccggactgcagctcgaagaaaataaggcagtaggtcccagtgtgcaccgccggccatcgctgacctgtctgatcccaaaccatactccattgcttgcctgccttgccccaaggtcgcagctagcagatgcgaattccttcatttgtggggggttgttgtgtgatggatagcctggtaggaagaggcaaaggactgatatataatgactcgtttattgttcatctttttgcctgcttcgtcggtcgtcgcagtcgttgtggctgcatgaactgatgagtggtttgttcgtgctagttgtaggctgtttcactgatttgcgtgcgtatgtggactggtcctgtcaaatttgtaggcctgaaaccgtacttccatttacgtggctacgcgagctgatttgccggtct

SEQ ID NO: 96499 - DNA, 722 bp, Zea Mays
cgcctgactccaaaccctttcgcctccgccgccgcctgatagctccagcgccctcgccgtcggctgcccggctgccgtcctcccgctacgagctaggcatctccttcgccgatccagcatgggtaagacacgtggtatgggagctgggcgcaagctcaagacccacaggaggaaccagaggtgggctgacaaagcctacaagaagagccatcttggcaacgagtggaagaaaccctttgctggatcatctcacgcaaaggggatcgtcctcgaaaagatcggcatcgaggccaagcagcctaactctgctattcgtaagtgtgctcgtgttcagctggtgaagaacggtaagaagattgccgcctttgtgccgaacgacggctgcttgaactacatcgaggaaaacgatgaggtgctgatcgcggggttcggtcgtaagggccacgctgtgggagatattcccggtgtccgtttcaaggttgtgaaggtctcgggcgtttccctgctcgccctcttcaaggagaagaaggagaagccgagatcttaaaaaccctatccccctcgccacaaatgaatcatgtaatgcttttggagttctgggacctcatgttgagaacctagcgattgttttgccatagttttgtttagaagattctgaattgaattctatatccgtaaccgcttgccagtgcgtgatctgtgttaatattatctttccgtgg

SEQ ID NO: 96500 - DNA, 354 bp, Zea Mays
atgccgagatcctcggcgcgctgcggctgccacaccggcaccggcgccgccaccggctccggctccggctcggccggcggggtcggggacgggaagagctgccgcgtcatgaaccccgtggacgcgccaggcgccatctcaccggagcagtcgtcgtcgtcgacggggctcccgagcaggccgaaccggaagccgccgtccgcggagttgaggacggacgagctcgacgtgcccgagtccgccggcgacgctacattgagatccagcaccatctccgctccggagcccgccggaacccgccaaagtccagctccccgctcaagcttcgactcaccagctggtcactctgcctga

SEQ ID NO: 96501 - DNA, 285 bp, Zea Mays
gtttcttttccagagcagacgataattttatgcgaaagaagcaaactgagcagcagtcaccagatcaagcgtgaatcgccaagcaagagtcttggcttgcttagctatgcttcgacaaaatggcctccgcaacacttcgagctattgggtggtagaactcttgagcctccgagaatatcctctgggccagcatcttctcctcgctggagcacttggccagcgagctgtagagcgggcggaggtacttcatccttcccacctgcttcaagcatttctcaacctcgt

SEQ ID NO: 96502 - DNA, 1782 bp, Zea Mays
tcctgcgtgtttgagatatatatattgctaactcaacttgtatacaattcagtatgttcttcctcctgagaatttgtatcactcagattttgaaagttgcacttttcagactgatgcttttcattttcttctttcaggacaattctgcacgttgttggatctctcacgaaaaccaccttgaagaaatttttatgcattcaaattttccagagctaagggagtcagcagacgtaaaactagtagatacttaaatgtttgttatccttgatgtccattttctttctcatataattgggttttcaatgtgcatgcagctatcagaactctctgatcgatgctatggtcttacactagcacctggagaacagatgattgctgtggtccgcagtttggatctgaaccttctgaaccagatgtatcaagtcaggacacaaaaggcggtggttgagttcatttggattggtggccaatttgttggtattccactagacaggagcattgatatttgcagttcacagtccacagacttatcctcaagtaatctcatgtggtggggatccaacattttgtggtcgctgaagaaatacgaaaatgtagaaaagaggcttgtgatatgggatgttgtagctgtgctgcaggagttgaagaaatccgcacctgcctttctggagactctagtgcatagttgggtctcagtgttactttcgggcgacccccagtgtgtttctatcgatgctccatcacgttcaatgcatgacatgatgccctatgtcagcacgcggaagctacacttactgaacataatgtgcagaaaagtaatggtcagcattcacacacatcatggtcctggtgctgaaaacggcaatgaggaaacaactgatttctggagcactcttttggtgaggagcgaaacagagctgcgagagaggctggttggcttcacctttgctgcagtcctgaaacggacagcgtatttgttcaatggtacctctactgaaaattgctggtttcctgttggggttgcccagatggattcttgggtaaccatgaattacgacggacaagtgcatgaccagctgcagtctatcagatcaaagatcaaagatttaggaagcaggatcgacggatactctgacgtagaaagctgcccctactgctcttcgccggtccatttcgagtcgcctgacgtagccatctgtggggaaaggcacacactgccgcggtgcagggcgtccatgatcctgtgctccgttgtgcagcctttgtggcactgcgtgtgctgcggaggcacggtcaacaagctgttgccggagtcgttcttcaccatgcaggcgtccaccatgcatgatgaaggatcgctcgatctgtcagcagcctccgtcccactttgccccttctgtggcatcctcctgcagaggtcgatgccggcgttcctgctctccacctcgccggcatagaggctctctgtggatgctagtaggcatccaccaggtgtagcatgcagtagcaatgtagtactagtaaagtttgttctagtcgatgctgcttacactcagttactcttaccaagtatggctggcagagtgtcggttactggtcattttttaggtcccttttgaatgaatacgatgagttcttttgtttggtttcttttggaccctgacggtggcagattaccaggccaagttcagctatctcgaattgtctcattcgattgttgcggacatgcagttctggcagttccaattggttgttgcggacatgcagtcctgtcagttgact

SEQ ID NO: 96503 - DNA, 325 bp, Zea Mays
aaccaaacaacaacaaaactaggacagaacggttccgttctacttggctcttcaaccaaacactaccttaaagttcatgttggcaggatgagtatatttgtgcaagtctttttttttatcagtgcatttattaagaaaacatgcagtagctgttaaaactatgaattgctaatgttttaataaaactatgaattcctacaacgttttttttggacagagggagcgctctagtggtcagcggccacacgcgctcatcggaacggaacggggtgcaaaaaaaaaatcagcctggcccagcagcagtcatcagatgtaataaacgcgc

SEQ ID NO: 96504 - DNA, 1170 bp, Zea Mays
cccacagctaaccctccgtgcccttctctggcgggccgtccccgcatatttatcgcaacaaccccggcctgccaagtgccacaaccgtagcctgtagcttcatccgttgcgctgctcccggttccatcgcgcggtgcggaatttaacatggccgtgccggaggtggtggtcgacggcgtcgtcttcccgccggtggcccgcccgccgggctccgccggctcgcacttcctcggcggcgcaggcgtgcgaggcctcgagatcggaggcaacttcatcaagttcacggccatcggcgtgtacctggaggacgcggccgtgcccgcgctggccaagaagtggggcggcaagacggccgacgagctcgcctccgacgccgccttcttccgcgacgtcgtcacgggcgacttcgagaagttcacgagggtgacgatgatcctcccgctgacgggcgagcagtacgcggagaaagtgacggagaactgcgtggcgttctggaaggccgccggcctgtacacggacgccgagggcgtcgccgtggagaagttcagggaggtgttcaagccagagactttcgcgccgggcgcctccatcctcttcacgcactcgcccgccggagtcctcaccgtcgccttctccaaggactcgtcggtgccagcggccggcggcgtggcgatcgagaacaagcgcctctgcgaggccgtgctggagtccatcatcggggagcgcggcgtgtcgccggccgcgaagctgagcctcgccgcgagggtgtcggagctcctcgccaaggagaccgccgcgcccgccgacgcgccgcaggcggagcccgtctccatcaccgcctgaggcgaggagcgggcgggcgagcgaacgaaccgcgaggagaaagaaagcaaccagacggttgggcggcacggcgtctcacacctgccgcctgcgcttgcgtgctccggaccggagagatgccgcgcgggtgcagtgcagccgtcgcgtcatgtctgtccgcgctctggcgtcgtgttcctgcctttctggtcgcgtagttgtcttgtgttcgctgttggtcgttctgggtaacatttgaataaaacaagcggatttgttgcacttgcacggttgcaccctctaattccccagcatgtgtggatcaattgactctcagccagagacttt

SEQ ID NO: 96505 - DNA, 1266 bp, Zea Mays
cccacagctaaccctccgtgcccttctctggcgggccgtccccgcatatttatcgcaacaaccccggcctgccaagtgccacaaccgtagcctgtagcttcatccgttgcgctgctcccggttccatcgcgcggtgcggaatttaacatggccgtgccggaggtggtggtcgacggcgtcgtcttcccgccggtggcccgcccgccgggctccgccggctcgcacttcctcggcggcgcaggcgtgcgaggcctcgagatcggaggcaacttcatcaagttcacggccatcggcgtgtacctggaggacgcggccgtgcccgcgctggccaagaagtggggcggcaagacggccgacgagctcgcctccgacgccgccttcttccgcgacgtcgtcacgggtgagtgagaggttctcgcgcgtgagtgatggtcaacagtcaacactgctgatggtgttgtgtcattgtgtgcccgtgcgtgtgtgtgcgcgtcaggcgacttcgagaagttcacgagggtgacgatgatcctcccgctgacgggcgagcagtacgcggagaaagtgacggagaactgcgtggcgttctggaaggccgccggcctgtacacggacgccgagggcgtcgccgtggagaagttcagggaggtgttcaagccagagactttcgcgccgggcgcctccatcctcttcacgcactcgcccgccggagtcctcaccgtcgccttctccaaggactcgtcggtgccagcggccggcggcgtggcgatcgagaacaagcgcctctgcgaggccgtgctggagtccatcatcggggagcgcggcgtgtcgccggccgcgaagctgagcctcgccgcgagggtgtcggagctcctcgccaaggagaccgccgcgcccgccgacgcgccgcaggcggagcccgtctccatcaccgcctgaggcgaggagcgggcgggcgagcgaacgaaccgcgaggagaaagaaagcaaccagacggttgggcggcacggcgtctcacacctgccgcctgcgcttgcgtgctccggaccggagagatgccgcgcgggtgcagtgcagccgtcgcgtcatgtctgtccgcgctctggcgtcgtgttcctgcctttctggtcgcgtagttgtcttgtgttcgctgttggtcgttctgggtaacatttgaataaaacaagcggatttgttgcacttgcacggttgcaccctctaattccccagcatgtgtggatcaattgactctcagccagagacttt

SEQ ID NO: 96506 - DNA, 2299 bp, Zea Mays
ggtcacgatccgtgcgtactgagaccgtgcagcagcgtcgagggaggttcgtcggtcgggttgacttgggcgcggatgggcgggaccggcgcgagcagccggcggaggtgggcgcggcggtccttccggacggcgggtggtggaggaggaaggggaaccggtggggttgtcaggcggaccgtcgcggcgtcgacgaccatggctccgcggggtacccaagggtttgctcatgtggacaagcaacagcgtcatgttcatggagtattatcagatttcagatgcaacagtggatcaacagatcatctttctttgtatgtcgaggaatttaagcataagagctcacacagatcatctgttagatgtcttcctagtgcacagggaaatgtaacagaaatcagtcgcatgcaacctgttgcaaggaaagttcaggtagatatgaccttcaatgataaaggattgtgtcgtgctagcagaactgtttcaggaatgcgaattcaacctaaatattatatcagcagtcccaacaacaatttgaagaattctcctactgtgaagagttatagtgggatgagtgatttcaattatcaactggtcagaagtgctaaaaggtcagctttgccaaagatgggtttaaccagcacaaactgttccctttctgagaaaatgtcttttctgcgtcgaccacggcatggtgataatcatcagaaccaaagccgtatcagtgctttgaatcgaagaaacaaaattgtgaatcctaggggagcagctcacctgctaagtaaagataaggttcatgaacaccttaattcctcattggaaagacattcacaggctttgttaagtaatgcattgattcgagaaaagcaactgtgctgttcagatatactcaatcaaaaagaacctgaacagctatggagctctgcttacagtgaatctgagaagatgttatgcttttcctccagtgacagcattgatgatctgcaagtatcgtcttcaagtgacactagtgatagcttcaacttatcatctctgggtgtaatagatggtgatgaatggaatacgaccttcaagagggtgtactaccctcatgctgcatgcctagactctatatctgtcatatacgctaaagaaataggtcaggttagcccaatatctgttcttcagcctctatctgaagattgctcagattctgaaaacatcagacacgagcctgcagatccatatgatctccaactcagacttgagcttggcacatctgcaccaagggagactgctgcagaggcaagtaattttcgcggaactagtgtctgtttaacctccgaagtgcagtcaagcgatgagaaacccatacaactggttgaagacatccttgaagaatttgaagatgatgaggaaagggacttctcttacttgctggatatactgattgcttctggaattcatggaactgccgaggatcaaatgtacaaggtgtgtcagtctctcgaccaccctgctggtgatgacgtatttgagaagctggaaaagaagtacaacaaagttgttcagtggtcaagatcagacaggaagcttctattcgacatggccaacacaatactatcacagatccttgccccgtgcttgaacatgcaaccttgggtctataccactaggaacttggccccactttggggcccagatggtcttctggagaaagtcttgcagatgctagttcagagacgggaacaccttgcacccagtgagactaagccagagaagaaaggatttgatccgaagtggccaggtttagcagactgcatcgacagggcaggaagggacattgagagaatggtaaaagatgacctgttggaagagctggtcgttgagctactgtccagttaggtttccacaattccacggccgtagtaggttttatcatagcagtacagattctttgttcttttgtttagtttttttagtcagttgtagttgttcctttggtccctgtccctgctatcactgctattttttttctcttcgttgttaaagcagtgggggagagttttttttttggtctagtcgccgtgcttccggtggtattatgacgtgaattccattggattagaggatctctgtagggaaaagttcttttctacctctccataaagagtaccttttgaagtgaggtttgtaagaatataaaaatttcctgtcgagctttgtcggctgtgagccctcaaatctgtatatgaggtaaaattataacttaattgtgttatgctttaaaggaaaaggaagatagtggcctatgctttggtct

SEQ ID NO: 96507 - DNA, 174 bp, Zea Mays
cctgttgtttgattctatttattaacttgcagcgagatgttcaacgaatggactctggaactgaaagccatggctgataggatcattaacatgaggcaacaactatttgacgtgttgaaatccagaggaacccctggagattggagccatatcattaagcaaattggggtttag

SEQ ID NO: 96508 - DNA, 83 bp, Zea Mays
ttccagccatagaaattgcatcatgcgacgctggaaattttgctatacattccccccccctcctttcaagttcactagaacat

SEQ ID NO: 96509 - DNA, 1188 bp, Zea Mays
atactctgagcctggctgccgaaagtgccttttggggttcttgtaatcttgttacattaggattcatttttgatgacttcatcaagaagcaagagcaagagcagaagtaggagccgcagtcgcagcaggagcaggagccgcagtcctcggcgaagagataggttgcgcagtgaacgtgcaccccaccgcagtcgtagccggagccgcagcccataccgtcgcagagaacgacgtggtcacagggattttgcatgcaagaactgccggagacctgggcacttcgctaaggagtgtccatctgcacctatgtgcaataactgtaaccttccaggccactttgcagcagaatgcaccttacaaactgtttgctggaactgcaaagagtctgggcacattgccagtgagtgcaagaacgaggccctatgccacgcctgcaacaagacaggtcacttggcacgtgactgccctacttcaggtgctaacgtcaagctatgcaacaaatgctttaaatcaggccacatcgccgttgactgcaccaacgaacgggcctgcaacaactgccgtcagccagggcacatagctcgggagtgcaagaacgacccggtctgcaacctgtgcaatgtctccggccacgtcgcgcgcgtctgcccaaagacgactctggcttcagtgatacagggcggcccgttccgagatatcctgtgccgcatctgcggtcagccggggcacatcagccgcaactgcatggcgaccatcatctgcgacacatgcggtgggagggggcacatgtcttatgagtgcccatcggcaagaatattcgggctccgcaggctctgaagatcttttcgccaagggctccgctttgttctgatggctgagtttcgccaggatgtttcatttgtttctgacagtattggaacagttttccttctgccgttgtagttgaggaatgattctgtaggatgtgttgcgggtgaaaactccttttttcccccttttaatcaggatagccctttgtgggctcaaacattgctgtaacggctcgtgtgaaaattgccaggtcatgatttaactcttgtgctcgtgctctgctgtgtcttttgaacgcttgttttgtgtacttatactgtattgtaacgtcacgtagaactgtgaaatttgtacggtgacgttggtgatttgatcttg

SEQ ID NO: 96510 - DNA, 580 bp, Zea Mays
atactctgagcctggctgccgaaagtgccttttggggttcttgtaatcttgttacattaggattcatttttgatgacttcatcaagaagcaagagcaagagcagaagtaggagccgcagtcgcagcaggagcaggagccgcagtcctcggcgaagagataggttgcgcagtgaacgtgcaccccaccgcagtcgtagccggagccgcagcccataccgtcgcagagaacgacgtggtcacagggattttgcatgcaagaactgccggagacctgggcacttcgctaaggagtgtccatctgcacctatgtgcaataactgtaaccttccaggccactttgcagcagaatgcaccttacaaactgtttgctggaactgcaaagagtctgggcacattgccagtgagtgcaagaacgaggccctatgccacgcctgcaacaagacaggtcacttggcacgtgactgccctacttcaggtgctaacgtcaagctatgcaacaaatgctttaaatcaggccacatcgccgttgactgcaccaacgaacgggcctgcaacaactgccgtcagccagggcacatag

SEQ ID NO: 96511 - DNA, 2042 bp, Zea Mays
gtctctgtctctgttcttctgccccgactccgcccacgcatctctttctcctcttcccccgcgcggcggccgcgggagtgttcgtgttcctcacttctcccgcttgcgtccccgacactccctcagatccgcggccgtttcccgatccgaggggcattccagccctaaatagcggccggtgagcaggtctccttccgccggcgcggaccacctggagggagtttatcctggagccgtcttcctcctcgcctccttttgcggcgcggcgcggaggccggagtcgcttggaggcccagctgtgtttgggttgatttcttcgtttgtcgcagggcctgtcttctgcctctgcttttgcttcgaagcaatggcgaatgcaagcaagcacttgcaaccttcaagtcaagcaggcaatgacaagaagtatcagggcacgctggttgcttcaccagcaaaggccatttcacctaagtgtgtgaaccgcattgtgccatcgaagcaactgatcttgggtgggggttcaataggccatgtggcatcatttctgatcaaggtcgttgctcttgaggcagtgagaagagtttctaaaacaagatgccctttcatatggaattctgttcaagcattgcagatccttgtgtatcctccatttagctggatccaaagatgggcaccgctcggatttctcgtgcagggaattcagaaactatccatgccactgttgtttctgtcagtcacaacaacagtaagtgagctgtcttccaagcatgatgatgaaccagataacaatacagaacattctgagacaccttccgaaacaaatgaattggcgtcaacttctggcacaagcgatgctgctgatggcacaaaggaaatcgtgcaagagaactggcttgtgttacttttcagggagcttgagaagcaaggcatcactttgcctgagaggtttactgaagatgagttacgcagattttatgttgctgcaaatggcgactttcaaagtttactctcttcggttaagaagacaattcattggagggaaacatttcacatacttacattgcaagaacttgatagatggtctcacttagtcttttggcatgggtttgacacgatgcttcggccttgtttagtagttcgtcttggacttgcatgctctagcatacctcctcatgatagaccccgtttcgggcaagcagtagtttctcaaattgaccatggcgttgtaaatttgatcaatgaagaagattcaaggattaccgttttactggattgccatgggatttcgccattcagatttccaatgcaaatgatgaggtcgttcatcactgtggttcaagaaaactacccgaatcgtcttggggtattgtttgtcatccgtcttcctccagttgtcagagttattgcacagacatttcttcaagtcttgaaaccagctacaaagcagaagttgcgttttgagggagattcgtacaagaaggcattggcggagttcctgcaggctgtgccagcgtttctgggcggtaaatgcagctgcccgcgatgtgagagtcctcgtgatgattcagtgatacaggcaggggaagggagcaagaagcagccccgcttggtcagcgttgatgacgggttacctgtcacagacttggacttcgacttggatgaagagatcccatcaccttatagctgcgagaacgccatcagggctgcgataatcggcctgctgatggtgtgcatcttcgtcgcgtttctggctgggatgatcgaccctgcatccgttccagccagtgcctgagagcttgtggaatagagcatgcacgtacatgtgttgctaattaggatgcagggtgctgtatttcttggcaggcttcttgtatgttgtcgtcagaccgccatagagcgctttctcccagtgtgagcgagcgcatgaataatatatatcctctgtgtcaaatgttggttagcagttcaattcgggcctactagatttcactattttcttttttatcttgatcgggcctactgaatttttgctcctctttctcatc

SEQ ID NO: 96512 - DNA, 1351 bp, Zea Mays
ttttcctctgagccgcgacctgtctctgtctctgtctctgtctctgttcttctgccccgactccgcccacgcatctctttctcctcttcccccgcgcggcggccgcgggagtgttcgtgttcctcacttctcccgcttgcgtccccgacactccctcagatccgcggccgtttcccgatccgaggggcattccagccctaaatagcggccggtgagcaggtctccttccgccggcgcggaccacctggagggagtttatcctggagccgtcttcctcctcgcctccttttgcggcgcggcgcggaggccggagtcgcttggaggcccagctgtgtttgggttgatttcttcgtttgtcgtggttagaggcacctggtttgttttttgctgaagctggtggtacatgtgaatagcagggcctgtcttctgcctctgcttttgcttcgaagcaatggcgaatgcaagcaagcacttgcaaccttcaagtcaagcaggcaatgacaagaagtatcagggcacgctggttgcttcaccagcaaaggccatttcacctaagtgtgtgaaccgcattgtgccatcgaagcaactgatcttgggtgggggttcaataggccatgtggcatcatttctgatcaaggtcgttgctcttgaggcagtgagaagagtttctaaaacaagatgccctttcatatggaattctgttcaagcattgcagatccttgtgtatcctccatttagctggatccaaagatgggcaccgctcggatttctcgtgcagggaattcagaaactatccatgccactgttgtttctgtcagtcacaacaacagtaagtgagctgtcttccaagcatgatgatgaaccagataacaatacagaacattctgagacaccttccgaaacaaatgaattggcgtcaacttctggcacaagcgatgctgctgatggcacaaaggaaatcgtgcaagagaactggcttgtgttacttttcagggagcttgagaagcaaggcatcactttgcctgagaggtttactgaagatgagttacgcagattttatgttgctgcaaatggcgactttcaaagtttactctcttcggttaagaagacaattcattggagggaaacatttcacatacttacattgcaagaacttgatagatggtctcacttagtcttttggcatgggtttgacacgatgcttcggccttgtttagtagttcgtcttggacttgcatgctctagcatacctcctcatgatagaccccgtttcgggcaagcagtaggtaatttctcaaactgttgtgtctaattttgtctatgttcgtgatgattattattctttatagaa

SEQ ID NO: 96513 - DNA, 1297 bp, Zea Mays
ttttcctctgagccgcgacctgtctctgtctctgtctctgtctctgttcttctgccccgactccgcccacgcatctctttctcctcttcccccgcgcggcggccgcgggagtgttcgtgttcctcacttctcccgcttgcgtccccgacactccctcagatccgcggccgtttcccgatccgaggggcattccagccctaaatagcggccggtgagcaggtctccttccgccggcgcggaccacctggagggagtttatcctggagccgtcttcctcctcgcctccttttgcggcgcggcgcggaggccggagtcgcttggaggcccagctgtgtttgggttgatttcttcgtttgtcgcagggcctgtcttctgcctctgcttttgcttcgaagcaatggcgaatgcaagcaagcacttgcaaccttcaagtcaagcaggcaatgacaagaagtatcagggcacgctggttgcttcaccagcaaaggccatttcacctaagtgtgtgaaccgcattgtgccatcgaagcaactgatcttgggtgggggttcaataggccatgtggcatcatttctgatcaaggtcgttgctcttgaggcagtgagaagagtttctaaaacaagatgccctttcatatggaattctgttcaagcattgcagatccttgtgtatcctccatttagctggatccaaagatgggcaccgctcggatttctcgtgcagggaattcagaaactatccatgccactgttgtttctgtcagtcacaacaacagtaagtgagctgtcttccaagcatgatgatgaaccagataacaatacagaacattctgagacaccttccgaaacaaatgaattggcgtcaacttctggcacaagcgatgctgctgatggcacaaaggaaatcgtgcaagagaactggcttgtgttacttttcagggagcttgagaagcaaggcatcactttgcctgagaggtttactgaagatgagttacgcagattttatgttgctgcaaatggcgactttcaaagtttactctcttcggttaagaagacaattcattggagggaaacatttcacatacttacattgcaagaacttgatagatggtctcacttagtcttttggcatgggtttgacacgatgcttcggccttgtttagtagttcgtcttggacttgcatgctctagcatacctcctcatgatagaccccgtttcgggcaagcagtaggtaatttctcaaactgttgtgtctaattttgtctatgttcgtgatgattattattctttatagaa

SEQ ID NO: 96514 - DNA, 2052 bp, Zea Mays
atgaccaccctcccactctctctctctgctagctacacccatccgcccatcaatctcacccatcgcatccttacaagctaaggaatgaagccccttctcctttgctcttctctctcccatatgtttcacatccattatatatgtattgtgaggcctccacgaacacccaagcaaacaaaaaaatagatacataaagggggaatgaacaaacccccattcccctttaattttattccacttgctttcgcgcgtcctcctcgtgatcccatcttttttcttcccttacctttagtttctcctcctcctctctccgggtggcagacccggccttctctcctccctcttcgtcttccagttcgaagctgtagcggcagctagagctagccacgtgtagagcggcacgactgcagcgtgcgaagaacaaacaaaagcagctagaaaagaagctctcactcactcacaagtagcaaaagatcaaagggaaatcaatcatataccatggtattttcttcggttcctgtctaccttgatccacccaattggaaccagcatcagcaccagccacagcatgagcaactgcaagctcaccatggccagcttccaagtgacgccggaggaggtggaggcggtggcgtcgacgtgcatgcgcaccatcatcagctaccgccgatgccaccttctgctcctggtggggctctcatggctcctcgccgtgacatggcggctgtggtcgccgcgagcggtggcagcacgagcggcggcggtgggccgactggcggtggttcccctatccgtccgggctccatgaccgagcgggctaggctcgccaagatcccgcagccagagccggggctcaagtgcccgcgttgcgagtccaccaacaccaagttttgctacttcaacaactactcgctctcccagccgcgccacttctgcaagacgtgtcgccggtactggacgcgcggcggcacgctccggaacgtccccgttggcggcgggtgccgccgcaacaagcgcaccaagtcgtccaagtccaactcgtcgtcagccgcctccgcttccagcgcgggtgggacgtcgtcgtccacctcgtccaccgcgaccggtggcagcggcagcgccgccagcatcatgccgcctcaccaggggcacgggggacagccgcagttcctagcctcgttgcaccaccctctcgtcggcggggaccactacagcaccggcgcgtcaagattagggttccccgggctgagctcgctggaccccatggactaccaccagttcggcgccggtgccggaggtgccatcgggctggagcagtggcgcctaccgcagatacaacagttcccattcctaagcagccgccccgacgccgtgcaaccgccaatgtctggcatttacccgttcgaagtggaaggccacggcggggaaggttccggcttcgctggtcacatgcttggtgaccccaaggtgtccggctcagccggactgatcacgcagctggcgtcagtgaagatggaggacaacccaacgtccgcagcgatggcaagcagctcaccgagggagttccttggtctccctaggaacctccaattatggggcgctagcggcaacggcggtgcaagtggcaacaatggaggaggcaccggcaacgctgccggtggcggcgacactattcctccgggtagcagctgggtagacctgtcaggattcaactcgtcttcgtccgggaacgtgctgtgacgtgacgcgccccctgaatctgatctgcatgataagctggtacagttgctgcagatgaatggtagctctatctatttatgcaagcactgaagtttcattttagtcattgcttatgagaaagttccacagaaaaggagttgtggtgcaagattatagaggggggggggggggggggtatatatatgatccatggcggaaatggtgaattggtgtctagaaacggtaggcaatagaaattagtttctgttatcattcagttcttaatgcgctggctgttcttgttttctacaacatctacgggtgtatttttct

SEQ ID NO: 96515 - DNA, 744 bp, Zea Mays
atgccccctcactgcgccgccacctcctcggtttccacgcgtccgctgcgccgccacctcctcctcctcgtctccctcacgaatccgacctccagctcaagcacgacatcgatcacaccggaaaagtacgccggcgactccgacctcgagctcgagtgcatcaaagtctactacaatgaggccagtggcgaccgcttcgtcccgcgcgccgtcctcatggacctcgagcctggcaccatggactccgtgcgctcgggccccttcggccagaacttccaccctgacaatttcgtcttcggccagtccggcgtcggcaacaactgggccaagggccactacaccgagggcaccgagctcatcgactccgtgcttgacgtcgtgcgcaaggaggccgagaactgcgattgcctccaagggttccaggtctgccactcgttgggaggaggaacaccgccaaagggtacgacagcatgggcgccgccgccgaagccgagcgatgacggtagcggggcaaagcagcgagagatgggaggcgacgacgacggtgctccatgcccaagcccagacccggtcatcgggagggtcctgcaagcgccaaagctgagggagttcacgctcgccgagctgcgggccgccacgcacgggttcaagccggagatggtgctcggggaggacggcttcgatcgggtctacaagggctgggtcgacgagtgcacgctcaacccgaccaagagtgtactgtaa

SEQ ID NO: 96516 - DNA, 1468 bp, Zea Mays
gcaaatgccaaatgtgcaacctggccggcccggccgtctgcccgtctgccttcggcgtgcagatctccccaactccaggaccagaaaacccacgcgaagaccagagcagcgggtggactcggcaccggccgtcgggaccgcgacgatggccgccgcctggcctctctccgccatcgccggcatcctgccggcctccctctcgctgaccctcctcctcgccaccctcgtatccatcctggtgctgggcgcagcggcgttcttcttcgagcacatccgcaagataggatgcatgcactcgctggagaggtccgccgtctcggacgccttcttcgaggaccccaactcgctcaagaaggtgccctgcccgtcggttttggatcctcctgagaaatatatttcgttgatagttcctgcctacaatgaggagtatcgactccccgaggctcttacagaaacactcaactacttgaagcggagatcaactgctgacaagtccttttcatatgaggtattgattgtcgatgatggtagcactgatgggacctctaaagtcgctttcagttttgtaaagaaacacaagattgataatgttagagttcttctacttggaagaaatcatgggaaaggtgaagcagtccgaaaaggaatgcttcattcacgtggtgaactattactcatgcttgatgctgatggtgcaactaaagtgaccgatttggaaaagcttgaagctcaggttcatgcattggctaagaaagctaagtctagcccagggacatctactagttcatctcagaatctatctgatgttgaagttgctgtttttggttcccgagctcatctagagaagcaggctcttgcgacaaggaaatggtatagaaactttcttatgaaaggtttccatttggtagttttgttgactgctggtcccgggatcaaagatacacagtgtgggtttaagatgttcacacgagcagctgcaaggaagcttttcacaaatatcagattgaagaggtggtgtttcgatgttgaacttgtatacctgtgcaagcgcctcaggatcccaatggtagaagtatccgttaattggaccgagatacctggatccaaagtgcgcatgacgagcatcatgcacatggtattcgagctcctgctgatcaaagtaggttatggactggggatatggaaaatcggctcgtagatccttgacattctatgctgactagtttctgcaactcagtttggaggaatactgtacaattttccgcaaaacctagttggtcgccagcaaatccatttggaggaatactgtacaattttccgagattttcaaatcgagagcatcaattcacatgtaccctagtgtttgatcatagagacgttgacagatgtaggccaaaattgttgtcccagctatatccttttactgatttgttatacaggaactcaaacgtgttgccaatattgttca

SEQ ID NO: 96517 - DNA, 240 bp, Zea Mays
gttcttattgattttggtctgagtttcacatggacaattcctgaggacaaagcggtggacctatatgtgctagagagagctttgatttccatgcattcgtcctgtggggatgtgatggagaaaatccttgcggcgtacagaaaggcttcaaagcaatggtgttccacccagaacaagctggctcaagtgaggcaacaggtctggaagcgcaccatggtcggatgaacgaagaagaagaaa

SEQ ID NO: 96518 - DNA, 1769 bp, Zea Mays
gcccctccccacacctccgctcccggcctgtgccgccgtcgccaccgctcgctcgcccgcctgcctgcctgcctgggcccgcagcaccgactctgacagcgcccgtcctgcttcctgtaccggcaggcgagggagaggactcagggagtgtgatggcggcaatgccggcgccgcttctgcctctgcttctgctggtggtggccgcggcgatgacgctctcccccgccgccgcccgcattcccggcgtgtacgtcggcggcggcggcggctggcagagcgcgcacgccacgttctacggcggcagcgacgcttcgggcaccatgggtacgtacgtccatccatggatacatacacatacatatacatacatacaaaagaaacgtcgtctggctgatgaaacgaaaggaaacctggcactgcaggcggcgcctgcgggtacggcaacctgtacagccaggggtacggcgtgaacaacgcggcgctgagcacggcgctgttcgacgaggggctccgctgcggcgcgtgcttcgagatcaggtgcgaggagcagcccgggtggcggtggtgccggccagggaggccctccatcctggtcacggccaccaacttctgcccgccaaactacgcgctcccctccgacgacggcggctggtgcaacccgccccgcccgcacttcgacctcgccatgcccatgttcctccacatcgccgagtaccgcgccggcatcgtccccgtctcctaccgccgggtgccgtgccgcaagtccggcggggtgcggttcaccatcaacggcttccggtacttcaacctggtgctgatcacgaacgtggccggcgcgggggacgtggtgcgcgcgagcgtcaaggcggccagcaccgggtggctgcccatgtccaggaactggggccagaactggcagtccaacgccatcctcgtcggccaggcgctctccttccgcgtcaccgccagcgaccgccgcacctccacctcctggaacgccgccccgagcacctggcagttcggccagaccttcgagggcaagaacttcagggtctgatgcatgggatgggatgcgatgggatgggacttgggagaagaagccaaaactcttttctttctttctttctttcttcttatacgtaattattactactcactcctgctaccgtactactgctactggagtactaagcgcgtgttactgtgttagagggtggtgggtgttgtcaatgcctgttttaaggtcacgccttccgcccgccttaatcccaggtccaggtcctctctgaaaaaatggagtcttttcttctgaacaagatgtgtggatgggattctctagagtttgtcagggtatattgccgtctcttcggtccctagcacttctctatgcatcaagtttgtgcctttggcttgggggtgactggtgggtttctgtgtgagctgctcaagtggctgccgagctgcggctccaatttggtggcagcgcggtgagcgtagcccgcagctgctcgtcatcttctttcgtcccgtcccgtgtctctctgtctgtctccatgacaggaacacacatttgttatctatctcgttctacatcatggttcattgccagtaagaaagttagttgatgtgctcgcgtttctgccccgttccctttttgcgtgaatgctgctggcaagaaagggctccttcctccgtttgtgtgccgagatcgaagtccgtgaaagggataaagcacaaagcgaaagcgcgccgcgggaaccggggggcca

SEQ ID NO: 96519 - DNA, 915 bp, Zea Mays
gcattctcgtccgcttttcctccccggcccgcgcgccagtatcggctgctctgcctcgtgcctccataaatacgaccccgccctccgccgttcccactcgcccctccccacacctccgctcccggcctgtgccgccgtcgccaccgctcgctcgcccgcctgcctgcctgcctgggcccgcagcaccgactctgacagcgcccgtcctgcttcctgtaccggcaggcgagggagaggactcagggagtgtgatggcggcaatgccggcgccgcttctgcctctgcttctgctggtggtggccgcggcgatgacgctctcccccgccgccgcccgcattcccggcgtgtacgtcggcggcggcggcggctggcagagcgcgcacgccacgttctacggcggcagcgacgcttcgggcaccatgggcggcgcctgcgggtacggcaacctgtacagccaggggtacggcgtgaacaacgcggcgctgagcacggcgctgttcgacgaggggctccgctgcggcgcgtgcttcgagatcaggtgcgaggagcagcccgggtggcggtggtgccggccagggaggccctccatcctggtcacggccaccaacttctgcccgccaaactacgcgctcccctccgacgacggcggctggtgcaacccgccccgcccgcacttcgacctcgccatgcccatgttcctccacatcgccgagtaccgcgccggcatcgtccccgtctcctaccgccggtaagacagacagcacagattcctcgacgcccgctgtggtagtggccttacctgcacgggcatgcccattcattccgcgtcgcttcggttctcgatcacggcgcgggcgggcgggcagttactacaccaaggcctcctttggaatggaggattagtaaaacataggg

SEQ ID NO: 96520 - DNA, 784 bp, Zea Mays
tgcgagctgacaggagagctgtggctgtggccgtggaatccatacgaagggaagaactgaagctgtggctgctggagggagaagctaatcatgtgaggtgcgggtggatttggggtgggcaatcgagcaccgaggttgggatcgtcacgaggacgagggtccattatcattccttggaggtggagcttgtatccacaagatttctctgactttcgatcttcagcgccacaagtcacttattacaggttacaaatctcacctctgcgctacctttctgagtctctctctctctctctctctctctctctctctctctctctctctctcaagaacacaaggattccgcttagagagaactacaaattggaagaaaagttgatgatcggaacgccgaaggacttcgccgacaagcatatatatctgaagaaaaaggaggcgatatttaccctgcacgccgaaggacttgtctgcatcaagatctctgatctccggctctaccctgcctgcgcaaagaccgcgaagacggcagcaagtaactttccttcccaccctagtcgcggctccaagaagacgccgtgccttccatcccaagtctcggatgctgatgtgtggaaccttgcggaaaccaggaagcaaagcggcgccgattggggggcagcggcagcaagaggccaagaccaaaagacttctctcgagctgggccaggaccgcggcagcagctccctcttcgtcaactgggtgatttgtttagcctaaactgcagcagcaccagcgaatcagcgac

SEQ ID NO: 96521 - DNA, 87 bp, Zea Mays
gatacgccgaagttatatttaatgcagtcaaattgaacatcaacatctttgctcacgaaagagggtcagaattcatcgacgtaacat

SEQ ID NO: 96522 - DNA, 1467 bp, Zea Mays
gcgcctcttcttggcttttttgcggcctgtcggatcggcacgaccttctagatgattctcaaacccacttccgggctgccgccgaggttatctacaacaccgagcagcgagaaggggttggtgtccagcacgaattgaatcgtcgccagaagtcatggcggattcggccacttcccgtccaaccgttctcgtcaccggcgccggcggccgcacaggccaaattgtctacaacaaactgaaagagaggtctgagcagttcgtggcaagagggctagtcaggacagaggagagcaagcagaagattggggcagccggtgatgtttacgttgctgacataagagacgcggatcgtctagcacctgctgtacaaggtgtggatgcgctcataatcctcaccagtgctgccccgaaaatgaaaccgggtttcgaccctagcaaaggtggacggcccgagttctactacgaagacggaatgtaccctgaacaggtggattgggttggccaaaagaatcagatcgatgctgctaaagctgctggagtgaagcatattgtgctggtgggatctatgggaggaacaaatcctaaccatccgctgaacagcatgggtaatggcaatatactggtatggaagcgcaaagcagaacagtatttggcagacagtggaatcccttatacaatcataaggccaggaggtctacaagacaaggacggaggagtgagagagctacttgtggggaaagacgatgaacttctccagactgacacaaagtcgattcctagagccgatgtggctgaggtttgtgtccaggctctgcagtacgaagaggccaagttcaaggcatttgatttggcctcaaagcctgaaggtgtgggcacgccaacaaaggactttagggcactgttctcccagatcactgctcggttttgagcgagctgctgagaagcctactcgagttctagattttatggtgtcacaatccattttatcgtgggcttgtcctggagatacaaccaggtagcttgttggagctgcggtttggtgcaattgcaaccaggtagcttgtatcaatccattttatggtgcattgtttgcttgtacactgctgaatgtcgtctggttgccaattgtgtgaactgttgacagccattaaaacaagttatttggaaccctgtttgcataaattgttgggaacaatttatccaggcacagttactcacctctgcaacgtcctccaaagttccgatgcatattatgctagtaattcctctacaaattagtgctgaaagctgcagccatcctgatggttctatgaacaaaacaggtatgggcatttccttagtcaattgcgctgggttgatctcatccggactttcagatgatcgagccagatttctcgtgtcttgatcagagaagcaacaactgcattagttatggttttccttcacaccgtgctataaaaataaaaa

SEQ ID NO: 96523 - DNA, 536 bp, Zea Mays
gcgcctcttcttggcttttttgcggcctgtcggatcggcacgaccttctagatgattctcaaacccacttccgggctgccgccgaggttatctacaacaccgagcagcgagaaggggttggtgtccagcacgaattgaatcgtcgccagaagtcatggcggattcggccacttcccgtccaaccgttctcgtcaccggcgccggcggccgcacaggccaaattgtctacaacaaactgaaagagaggtctgagcagttcgtggcaagagggctagtcaggacagaggagagcaagcagaagattggggcagccggtgatgtttacgttgctgacataagagacgcggatcgtctagcacctgctgtacaaggtgtggatgcgctcataatcctcaccagtgctgccccgaaaatgaaaccgggtttcgaccctagcaaaggtggacggcccgagttctactacgaagacggaatgtaccctgaacaggtgggttgatgagtcttgtccaagcttgtatgccaattagtcgaatttg

SEQ ID NO: 96524 - DNA, 1662 bp, Zea Mays
caaacacgcccttggagaccttcccctgccgcggcgaggacaccgcttgctttcacggccgacgacctaatccccttccctcccattggcagccgtcgccatgctgcgcgtccgaaatcggctcctccctctgctcggcgccgcctccccgcttccctcccccatccacatccacctccgcgtgtgccgcctcctctccacctccacctctacggccaccgtccccgcacccttctcccttgagaactacctcgtcgccgcctgcggcttcgcacccgcccaagctcgcttggtgtccaagaaggcgttcaacgagttgtccagggaatccaagagatcatcggaggagcactcctgcagacgcctcatctccgcctccaacccagatgccatcctcgcgctgctctccggcgccggcctctcccgcgccgacatcgccgccgtcgtctttgcggacccgctgatcctccgcgcttccgtgagtaaaatcgcaccccgccttgtcgctctccgcgaccgcgtcggcctgtctactccccagatcgctcgcttcctcctggtcggctcacgcgctctccgccggtgcgacgtcgttcccaaggttgagttcttcttgtccttcttgggctcctttgatcgggtactggcggtcgcaaaggcaaacttgggcatcttcaacgcgaaccttgagaaggtaataaagcccaacatagacttgtttcgtcaacgcggcgttcgaaacgtccctaagatctgtctccaccgcccacggacgctttcctttaacctcgaacgcgtgaaggaatttttgctgcgggcagaagaacttggggtgcctgccgcgtcgcccttgttcatgcaagcagtgggagtcgtcaccagttttccccctgagaaggttgctgccaaacttgacttctttaagaggactcttggttgttctgagtctgaggtttcgaatgcagtgtccaagatgccacaaatactagcattgtctgaggcgactcttcttcgcaagatcgagttcctggtcaatgagggggcgatagagccacagtatattatgcaaaggcctatcctgctcgcattcagcttggagaagcggctagtgccccggtatcgtgtcatcaaagtgctgcagggaaagggattgctgaatagcaacatgagcctttcctcattagcttctcttgcagaagaaaccttcaagtccaagttcgtcgactgccacaaggactgtgttcctggccttgcagatgcttatgctgcagcttgtgctagtattgtgccctcgacagtgtaagttaagccgtttcaaaaacaaaaacagtgtaagttaagcttctcattttgtgttttaggtggatgctcattggctgctgtccactctgcaattttgatttctgaagtatataaccactcatgatcactgattggtcatatccaaggtttaagttatggacttgtggttattgatgaaaggagctgtgtttggcttgttctggatgcttaatgcacgttttgttggtttcatcttctgcctagcacatggcctaagattatccttaacttcgttgtcttccgtggatcagtctttgatgtagagcagtatctgtaagggaatgagatgctgacagaatctaagtcttaaaactttttatt

SEQ ID NO: 96525 - DNA, 2454 bp, Zea Mays
ctgacctgagataagcaaacgcacacctgcggtgcgggctgcggctccgctcatcgctgccagccagtccaggtcactgcctccctcgttccacaccatgccagcggccgctctcgccgtgcgggtggccgccgtcctgctcctcctcgcccgaggcggatccggatcggcgcccggggagttcgtgctcagtggcttcgcgagcggcaacgtcacgaccagcggcgcggccgtcgtcacctcctccggcctcctgcagctcaccaacgcgaccaacgaggtgttcgggcacggcttctaccccgtgccgctccgcttcaaggacgcctcctccacgccgcgctccttctccaccaccttcgtgttcgccatggtgccgcggcacgacgacgcgcacggccacgggatcgccttcgcgctggcgccgtcgccgaccgtgcccggcgcggtggccgggaagaacctcggcctgttcaacacgtccgacgacacggggaaggccaggagcggggtcgtcgccgtcgagctcgacacggccaaggacgaggagtttagcgacatcaacgacaaccacgtcggcatcgacgtcaacagcctggtgtccgtgagctcagcgccggcggcgtacgtcgacgccggcagcctagtcaacatcagcctggtcagcggggagcccctgcaggcgtgggtcgagtacgacggcgcgagcatgcgcctggaggtgacggtggcgccggcgcgcaagcccaggccggctgtcccgctcgtgtcttccatcgtcaacctctcgtcggccgtggccgacgacacgtacgtcgggttcacggcggcgaacggcgcggcctccacctctcactacgttcttggctggagtttccgcctaggcgacggacgcgcgacggacctcgacgcctcgaagctgccgccggtcccatcgtccaagaagaagacgtcgcggctaaacttggtcacgctgtccctcgttgtcgtcgtggcactcctcttagcgtcggtggcagtcgcagctctcgtggtcaggcaccggcggttcgccgaggagcaagaggactgggagatacagtacgggcctcaccggatcagctacaaggacctgcacgcggccacgagggggttccgcgacgccatcggccaaggcggcttcggccgcgtgtaccacggcgtgctacagcggccggtgaacgccgaggttgccgtcaagaaggtgtcccacgactcccggcaagggctgcgcgagttcgtgtccgagatcgcgagcatgagccggctgcgccaccgcaacctggtgcagctcctcgggtactgccggcggcggggcgagctggtactcgtctacgactacatggtcaacggcagcctcgacaggcacctgttcgacgccggcaagccggcgctgagctgggagcagcgcggcaagatcgtccgcgacgtcgccgccgggctgctgtacctgcacgagggatgggagcaggtggtggtgcaccgcgacatcaagtccgccaacgtgctcctcgacgccgacatgaacggcaagctcagcgacttcggcctcgcgcggctgtacgaccacggcagcaacccgcagacgacgcacgtcatcgggacgctggggtacctcgcgccggagatgagcaagacggggaaggccaccacaagcaccgacgtgttcgcgttcggcgccttcctgctcgaggtggcgtgcgggcggcggcccatggagcgcgacgacgaccttgattcgcccgggctcgtcgacctcgtcctcgagtgctggaaggccgggaggatcgtggaagccagggacaaaaggatcggcaagtgcgacgaggccgacgtcgagctggtgctcaaactcggcctgctctgttcgcaccctgacccccggtgccggccgagcatgaggcaggcggtgcagatgctggaaggcgcagcgccggtgccagagacaccgcccaaagatctagccagcaacagcaggttgttctacggatacagcgagtctttcgacgagttcgccaccatgttcccggcgacgtcggaggtcaccagcgtcaccacgcagccgtcttcctcacactccaccggcgaggggcagcaggtctcctccgaacaaatcaccaacgtatagtcatgtgttttacgatggttgggttaggaagcaaacagtgatcataggtttaggtgttgtgtgatattttcttcaagtgaatataggatatggtcagccattttgtagggatgaccacaaaaacaaagttagataaagctccaacagattgaactattcctcgcttgtttcatcatggagagagcaagaaggtgaaattcttcattcaggtaaggagtcatatacgaatctcaaaagaaataataatatggcatcgaaatttctgtaaagaatcggaatccatgcagtcaccttcgcttaaaaggacc

SEQ ID NO: 96526 - DNA, 2465 bp, Zea Mays
gctacgaatccactcccggcccggtccagcgctcccctccctccgaagccgttcccgtcgccgtccaggatccaggcgtccactcccacgtccctctctctctcccccggcccccggccgcaatcggcggggaccacgcttcccctacggccctacctacccgggccgcgcgcacgagaaacccaggcgctacgccgctacctcaccgatgtagccgtgtagacctcgatcgatcgatgacttattgcagccggtccgtcccgaaagctataggtcgagcgcagccccggctgctgacctgctgtactgtgccgcgctgcgagatcaccgtcctgctccagttccaccatggcggcggctgttactgttgccgtgcgcgtgatggtgcccgtcctgctgctcgctccagcgccggccgcagccgccgtcgagttcacgttcaccggcttcgcgcgcgagaacgtgacgaccagcggcgcggccgccacctcctccggcggcctcctgcagctcaccaacgcgaccaactgggtgttgggccacggcttctacccggcaccgctgcgcttcaaggacgccgcctcgggcgcgccgctctccttctccaccaccttcgtcgccgccatcctgccgcggtacctggacgcgcacggccacgggctcgccttcgcgctcgcgccgtccgcggccggcccggggctggccgtcgcggggaagtacctcggcctgttcaacacgtcggacaacgcgggcaacgggaccacgagcgaggtcgtcgccgtcgagctcgacacggcgctggacgtggagttcgacgacatcaacaacaaccacgtcggcgtcgacgtccacaccctcaggtctgttgcgtccaagcccgcggggtacgtcgacgctgccaccggcgggtccgtcgacgtcgccctggccagcgggaggctcctgcaggtgtggatcgagtacgacggcgcgaccacgcggctcgaagtgaccgtgtcgccggccggtgtcggcgtgcccaggccgcgcgtcccgctcgtgtcttgcgaggtcgacctctcgtcggcggtggccgaccagacgtacgtcgggttctcggccgcgaacggcgccgcctcgagctcgcactacgtcctaggctggagcttccgactcggcggcggccgcgcgccggacctcgacctgtccaagctgccgcggcccccgccgccgtctggggggcacaagaaggcgacggagctgccgctgctcctaacgctcatcatcctcgtcgtcgtggtgctcctcgtggtgtcagctgccgtcacagtactcgtggtctggcgccgtcggaggttcaccgaggagcaggaggactgggaggtcgagtacggccctcaccgggtcagctacaaggacctgtacgccgcgaccaggggtttccgcgacgtcatcggtgtcggcggcttcggcgtagtgtaccgcggcgtgcacccgcggccgggcggcgtcgaggtggccgtcaagaaggtgtcccacgactcgcggcagggcctgcgggagttcgtctcggagatcgccagcatgagccggctgcgccaccgcaacctggtccagctcctaggctactgccggcggcggggcgagctgttgctcgtctatgactacatggtcaacggcagcctcgacaggcacctgttcggcgccggcaacgagccgactctgagctgggagcagcgcgccaagatcgtccgggacgtcgccgccgggctgctgtacctgcatgaggggtgggagcaggtggtggtgcaccgcgacatcaaggccagcaacgtcctcctcgacgccgacatgaacggcaggctcagcgacttcggtctcgcgcggctctacgaccacggcagcgagtcgcggacgacgcgcgtcatcgggacgctggggtacctcgcgccggagatgatcaagacgggcaaggccacgcccagcgccgacgtgttcgccttcggcgccttcctgctcgaggtggcctgcggccggaggcccatggagtcactcggcaacaatggcgaccccgcggggcttgtcgacagcgtccttgagcgctggaagaccgggaggatcaaagacgccagggaccctaggatcggcatgtgcgacgaggacgatctcgagctggtcctcaagctcggtttgctgtgctcgcacccggaccctcgctgccgcccaagcatgaggcaggtggtgcagatactggaaggcgctgcgtcgttgccgtcgacgccgccggaagatctaggcggcgctggcggcaggatatttggacactacgagacgttcgatgaattcgtcaacgtgttcccgacgacgttcgatatcaccaccgtcacgacgccgtcaccttgttcgccttccagcgccgaccgccagcagctaatctccgcctgagctctgccgtcacatcgtcagctccctgcccagcccagagc

SEQ ID NO: 96527 - DNA, 267 bp, Zea Mays
ggctctcttcttgcataccgcgttgcagattttctaggaaggagaaaagaattgatcaccgctgctgcattatatatttttggtgccttagtctctggagttgcccctgattatttttctctactcagaggtcgttccctgtatgggattggtattggtttgaaccattatggtgcccctctttatattgcggagacttctccttcacaaatacgtggaacattgatatctttgaaggagctgttttttgtgttaggaatgctggtg

SEQ ID NO: 96528 - DNA, 119 bp, Zea Mays
aaagacgcggcaagagaattgccacgtccaaactttattaagagaaaaaagagaacacacttacagacacttaattagccaaacagctttcgaaaaatccacccaagtgctctagaaag

SEQ ID NO: 96529 - DNA, 1726 bp, Zea Mays
agccgcgtacagcagcaagcaaagcaagcaagagatagacaagcagctccagtccaaccaagaacaaacaacaaccgcagcaagaggagaggaggctcaccggtcgcgaccaaattctcccagagacggtcggaaatgaggagccaagcgctgttcttcctcacgatcgcccttctcaccgtgctcgcgcgatccagcaacaggcaccaccaccaccactcccacgttcaaagcagagggcagggagcagcatcaggaggaggaggaggaggggagctggcgagccgggggaaggcggcggcgcgcgcgtggccgtgctgcgacagctgcggcggctgcaccaggtcggagccacggctgtgccggtgcctggacgcggcgccccgcgggtgccacccggcctgcagggactgcgtcaagtccagcctcagcgccgacccgccggtgtaccagtgcatggaccgcgtccccgacttctgcctgcgccgctgcaccgcgcccgccgccgccgcgcggtgaccaggcgactggtttctgcttgctcttgagtcttgacccacccacccaccaccaaccgctccagcctttcgcccaccccaccgccggcgaatcgtgtcgtctgaactctgagccagctgtggattaggtttttttttgttgttgttgcgtggaaagagaggctgtgagagacgagggatgtgtaatctgatgagcgaacaaccgaccaaaccaaccttggacgctgtcctgtccgtctgtggtgtggtgtggtgtgttgtgttgtcctttttcttgttcttctgttttcttttgtttttaatccgacttcacactgctctgcgctgtatggttgactcttctcgtctgtgaggagacgagcacggtgaatcgccgagactggggaaaagacgcttgcttttcttgcttgccgttcacagcatgagctttgagctttcgacagggaacacgccgcggcttatgctcatcatgttgttgtctggatattttgggaggggagcagagacggtcgtgcctattcatggctgaagatgatgcacctggacgctaatccggcggcaggacgaggacgaggctggctgagaggcaggttcatctaccgcgggacacgaaggttgctttgctctcactgacccgaggcggccgacaagcttgacaagcacaggcaaagcggtcaggaagtggagtggatgtggaggctccagcagcgaccctacacgcggcgcagatgcgcatttcccacgcggatatgcggcaattgtgcgccgtatctcaagttgcagaggcacgcagggaagaaggaatatcccatcccaattcccaacaagaaactcaacctctgaaccgcttgcatatctctctaacgtgaaggtttctgaacatgtatttcgtcgatacaggtactccatccgattaaggccctgtttgggaataaagtttttgaaaaccacagtttttaaaatactacagtatactttagtcatgacaataccgtagttgacaataccgtagtttacaataccacaattttggaaactgaggtccagacctaagtttagaataccttaaaacaactatagtatttgcaatacttcagttttgaaaacagagattttagccaccttgccaaacaacattctgtatataatactgcagtatttgagaatactgcggtattcttccaaaactgtgaaaaaacttcactccc

SEQ ID NO: 96530 - DNA, 2116 bp, Zea Mays
atataaagacctgaccgcagccagctcttctcagcctcgcccgccgtctctcgcacgtagtgtttgtgaagttggttgctggggggatagatggagaagaagaggttggagttcgaggttgccgatgacgaccacgaggcgtgggtgcacgactcctccgtggatcaccgcgggaggactccctgccgcgccaccaccgggtcgtggaaggccgcagtgttcatcatcttgatcgagttcagcgagaggctgagctacttcggcatagccacgagcctgatgatctacctcaccaaggtgctgcaagaggagatgaaggtggcggccaagaatgccaactactgggtgagcgtcaccacgctcatgcccttgctcggcggcttcctcgccgacggctacctcggcaggttctccaccgtcgtcgtctccaccgccgtctacctgctgggtctgacggtgctggcgacggcgcagctggcgccgcggctggggcccgcccgctcgccgcgcctgcacgaggcgctcttcttcgccggcatctacctggtgtccatcggcacgggcggccacaagccggcgctggagagcttcggcgcggaccagttcgacgaggcccacccggcggagcgcgtgcagaagatgtccttcttcaactggtggaactgcgcgctctgctcgggcgtcctgctcggcgtcaccgccatagtctacgcgcaggaccgcgtcggctggggcgccgccaccgtcgcgatcgccgccgtcatggccgcctcgctcgccgtcttcctcgctgggcgccggtcctatcgctacagggtgcccgggggcagcagcccgctcacgccgctgctccaggtcctcgtcgccgccttctggaagaggcggctcccgctgccggccgacgccgccgagctgtacgaggtcaggccgcggacgcagagtagcaaaaagaggctgctttgccacacctaccagctgaggttcctcgacagggcggccatagtggagcccggcgccgacgagggcgcctgcgggccgtggcggctggcgacggtgacgcaggtggaggagacgaagctggtggtggcgatggtgcccatctgggtgtgcacgctgccctttggcatggaggtggcgcaggtgtccaccttcttcatcaagcaggccagcgtgatggaccggcgcctgggccctcacttcgacctcccgccggcatccgtcttcgcgcttgccgcggtcgccatgatcgccacggtggcggcctacgacaaggtgctggtgccgtacctgcggcgcgccacgggaggggagcgcgggatcagcatccttcggcgcgtgggcatcggcatggcgttggcggtcgtcgggatgggcgtcgcggcggcggtggagcggcggcgcctgctggcggcgtcggccgccgcggggtcggggtcggggtcgtcgccgtcggtgctgtggctggtgccgcagttcgcgctgatgggcgtggcggacgggttcgcggtggtgggcctgcaggagtacttctacgagcaggtccccgacggcatgcgcagcctgggcatcggcctctacctcagcgtcatcggcgcgggaagcttcctcagcagcctggtgatcacggcggcggaccgcgccagctcccgcggcgggcgcgccggatggttcgccaaggacctcgaccgcagcaggctggacctcttctactggctgctgacgtgcatcggtgcagtcaacctggcattctacgcgctcgtcgccaccaagtgctcgtacaacaagcagaccgtcagggtcggcgacgacaaattcgccgccgccggtgacgacgacgtcgagtgcgccgccgcgtaggtacggactacggtgtggtcatggaaccaaccatgcacgcatgccattagcagctgcaggatcgtcctgttgttattagcggctagtaattacgtaagaagtgtacgtacgtacgataatacggctagcttgtagtagtcgcgtcgatcgatcgtgttgttgctctcacacaaggattgctgtatgtactggctgtggctggcgcattgtcgaatgtacttgtacaattgctgtttggttcgttctagttcatcacatg

SEQ ID NO: 96531 - DNA, 1758 bp, Zea Mays
ccttcccctcaccgtgctgcgctgtttacgcccgcgtccccttccgtttccgttccattcgcctatcgtaccccctctccgtctctcgtcatcgtcggcccgtcgcagccacctccatcggcctccgatccctccacgagcctccggtcgaatccgaggagcaggatccgcggcggcgggcggcggtcgcccggcgatggcgcaccgtatggacaacgagtacgactacctcttcaagatcgtgctcatcggcgactccggcgtcggcaagtccaacatcctctcccgattcacccgcaacgagttctgcctcgagtccaagtccaccatcggcgtcgagttcgccacccgcaccctgcagtgtaaactgggccttatgtgatgccgatcgagtgatcagcgtgctgctctcagctggcgtgcccatgagcttatcccacacgctaaagctggagccgggctactatggcaaagccatctttcccgtgaaggtgcgggcgtcagcggagaaggtggccggctcatctgcatggtccggaggccaagcatcggatggccgaggagtgcctaagtcgagctgaaggctgtaccggaggccacaacccgttcttgatgatcttcaactatctgtgcatgtcttgaactggagcaagctcggggtttcacagatgcagacttatgggtacgacaaactgatgttcgccggtcagctggtgaagtgcaaccttattgcatcgttcattgtcatgagggagggtgcttggctgctcgcgccgctcgtcggcagcatcaccaagcagcacaacaacttcgcctgcaggatgtgcgagcacggagcacctcgtatgatacatgtgcacgcgagcatgaagatgaaggaaccctgctgctacatctaggttgaagggaaaaccatcaaagcccaaatatgggatactgctgggcaagagaggtaccgtgcaatcacaagtgcgtactacagaggagctgtgggtgcacttctagtctacgacatcacgaagaagcagacattcgaaaacatacagaggtggcttcgtgagctccgcgaccacgccgactccaacattgtgatcatgatggttggtaacaagtccgacctgaaccacctgaggtcggttgcagaggaagacgggcaggcattggcagagaaggaaggcctatccttcctcgagacatccgccctcgaagcgctcaatgtcgagaaggcgttccagaccgtcctctctgatattcaccaaatcataagcaagaaggcacttgcagcccaagaggcagcaggcagtgggcctccaggtcaaggaaccaccatcaacatcgcagacccatctgccaacacgaagagagggtgctgctcttcataagtaggtgcaaacaaagacatgctgctgcttctgcgaaaagaaaaccccccggtggatcatacaacacttttgttatgtagttgaccccttttggcctgtaactctggtgggttgtaatcacaattcatactcctgcaaagaaattctcctctcgggtagatacgatgtgtagtttcgagattttggtagaggccaatgtttggctggcagacttcgggtggagtccagcctcgtgttttctttcaatgttcttctacctcggtagtcttctgctggaaaaaaaaacatgatcagatacgttcttgtatttctacctgagtttgttgtattgtctccggtatattatatatacactaaaaactttgattcctgtgct

SEQ ID NO: 96532 - DNA, 1220 bp, Zea Mays
ccttcccctcaccgtgctgcgctgtttacgcccgcgtccccttccgtttccgttccattcgcctatcgtaccccctctccgtctctcgtcatcgtcggcccgtcgcagccacctccatcggcctccgatccctccacgagcctccggtcgaatccgaggagcaggatccgcggcggcgggcggcggtcgcccggcgatggcgcaccgtatggacaacgagtacgactacctcttcaagatcgtgctcatcggcgactccggcgtcggcaagtccaacatcctctcccgattcacccgcaacgagttctgcctcgagtccaagtccaccatcggcgtcgagttcgccacccgcaccctgcaggttgaagggaaaaccatcaaagcccaaatatgggatactgctgggcaagagaggtaccgtgcaatcacaagtgcgtactacagaggagctgtgggtgcacttctagtctacgacatcacgaagaagcagacattcgaaaacatacagaggtggcttcgtgagctccgcgaccacgccgactccaacattgtgatcatgatggttggtaacaagtccgacctgaaccacctgaggtcggttgcagaggaagacgggcaggcattggcagagaaggaaggcctatccttcctcgagacatccgccctcgaagcgctcaatgtcgagaaggcgttccagaccgtcctctctgatattcaccaaatcataagcaagaaggcacttgcagcccaagaggcagcaggcagtgggcctccaggtcaaggaaccaccatcaacatcgcagacccatctgccaacacgaagagagggtgctgctcttcataagtaggtgcaaacaaagacatgctgctgcttctgcgaaaagaaaaccccccggtggatcatacaacacttttgttatgtagttgaccccttttggcctgtaactctggtgggttgtaatcacaattcatactcctgcaaagaaattctcctctcgggtagatacgatgtgtagtttcgagattttggtagaggccaatgtttggctggcagacttcgggtggagtccagcctcgtgttttctttcaatgttcttctacctcggtagtcttctgctggaaaaaaaaacatgatcagatacgttcttgtatttctacctgagtttgttgtattgtctccggtatattatatatacactaaaaactttgattcctgtgct

SEQ ID NO: 96533 - DNA, 1343 bp, Zea Mays
ccttcccctcaccgtgctgcgctgtttacgcccgcgtccccttccgtttccgttccattcgcctatcgtaccccctctccgtctctcgtcatcgtcggcccgtcgcagccacctccatcggcctccgatccctccacgagcctccggtcgaatccgaggtacgcaacgcgcgaatcgccgcagcccctccccccattccgcgacccgaccgatccgcgctgcggcgcgtcatcgccacggcttcttactgtgtggatctcggtggcgtgtgactgctgcaggagcaggatccgcggcggcgggcggcggtcgcccggcgatggcgcaccgtatggacaacgagtacgactacctcttcaagatcgtgctcatcggcgactccggcgtcggcaagtccaacatcctctcccgattcacccgcaacgagttctgcctcgagtccaagtccaccatcggcgtcgagttcgccacccgcaccctgcaggttgaagggaaaaccatcaaagcccaaatatgggatactgctgggcaagagaggtaccgtgcaatcacaagtgcgtactacagaggagctgtgggtgcacttctagtctacgacatcacgaagaagcagacattcgaaaacatacagaggtggcttcgtgagctccgcgaccacgccgactccaacattgtgatcatgatggttggtaacaagtccgacctgaaccacctgaggtcggttgcagaggaagacgggcaggcattggcagagaaggaaggcctatccttcctcgagacatccgccctcgaagcgctcaatgtcgagaaggcgttccagaccgtcctctctgatattcaccaaatcataagcaagaaggcacttgcagcccaagaggcagcaggcagtgggcctccaggtcaaggaaccaccatcaacatcgcagacccatctgccaacacgaagagagggtgctgctcttcataagtaggtgcaaacaaagacatgctgctgcttctgcgaaaagaaaaccccccggtggatcatacaacacttttgttatgtagttgaccccttttggcctgtaactctggtgggttgtaatcacaattcatactcctgcaaagaaattctcctctcgggtagatacgatgtgtagtttcgagattttggtagaggccaatgtttggctggcagacttcgggtggagtccagcctcgtgttttctttcaatgttcttctacctcggtagtcttctgctggaaaaaaaaacatgatcagatacgttcttgtatttctacctgagtttgttgtattgtctccggtatattatatatacactaaaaactttgattcctgtgct

SEQ ID NO: 96534 - DNA, 800 bp, Zea Mays
ccttcccctcaccgtgctgcgctgtttacgcccgcgtccccttccgtttccgttccattcgcctatcgtaccccctctccgtctctcgtcatcgtcggcccgtcgcagccacctccatcggcctccgatccctccacgagcctccggtcgaatccgaggagcaggatccgcggcggcgggcggcggtcgcccggcgatggcgcaccgtatggacaacgagtacgactacctcttcaagatcgtgctcatcggcgactccggcgtcggcaagtccaacatcctctcccgattcacccgcaacgagttctgcctcgagtccaagtccaccatcggcgtcgagttcgccacccgcaccctgcagtgtaaactgggccttatgtgatgccgatcgagtgatcagcgtgctgctctcagctggcgtgcccatgaggtcatgtcctatctatttaaaatttatccatgccccgtcgatgccgacactaggatctgctccttcgccagcttatcccacacgctaaagctggagccgggctactatggcaaagccatctttcccgtgaaggtgcgggcgtcagcggagaaggtggccggctcatctgcatggtccggaggccaagcatcggatggccgaggagtgcctaagtcgagctgaaggctgtaccggaggccacaacccgttcttgatgatcttcaactatctgtgcatgtcttgaactggagcaagctcggggtttcacagatgcagacttatgggtacgacaaactgatgttcgccggtcagctggtgaagtgcaacctta

SEQ ID NO: 96535 - DNA, 944 bp, Zea Mays
ccttcccctcaccgtgctgcgctgtttacgcccgcgtccccttccgtttccgttccattcgcctatcgtaccccctctccgtctctcgtcatcgtcggcccgtcgcagccacctccatcggcctccgatccctccacgagcctccggtcgaatccgaggagcaggatccgcggcggcgggcggcggtcgcccggcgatggcgcaccgtatggacaacgagtacgactacctcttcaagatcgtgctcatcggcgactccggcgtcggcaagtccaacatcctctcccgattcacccgcaacgagttctgcctcgagtccaagtccaccatcggcgtcgagttcgccacccgcaccctgcaggtaaacccacccgcaatgatttgaagaacgttctagtttataagtcgttttgacatttgtaaatacacaacttctgttatgtaactagacaaatagtgtatccttttccacaacggacgaatccgaatttcattgtttggaatcaactaaaattacaaaagttttaaccacacattttccactagtatcaccaaaaaaacctgcttagctggaatgaacacggcatattatgtggctagatgcttgatgtatctagaaaagccaaaacaacctatagtttgggacatacgatgtatgtcgttgtatagaatgtaatataaaacatgacaactttatgggctcgtctcacgacaccatagtggttaaggcaagggtagcactagcagcagtaatgacgtcaaattctggaaccgggatgccatcctgggggatctcgagggcatgacaagtccaacagctcaagagcacctgcaggttgcgacgacaccgcgctggccaacaatgggcagtgctacattaactaaggtggggtgaagtacccaagtaggagcagctatgcttatctttacttaatttaccttta

SEQ ID NO: 96536 - DNA, 124 bp, Zea Mays
caattttcagatcaagggttctattgggggcttagtgaagagaagttgtgtgggtgtgcggcctgctgacacttgtgctgctgtcctgtgcagagggcagctgcattcctgtgcgtagcatgta

SEQ ID NO: 96537 - DNA, 102 bp, Zea Mays
atggtccaaatattttggaggattatatgtggacatatggtatgcctccataaattttcatgaatttctgagactatttgtgtattattaatttctttctaa

SEQ ID NO: 96538 - DNA, 633 bp, Zea Mays
atgtcatcgatcatggatgtcattatgtcatttgtatccctttgaatcagttccacggttcctcctcctccctctatttccctgtccagactggtggccacagcagggcacgccggcgacgcgcacccgccggcaaccaggtttcccggcgccgccccttgtctagttctcagcttctcctcgcggcgccccttactggcttcctcttcttcccagacggtggcgcgtcaagactccccacccggctgtccggcgaggacctcggctcctcgcccctccgccgctaaagagccgccatccagccgcccagccccaggccccaccgccccagctccacctcggtcccctcgcctcacctcgacccggattccgcccctcgcctcacctcgacctacatctgcctcgtccccatggaggcggcggcgagccgcaagcgcgcgtacagcatcatcgtgcctacctacaacgaacgcctcaacgtcgccctcatcgtctacctcatcttcaagcacctcccgtaagcacctcccaccgcccagatccctctctcccgtttggcgctgatctgtctctcgccgttgcaccttttgctgccacggttgggtcgagatcgtcttcgtggtgaacgttgtc

SEQ ID NO: 96539 - DNA, 441 bp, Zea Mays
atcgatcatggatgtcattatgtcatttgtatccctttgaatcagttccacggttcctcctcctccctctatttccctgtccagactggtggccacagcagggcacgccggcgacgcgcacccgccggcaaccagacggtggcgcgtcaagactccccacccggctgtccggcgaggacctcggctcctcgcccctccgccgctaaagagccgccatccagccgcccagccccaggccccaccgccccagctccacctcggtcccctcgcctcacctcgacccggattccgcccctcgcctcacctcgacctacatctgcctcgtccccatggaggcggcggcgagccgcaagcgcgcgtacagcatcatcgtgcctacctacaacgaacgcctcaacgtcgccctcatcgtctacctcatcttcaagcacctcccgtaag

SEQ ID NO: 96540 - DNA, 614 bp, Zea Mays
atgccgcgcacgaccccccaccaacggcgcccttcctccccaaatactgccgagtccccaccaacagcgcccttccttccccggctgtcgagatgccgcgcgaccttcaacgccggatctcgccccatggccaccaacgacgcccttccttccccggctgcaaggatgcgactaccccaccaacggcaacgacacccttcctcccccacatgttgcgcgcggccgagatcccgcgcggctcccccaccaacggtgcccttccttcccccggctgccgaggtgccgcacggccttcaacgccggatctcgccccatggcctccaacgacgcccttccttccccgactgccgagatgcgaccaccgccgctccccgaggaggtggtgccgatgtacctacgacctgctccttccacctcctcgcctttctatgagaacgccgccaacctgctcaacctggcaccaccgcctccatatcagccatctcccgcatggtgtctcgacgtcgtccctcgctgagcaccccctcgtgcttgaccatgagcgacagcgtgctgaactcccgttcgttcggttcatcgctcggtggaagcgttgtggcggagctcggcagtag

SEQ ID NO: 96541 - DNA, 692 bp, Zea Mays
tccacttctgactcaaacagaatcagatgaagagttaactggtgatgactatgcatgcttgagaaggaccttaaggaacaacaggttgtgcatggtgaggtggaaaacactttagggcctggttttatcaacttggcattagagaatccaataccaaaggtaatctgtgttaatggcaatgatagtggaccagtctcgtgcagcagtaactctcgctgaccactgctgtcagttatggacttgctaccagggccccatcaattttcgtatatttgtgaagatggacggcagtgacctgcatgttggcatggcaaaattgaaatgggggcatgcagtgcaatgggtgggctacgtaaggtgttggttgtgtgctgacgaaattcggtcgaagccgtcctaatccagaatcatttagggagatgctgagttgacatgttcgaatgacctttttatagatatagtacgtatgtccatgggactgggaggaaccgaggacccatgagatgcatatacgtttctttcaaacaattcatcttatgggttttaaacgcaacatgattatgtatgttaacattagacaagccaattccttcaaaaaaatgtcatacaaggcaagacatttctggtggcacttgatgcgcgtcctcattttaagcatcacggatagaatataaccacatgttctgcttgct

SEQ ID NO: 96542 - DNA, 2196 bp, Zea Mays
atggccgccgcgacagagaagacggctgaggacatccgccgcgagctccaggagctccagcgccagcaccgcgaggtacaccttcttctttgtccggcgcatctcgaagcctcgagtctccgggccgtctgccctgacccccttgtcgtcccctcgcagatcaccgagcgcctgcgcgacccctgtggccttcgccgcggcacccccggccctggtcctggacctgggcccccccgcccgctccgtggcttcgtgagacccgttgatggctctgaaaataatgaagatgacacaaaggatgccgatggggaggggcaagaggcgggttcaggtgccactgaaggcagtgacaggaggactttcaacattggcgggttcagaagggacgggagcctgtggatgcagaggagggtggactataattcgctgccagagccagctccaagggagcttcccatgaatgaggacccgagtttggctgagcaaaaggttcgtgaagaaagtgaaaggctgcgacaacaggaacgtgagcaaattgcagagaagcgtaagtgtgatatgatgctccacgctcgtgtagctgctaaggcagaagaaaagagtatggagctgttgtacattcactggactgagcatcataaaaggctgtccaatttcttaagttgtttaagtgagtatgcagtatatatatcgtacatgaatgctggatgtatggttatcagtggtgactcatacaccgtttatgcccattctaaaattatatgccatcaatttgcaatgttttgccctacagaggtggactacacaatcagcaaaaagaacatgacattccaaatatattgttgcccaaggactactgcagaattggaggcacatgtagctgatacatctcttgtgtctgctgatgcacctcgtgtgcttgctgatactgtactggatatatctggtggggagcgtgcttttattgaggcagatgaagcaaaggaactgcttagtccacttacgaaaccagggaattcatataaaagaatttgctttagcaacaggagctttggtattggtgctgctaatgttgctggtccaattcttgattcagttaagaatcagctcacagaggttgacatatcagattttgtggcaggaaggcctgaggatgaagcccttgatgtgatgcgcatattctccaaagcattagagggttctgtcctgagatatctgaacatctctgacaatgctttgggtgagaagggtaggaagctgcgaaagctctatctgagcttattcctgcaactgaagcttaaggttctccacttccacaacaacatgacgggagatgaaggtgctatgtatattgctgagatggttaagcgttctccgaatgtagagagtttcaggtgctcagcaacaaggataggatctaatggtggagtcgcattgtctgaggcattagggacatgcactcgcctgaagaaacttgatctcagggacaacttgtttggtgttgatgcagggttagctctcagcaaaacccttccaaagcttcctgatcttgttgagctttatctcagtgatctcaatcttgaaaacaagggtactatagcaattgccaaagccctcgaacagtcagcaccgcagttggagatactgttgaagatgctaccaaaatattacaatcatgtcagagcttatgataatacactcattacaaaaaaatttggcgtccacaggattactctgaaaggcggaagaaaggttcgctttgttgtgatgggaaatatgttttgcactgagctgcgaattcctcgtaagtatgacttaaagggttctacacaaggccgatcaaccaaaaagcaaaatataaatgagaacgcaacactgaaggaccttgacctatcatatgtttttcatgtcgataaaccatggcgggacacacttttcagaaatgatcatagtgggttaatgattattgtttcttctaatgttcttttatcacacaagaggagcataccccttgagaaggaccttaaggaacaacaggttgtgcatggtgaggtggaaaacactttagggcctggttttatcaacttggcattagagaatccaataccaaaggattggagaactattcatatgattggagctgaaagcaatctacttgatattgtctctaattctgttgccacatctataacttaa

SEQ ID NO: 96543 - DNA, 2160 bp, Zea Mays
ggctgcaaaggaggaaaaacacacacgtgtccccacttcttaactgagcattagcagttccagagtaaaaaatgttacatacacaagacatttgcgatgttgttatataatgatccaaacaggacgtgtcccgaaagatgaataatcatcccagacaggttcttgaatcgtatatatatatatcacatacttgaagatacactccagatatcctgaaaggtctacgggacaagcaaaaacacaattgacacgaaagataagacatcaacaaaaatgcccgcctttcatctgctctctaaaactgcttgctggtctttttcaatcttcggttttcgccttttctagcttctgcaatgcacaatagcacaagttaacacacggctctaaagaatatgcatagaagcaatacagcaaagaacagtaaaaaccatctttgaaatagaacaaacacaagatgctagcacagggcttaaggatattttagaacatacaggactcgactaaatgaaatcatattatttatgtagcacctgtgagtgcaggtgttcagtttgttaaaaagcaatctcttttaaagctcaaatcgcatccagcctataacctgaattctgcattcattcacagagggtttacctatacaaataccgctaacttggcactgcaagcaaatgatccccaggatttgctgacacctcaattaaaggtgcatcaagttctagtaggatgtaaagaaaaagatccaaagaaattgtagcaaaaaataagtcatgctaatcagatttcaggggcaatgaggatcggggaaggtcccagattccaacactgaaccagatgtgagcatcgaaaccaaatgagacattagttataacatgaagaacatccagaattcatttaaccttccacttaggctgcagctgtgcagcatacaaacatcctatctaaacagctaggatgttcatcccaggtagctccataatcccatttttgcagtttgcatcaaacactcaataaccttaatattggaaaaaagatatgttaaataaatttgtaagttgtaacaccaattgcccgtacatgaaacaaatggcaaatatgtgcgcctaggggtggtggtaatggatctcgatccaaatgtttcttcacaattcgtttgagcccttaattaattttagttcaagaatgaatagaaatagatcaagatccaaatatgatccaatccttaaattttacagtgtaaaatttggagcccgttaccacccctacatatgccggatcatcatgttaacgcttgcagagctgcggtacagaagtacacagcaatacagatacattccatccttttataacatgaaccaaagtggcagtttttatctaagcctaccatggaatgaagcacgccacgcttacaaaaaacaatcacgtgaatgcacccacaaagccacttcattcattcctatttgcaagactatggtcgaattcttcttaataagtagcagatggtcactaatcaaagcagatatttggttctcacattacaaagaacattgagaagtaatccggtcttgatgtttacacaaaacatctgatctgaacaacaaacatattcatcctaagcaactccactaacgcacagcaagcaaacaggtttgcctgaattatcgtgtgaacacttcgcaaaaacggtaatacaatcgcttcgcgtccgtccagaagacaaatcggggaggcagtgttcaatggcccatcggtgactgcgccggcgtggtcgaatccggcgcagcgaatcagcgggcgggagccaaatcgacagggatggggggagggcggtcttacggactgctcggagtgccacgagaggccgcggtagacgttgacggagaaggtggcggcgaggtagagcgtggcgacgcccagcccagccgtcagcgccttgaacgccaggtcgcccaccgccatcgcgccgcttcttctcgtcctgggtccggctggagcagcagcaaaaccctcgcttgggatggggatttctgtcacggttctgtcgagacgcgaggcgaaagcactgcttcgccggcgtgggagggagctgggcctgcaggtgggcttctgtggtgggatggaggtgggcttgacctgtgttcttctttccttgataaagggcca

SEQ ID NO: 96544 - DNA, 1967 bp, Zea Mays
ggctgcaaaggaggaaaaacacacacgtgtccccacttcttaactgagcattagcagttccagagtaaaaaatgttacatacacaagacatttgcgatgttgttatataatgatccaaacaggacgtgtcccgaaagatgaataatcatcccagacaggttcttgaatcgtatatatatatatcacatacttgaagatacactccagatatcctgaaaggtctacgggacaagcaaaaacacaattgacacgaaagataagacatcaacaaaaatgcccgcctttcatctgctctctaaaactgcttgctggtctttttcaatcttcggttttcgccttttctagcttctgcaatgcacaatagcacaagttaacacacggctctaaagaatatgcatagaagcaatacagcaaagaacagtaaaaaccatctttgaaatagaacaaacacaagatgctagcacagggcttaaggatattttagaacatacaggactcgactaaatgaaatcatattatttatgtagcacctgtgagtgcaggtgttcagtttgttaaaaagcaatctcttttaaagctcaaatcgcatccagcctataacctgaattctgcattcattcacagagggtttacctatacaaataccgctaacttggcactgcaagcaaatgatccccaggatttgctgacacctcaattaaaggtgcatcaagttctagtaggatgtaaagaaaaagatccaaagaaattgtagcaaaaaataagtcatgctaatcagatttcaggggcaatgaggatcggggaaggtcccagattccaacactgaaccagatgtgagcatcgaaaccaaatgagacattagttataacatgaagaacatccagaattcatttaaccttccacttaggctgcagctgtgcagcatacaaacatcctatctaaacagctaggatgttcatcccaggtagctccataatcccatttttgcagtttgcatcaaacactcaataaccttaatattggaaaaaagatatgttaaataaatttgtaagttgtaacaccaattgcccgtacatgaaacaaatggcaaatatgtgcgcctaggggtggtggtaatggatctcgatccaaatgtttcttcacaattcgtttgagcccttaattaattttagttcaagaatgaatagaaatagatcaagatccaaatatgatccaatccttaaattttacagtgtaaaatttggagcccgttaccacccctacatatgccggatcatcatgttaacgcttgcagagctgcggtacagaagtacacagcaatacagatacattccatccttttataacatgaaccaaagtggcagtttttatctaagcctaccatggaatgaagcacgccacgcttacaaaaaacaatcacgtgaatgcacccacaaagccacttcattcattcctatttgcaagactatggtcgaattcttcttaataagtagcagatggtcactaatcaaagcagatatttggttctcacattacaaagaacattgagaagtaatccggtcttgatgtttacacaaaacatctgatctgaacaacaaacatattcatcctaagcaactccactaacgcacagcaagcaaacaggtttgcctgaattatcgtgtgaacacttcgcaaaaacggtaatacaatcgcttcgcgtccgtccagaagacaaatcggggaggcagtgttcaatggcccatcggtgactgcgccggcgtggtcgaatccggcgcagcgaatcagcgggcgggagccaaatcgacagggatggggggagggcggtcttacggactgctcggagtgccacgagaggccgcggtagacgttgacggagaaggtggcggcgaggtagagcgtggcgacgcccagcccagccgtcagcgccttgaacgccaggtcgcccaccgccatcgcgccgcttc

SEQ ID NO: 96545 - DNA, 751 bp, Zea Mays
gtacggcccatgtgagaaggcgcgcacctgctcctcacctgtgtttgcttccgccgccggcaaggaagaagagagcaaaaccctagctagagttggcgagtgggggtggaggcgcggctgctcgtcacgacatcgagtttcagcgccgcccgcgagatccccggatttcgttctctacccctgttagggagagctgcggcaatggctgggaaaggcgggtcgaccaacttagaaaaggagcagatgtttgggatggcggagaaggagatggagtacagggttgatcttttcaacaggcttacacagacctgttttaacaagtgcattgaaaaaaggtataaagaagctgagctcaatatgggcgagaacagttgcattgatcgatgtgtttcaaagtattggcaggtgactaatttagttggtcagatgcttggaaaccggcctcaaatgtgaactgagaagcactcgttccattttgtagcagaattctattgctctgtttcttctttttggttggttgtagaatgccgcacctgttctaagtacaccaatacagcaacagacatgctactgcgtggaccgctttaaagaaaaaaaatcagtgatgcgcattctctctgaatcatgaactgtaataatttgatacagctctagggcaattctgtttcgaaagctcgtcctgtttcgtagtaaaattctggatttgtgttcctctgaggtaattagagtataatatttttctttgcgaatc

SEQ ID NO: 96546 - DNA, 745 bp, Zea Mays
gtacggcccatgtgagaaggcgcgcacctgctcctcacctgtgtttgcttccgccgccggcaaggaagaagagagcaaaaccctagctagagttggcgagtgggggtggaggcgcggctgctcgtcacgacatcgagtttcagcgccgcccgcgagatccccggatttcgttctctacccctgagagctgcggcaatggctgggaaaggcgggtcgaccaacttagaaaaggagcagatgtttgggatggcggagaaggagatggagtacagggttgatcttttcaacaggcttacacagacctgttttaacaagtgcattgaaaaaaggtataaagaagctgagctcaatatgggcgagaacagttgcattgatcgatgtgtttcaaagtattggcaggtgactaatttagttggtcagatgcttggaaaccggcctcaaatgtgaactgagaagcactcgttccattttgtagcagaattctattgctctgtttcttctttttggttggttgtagaatgccgcacctgttctaagtacaccaatacagcaacagacatgctactgcgtggaccgctttaaagaaaaaaaatcagtgatgcgcattctctctgaatcatgaactgtaataatttgatacagctctagggcaattctgtttcgaaagctcgtcctgtttcgtagtaaaattctggatttgtgttcctctgaggtaattagagtataatatttttctttgcgaatc

SEQ ID NO: 96547 - DNA, 706 bp, Zea Mays
gtacggcccatgtgagaaggcgcgcacctgctcctcacctgtgtttgcttccgccgccggcaaggaagaagagagcaaaaccctagctagagttggcgagtgggggtggaggcgcggctgctcgtcacgacatcgagtttcagcgccgcccgcgagatccccggatttcgttctctacccctgagagctgcggcaatggctgggaaaggcgggtcgaccaacttagaaaaggagcagatgtttgggatggcggagaaggagatggagtacagggttgatcttttcaacaggtataaagaagctgagctcaatatgggcgagaacagttgcattgatcgatgtgtttcaaagtattggcaggtgactaatttagttggtcagatgcttggaaaccggcctcaaatgtgaactgagaagcactcgttccattttgtagcagaattctattgctctgtttcttctttttggttggttgtagaatgccgcacctgttctaagtacaccaatacagcaacagacatgctactgcgtggaccgctttaaagaaaaaaaatcagtgatgcgcattctctctgaatcatgaactgtaataatttgatacagctctagggcaattctgtttcgaaagctcgtcctgtttcgtagtaaaattctggatttgtgttcctctgaggtaattagagtataatatttttctttgcgaatc

SEQ ID NO: 96548 - DNA, 406 bp, Zea Mays
gtacggcccatgtgagaaggcgcgcacctgctcctcacctgtgtttgcttccgccgccggcaaggaagaagagagcaaaaccctagctagagttggcgagtgggggtggaggcgcggctgctcgtcacgacatcgagtttcagcgccgcccgcgagatccccggatttcgttctctacccctgagagctgcggcaatggctgggaaaggcgggtcgaccaacttagaaaaggagcagatgtttgggatggcggagaaggagatggagtacagggttgatcttttcaacaggcttacacagacctgttttaacaagtgcattgaaaaaaggtacagatattatcaggttacttttaaaaatctattatttgtagtcctgttggcacatccttatttctatgtaacac

SEQ ID NO: 96549 - DNA, 258 bp, Zea Mays
atggcgtcccttcgcggactccacattgggcgaggccgggacgtccatggaggcctccccaagcttcatcaccatgctggtgctgcctccagcgtgcggatgcagatgccgcggccaggtgcgcgcgacacagcgaggaagctccgccccgacggccatggcgcggtggttctcctgctgcctcgagtgtggggttgtcaagtcggtggtgcgcctctgcggttcaagttgctcgaagacggcgacgcgtatggatag

SEQ ID NO: 96550 - DNA, 487 bp, Zea Mays
cgcacggcggcgcgggaatggtcatcgggttcgccgtcgcgcccggattccggctggggaacggcgccgtcgtgcgcgcccgggtctacctggtgccgcgtggtggccgaccgtgacagacccatgcatggcgtgacagaccgcgtggtagcgttgcatagcgccgcggcccacggatcacctccgagagttgttggtgggtgccaatgcgcaccctgctggagcctggagctggacctgcggagtagctgctggctggctgcgttggtgaagaacagacaaaggctcatagctactgtactagtggctccgtagattttatttcatttacttctccttgttaatctcaaaaaaagtaataatcgccatgtgtaagaggactttgaatttaattctcgcatcaacatcgtttgtaatcatcaccttgagatttgactttgtagttaagagggacagttaagttcagcagtgcattgcgcgttccagg

SEQ ID NO: 96551 - DNA, 172 bp, Zea Mays
gtttgccgatgtgcctactgttgcagttgttctatatgctaatttattattatgcaggttcatttggaccatttataaacgtacaaacttcactgattggtccagtgcttaattatatgctactttccatttattgagccaaagcacattatcatcgagaggacgatctaac

SEQ ID NO: 96552 - DNA, 1098 bp, Zea Mays
cagcacagtcacagtgagtgcacggcatcttttccgctccgctctcccactcccccacagtcccacgccctccagtcaaagcaagccgctgcttggccggccgggaaggctcggtcgcagcgccgaggaatggcggccaagccggtcaccgtcggcgacctcatccaccgcgtcgcctcttcctgcctctccaaccgcctgccgtgcaaccacaccttccgcgactccgtggacagtgactttgacgacgacgacgacgaccccttcgccgacgccgtctccagcagcgagaaatgccggcggtccccgcccgctgcggaggtcgaggaagaggaggacgaggacgagaagctcaagatctgggaggagagggagcaggagaaggagaggctggccgccgcgtccaagggcgccgagcgcgcccgcgacgcggacgcgctgatggcggaggtgttcgacgccgtctccggggtgcgccgcgcctacgccgcgctccaggacgcgcactgcccctgggaccccgacaagatgcggactgcggacgcggccgtggtcgccgagctccgccacctcgcgcgcctccgcgaccgcttccgccgctccgcagccgtgggccacatcccgcgcccgaacccgtccgcgccgccgctgcgcgaggccgtggcgccgtacgaggcggcgctcgacgacctccagcgccagctccagtccaggcaggccgaggtggacgcgctcaaagagaagctcgcggcggccaccagccgccgcaacgggcgccaccaccacgtcccgccctccaagcagaacggcggcgcgccgacggcggagctcttcaccacctgcgccgagcaagcccgcgcggcgacgcgggcctttcgcggggcacctcgcgcacctgatgcgcgcgacggggctggagctcgcggcgaccacccggtcgctcaccaagatcccggtgtcctctccgcagctggccaagcactgcgctgtagcgctacgccacgctcgcccttcttcgtcggcttcgagcacgagtccttctacctggacggctaccctctcgtcattgctgaccccgccgcgttcctgtgtgagcgt

SEQ ID NO: 96553 - DNA, 541 bp, Zea Mays
agacaaactgtccacttcattcaaaacaatgtcagacctcatggcgaagaccatgccggaggtggtgtccacagtggccttacatgtctgcctcatgctccagtataaaccatctgtttacactctcaggattctttccttttccttttctttgcttagattcgtgtcttaaaccatctctccaatcctgattctagagtttttgacccacacattacatgatctcatgtaatttgatacttttggcagttctgactggacctggtcctacacctcttgtaaattatagaagcatccaccaacactcactgcatttcttctcctctttgactctggactcatacacaggctttgcaaatctgtcaagtgtgttgacaagaagattggacacatcagcctcaccagtgaaagtgaaacgatcttccttgctagcctcctgatgtgcaaccggtgccttgtctgaagcatctgctgtattgggcttggacacgatgccaaggattggtgagtcctccagttttggcaaggaagcaaactgccg

SEQ ID NO: 96554 - DNA, 1420 bp, Zea Mays
atgcagagcgggagtgcgggacaccaacccaggcgcctaaagctaaaggccctctccaaaaccacgccgcgccgccgcattcccgcaagcatctcgccggcggaggcggcgctcccgatgctcgagtctgacgtccaactcggtagctcccgtgcgtacccgggggtccgggcccccggagcgtccaaggaagcgcaagaggggcaccgaggccccgtcgcccaggcgcgcgacgcggagctcggcggcggcgcaagtggacgtggaaggcgcggtggcgtgggcacggcgcgcggccgcgggggagcggtcggtggtgtgcgggcgcaaccgtcgcctcgacgtcgacttggagtcgctggggacggtgatcctgttgttgtgattctgtatccgaataacatgccatttttagttggaagggccaagattgtctgtatcttccatttctcgtgcgttattaattctgaaacaaaaaagaaaccacaaataagcacaaagaaacatattggaatagaccctgtcagatgtcaagctgctgtccctgagtggattaatgacccatctgaggaatgtaaggctaactacagaaatgataatgataccttgcaaaggatgggcacagtggtcaggctgccacccactttggagccaccgaaggcaaggaaagcagtgaatgacatgtgtaaatgctatcatcctggatctgaggcctacgtagaagttaatgtaaaagaggcctggaagagggtcaagtatcaattgggtgagcaggctttcaaaaactgtgggtttggtgcgatgggtgagcgagttctgaagttatggactgcagaagacaagaaaaaacttgctgattttgagaagttgattcctcagagtaagagtactattgaagacttcatggaggttgccttgaagcagtttagctcagagagaacaacagacttggctaagtattgctacaacgtttttcttcctagaagatttgccagcctgaatagagcagggtctacaaactccatagatgcgatttcagatgatgaaggcaatagccaagatgataacaaagtgcatctttctgaagagaatggtaaaagctctggatcgtctttgaagaggtcccgggagtaggagaaatgcagctgacattttgctgctttggacagttgtccattcttttttcaaatggagctggggtagctttgaaggttacatatatctggctatatggactgaagttaacatatgctaccagtgaggagaaactggactgaagttaacatatgctgatgagttagtctaacctttttttttcctcctcgagagagcgtatatgttcatgcgccgtgtcattttgtatggacgcacataatagcaaatcgagaacaaaagacatgtccatttatgaattgttacg

SEQ ID NO: 96555 - DNA, 1565 bp, Zea Mays
atcatgactgatgttcatacaaaggcaggttcacatggtgaggttgccgaatgccgaggcagcgcagccggcgcccggcagccaccgctagaggcggccggcgtctctcgcaaataccctacaaggacaacgccacaacggcaaggtttcagaaaggaaaaaaaagaaagaggcaacggcaagtcaaatgcagagcgggagtgcgggacaccaacccaggcgcctaaagctaaaggccctctccaaaaccacgccgcgccgccgcattcccgcaagcatctcgccggcggaggcggcgctcccgatgctcgagtctgacgtccaactcggtagctcccgtgcgtacccgggggtccgggcccccggagcgtccaaggaagcgcaagaggggcaccgaggccccgtcgcccaggcgcgcgacgcggagctcggcggcggcgcaagtggacgtggaaggcgcggtggcgtgggcacggcgcgcggccgcgggggagcggtcggtggtgtgcgggcgcaaccgtcgcctcgacgtcgacttggagtcgctggggacggtgatcctgttgttgtggtgtgtgcgctcccagctcaaccccgacatgcctttctccgagaaacaaaaaagaaaccacaaataagcacaaagaaacatattggaatagaccctgtcagatgtcaagctgctgtccctgagtggattaatgacccatctgaggaatgtaaggctaactacagaaatgataatgataccttgcaaaggatgggcacagtggtcaggctgccacccactttggagccaccgaaggcaaggaaagcagtgaatgacatgtgtaaatgctatcatcctggatctgaggcctacgtagaagttaatgtaaaagaggcctggaagagggtcaagtatcaattgggtgagcaggctttcaaaaactgtgggtttggtgcgatgggtgagcgagttctgaagttatggactgcagaagacaagaaaaaacttgctgattttgagaagttgattcctcagagtaagagtactattgaagacttcatggaggttgccttgaagcagtttagctcagagagaacaacagacttggctaagtattgctacaacgtttttcttcctagaagatttgccagcctgaatagagcagggtctacaaactccatagatgcgatttcagatgatgaaggcaatagccaagatgataacaaagtgcatctttctgaagagaatggtaaaagctctggatcgtctttgaagaggtcccgggagtaggagaaatgcagctgacattttgctgctttggacagttgtccattcttttttcaaatggagctggggtagctttgaaggttacatatatctggctatatggactgaagttaacatatgctaccagtgaggagaaactggactgaagttaacatatgctgatgagttagtctaacctttttttttcctcctcgagagagcgtatatgttcatgcgccgtgtcattttgtatggacgcacataatagcaaatcgagaacaaaagacatgtccatttatgaattgttacg

SEQ ID NO: 96556 - DNA, 1886 bp, Zea Mays
ccgccgagcccgatcgacctcccttccgccgcacgccggcctccatcctcctccgcgccccgaggccgcagacgcgttgacccccgcgcctccgcctccgccgcctccaccaccgcatcgcccacctttgcgtcctccccaagccccttcatgccgtcgaaaggcatctcctccccccttttagcgcccaccgtccaccgcccgtttcccccaccggccaccgcctctcctcttcccatccgtctcaactccgccggcctccgctcttcttgctctgctccggggttttcctcctttcagttgcaggttctgcggcgtccatgtcactcgagttcaggtccgagtgcgatgacatcgaggaggccaagtcccccagcaacaccagcgtcgccgccgtcgccgtcaagaacggcgacgcctcggtctacaagatcatccacggctacctcaagcagaagaacaactccatcatcaaagtcgccgccaatgtcgcccggaaagcggcctccaacaaattatcgaggaagacctcggatgtcttcgacaccttgcttcagaagcagcaaagcaagtggggaaacaaggccgggccgctgctttcagggatctgttactgcatcgcctcctgcagcatgatattgctcaacaaggtggttctctccagctacaacttcgatgctggaatatcgttgatgctataccagaaccttataagtgtgctcattcttcttatacttgagctcttccgtgtcatttcaacggaggaactcacatggaagctgataaaagtctggattccggtgaatcttgttttcatcggtatgctactaactggaatgtacagtttgaagtacataaacgtcgcaatggtgacaatactaaagaacatgacaaatattataacggctataggagagatatatatattcaggaagggtcagaataagaaggtttgggctgcactgtttctgatgattgtatcagctgtatgtggggggattacagatctctctttccatctagttggctacacgtggcaaattctgaattgctttctaacagcaggctactcgcttacactaaggcgcttgatggatacagctaagcaatcaacaaaatctggctccctcaatgaagtttctatggtgttactcaacaatgcactctcaattccattcgcactcattttggttatagccttcaatgagtgggaatatgtttatcaagctgaggttatcagagagcctatgttctgggttgttgcaacagctagtggtttgctagggctagccatcagcttctcatcagtgtggtttttgcatcagactggtccaacaacgtatagtctcgttggttctctgaacaaggtacccatttcggttgctggtattttgctgttcaatgtccctgtaagcgtcgaaaatttctgtagcatagtttttggtctttttgctgggatattctttgcaaaggcaaagatgtcctaactgtcctgtccctgtgtggttgtaagctgtagcatgaagagctactgcggcagctctgcctatcaactgtacagagatatcaccattgttcctatcaactgtacagagatatgtccagagttcataaattttacatcctttccatccattcaaagggtacagcatgtgttgtgtgccctcagttttgtaacatgacaatgccaaggcaggaggaactctgcaaggccaatcagcaactggaactccagtactccactactctgatcaagaaattgagcagaacgattattatactacacaataaaggaaggatttgtgtttccgacatggttgccaaccgggccctcttcaggaattcatggtaaaaaaaacacatcaccgattgattcggtttttacc

SEQ ID NO: 96557 - DNA, 201 bp, Zea Mays
gtgtccaaaccaggttcagtaaaggtagagaaattgatgaatatcgaacgatattctcatgtcatgcacatcagctcaacagtaactggagagctacgcgatgatcttacgtgttgggatgcgctacgagccgcattgccagttggaaccgttagtggcgctccaaaggtgagagcaatggagttgattgatcagctagaa

SEQ ID NO: 96558 - DNA, 1597 bp, Zea Mays
acgagggggcccacgcctgaatgccaggcctggccgcgacgtgtcgcgcctcgccctccccgactccactccactccactccactcgcccgcgcccgccgcccgcgtgctcctccctcgcgccccgccccgccccgcccctatctatatccattcccgctcgtccccctcaacaaccctcctcaccgcgcactcgtgttcgtgtcatcccgcccgcaggccgcagtccatggccaccgccagcctcgcgctctcgctgcgcctcgcgccgtcctcgcgcccgctgagcctccgccgccggggggccgccggcgtcacctgccgcgccaccaccgccacgttccaccagctcgacgccgtcgcggtgagggaggaggagtccaggttccggacggcggcggcggagggccgcaacctgctgccgctcacgaggtgcatcttctccgatcacctcacgcccgtgctagcgtaccgctgtctcgttaaggaggacgaacgcgatgcgcccagctttctcttcgagtctgtcgagcaggggtccgagggcaccaatgtggggaggtacagcgtggtcggggcgcagccttctatggaggtcgtggccaaggctaaccatgtgacggtcatggaccatgagatgaagtcgaggagggagcacttcgtgcctgatcccatgaggatccccaggacaatcatggagcagtggaacccgcagattgctgacagcctccctgatgcattttgtggaggatgggttggattcttctcatatgatacagtgcgttatgttgaaacaaagaagcttcctttcagtaaggcaccacatgacgataggaaccttcctgacattcatttaggcctctatagtgacgtcattgtgtttgatcatgttgaaaagaaaacacatgttattcattgggtgaggacagactgctatcgttctgttgatgaagcatatgaagatggaagaaatcggcttgaagctttgttatcaagattacattgcctcaatgtcccaacactttcttctggttctataaaactcaatgttgaaaactttggcccagtaatgcaaaaatcaacgatgtcaagcgaagaatataaaaatatcgttgtccaagctaaagaacacatcttggccggtgacattttccaagttgttttaagccagcgttttgagagacggacattcgccgacccctttgaaatctatcgtgcattgcgcatcgtaaatcctagtccatatatggcctatctacaggcacgaggttgtattctcgtggcatcgagtcctgaaaattcttacccgggtacaaaagaggacaataatcaatcgtccgcttgctggaaccataagaagaggcaaaacaaaagcagaagacaaaactttagaacaattgcttttgagtgatgaaaagcagtgtgctgaacatattatgctagtagatcttggccgaaatgatgttgggaaggttcgatactagagtggtcatggcttaaagttagtaaagtcggttctaaatctaaatattttgcccctgataagcatcctaagaatctggataggaatgtaatttttttcctttttaatacactac

SEQ ID NO: 96559 - DNA, 2436 bp, Zea Mays
aggcacataaacatatttgtttaagtagcatatgatacatcactccaaagtgcagttcagctgcttgacaagcaggtacagtacagtaaaatacagactgaatacagaataggtacaattccacaatgctttagaaatccccactacacactatccaggaggggacttcgacatatactgtatcagaatccagatgtccaatatcatgacgtctatttacaaaaccatgctgtctgttacatgatgctatagtatcatatttgcactacaccgccaagtggtaggctctcttaccacgttacacaagagctctgattcagccacagctgaatcagagcgaatgccaatgtgtagtttatgggtagaccggagcaatctactagagctctgatgataaaccagaggacattgaggccctgctggtgagagcaggcctcatcgtcaccaaagcagattcatttgcaccagctctcaaagcaatccgaccagcttccaggaacctggcgacagcatcctctgcgtagcggtttgcttccccgacagtcatggtcctgccaatatctgggtacgtgttcagtacgtgatcaccgttgagctgtgaagcaagttgaatcaactccacttgaaattccgagagagacgaatcttccttgggaccaaatggtcgcaatgacttcgtcacctctgggagcttctctgtttgagagaagaaagagtatctagttaggactctagtaaaattgatcattcaagtatatatagagccaaaagtgtcataattgttattccattggcataacacatataccaaactaccataaatacatacctggacagtcagttcttggtgttttccggattttgaagtagctctcaaaggtcccagcccatgcatctctctttgtcagaaagttagaatgtaaattgaatagcttctttactgttgcagggatggacgaatgctcatattgcgaggtatcctgtggaccatttggttcatggatcactgcagaaatgaaaagtgagatgagaaaggtgggaacacgcaccccaagccgttcgaacttgaagtagtatggatcaggcccaactattccatcaggctggggcactccaacgaccggcgtaggtacatggtcatagaatccaccatgctcatcatatgtgataatcagggccgtctcgttccactgcggactggctctcagtgtttcatacacctctttgacgaacctctgtccccttgccacatcatgcgagggatgatcatcgtttgctgggaacatctcgcaatcaaagtacctttgttcaatcaccacataatttggcagcttccccaacttggcgtgcaacttgaacttgaggctgtactggtggaacttaatgaggtgctttaggcggcggaggctctggtagaagagcgtggccgggatgttctggtagtagatgccaaaagacaggccattctcctcgaggctgtcaaagatggtcttctgcgggaaaccatggatgaggtccttgcgggcgttaaaggtgaggccgtgggaggtcgccgagtggacgaacaggcggttgggctgcgtggaggtgggcacggaggcgaaccagcggtcgaacacggcgaagtcgtcggcgagggaggcgtagatggggacggcgtcgggcttgaagccgctcatgacgttctgcggcatgccgaggcccatgccgcgcgcgttctgggcgaatccggacattgggggcggcaccgcggaggtgtcggcggagccgaagatctgctcccggatgtcctcgaagccgtggccggggtcggagtctacgtagccggcctcgtcggtgacgaagatctccggggatgcggggtcggaggcgttgaggcggttcgactcgcggcccgtgaggccgtcgatgtcggggcgggtgcggcggagccagccgaggatgtggtcgaagctgcggttctccatcaccaccaccaccaccgtcttgaccggggaatggatctcgtgcttccgccgccggcgcttcagcccgcggtggtgcgcgtccaggcagtgcccggagacgaccagcgccagcaggaggagcgccgcgaggaggcgcgccccggggccgcggcgggccacggcagccatcgcgacggaccgggaactaggtcttcgccttcgacggcgggcggtgcgcttgcaggtagggtaggtgcgcttgctgttcagttgaattggtgagctctctgttttttttccttcctttctttttcaatttaagcagttgctttgcttctgcgtacgggcggcggcggtgactttttttaatcgcttccaattttaccccgtgagaaggtagttagggaaagcagacaggtgggtcccacttaggcgccgcccgtggctccacacgtcattgggagggagttcggttcgtggagagtacggt

SEQ ID NO: 96560 - DNA, 833 bp, Zea Mays
tttttttttaatttcatttctcatattttcaataaagaaaataaagggaaaatcccttcaaatgaacagcagagaaagggaggagaatcgatcgatcatcgaccacgctcatgcccacgcccgcttcttcgggataagatcgagcgtcttgactttatctatcctggcggcgacgatgtagtcgttgacggtgaggctgtcgccggcggcggagggcgtggagagctcggccgtcacctggttgggggcctcgaacgccagggtcgccggggcgtgtccggcgccgtggagcgcggcgttgatcctggcgatgagctcctggccgcaggtctcgtcgcgcaccttccagacgcactgcagccgcgcgggacgctgctcgtcgccgtcgccgtcggagaggacgagcctccacccgacgaccttgaagaggagcctgcgcgcgtcgtcgagggagagcggctccgcgtcgggctgcagcgggaggctcgcgagggagagcgcggagagggtggggatgaggatctggtggagcgtgtccacgttgcccagcaccttctccccaaactggctctcgatctcctccgggaaggggtcgcgcgcgcccaagtcgcccagcaggtcggccatcgccaccacgcagccacgcgccctgccccggcggctcccaactgcgacgcccggccggatgaagcttgcgctgctgcagcggcatgtggaggccgcgggtgcagctgctggcggggcgagggagagcctgagcgccattggattgggtggaaacggagcccaatggatggctcaggatgcacactggcagtagctgggaatggatt

SEQ ID NO: 96561 - DNA, 505 bp, Zea Mays
cagcacgtagattgtctacgtgggaagatcagctcagcgaacacgaagttctgtcccagaaaaccaattccgccgcccacgtccgggcctgcacggcgggaggttgacggagatactagagccgctgccggagccgagggagacgtccacggcaccagcccgagaagatgaacaccgcgcagcagagagcccaagcaccaggccacggtggacaacaatcagaacagacagagtaccaacaggcacactgataatgcaacggagcacaggaagtccacgccgaacaagcgcagcaccacctccacactcgtccagatgctaccagcgagaatcaccacaagaacaccagagatcgaagaaatcaatcgagttcgtgaccagtggaacgagcagggagagagagcagagaacttccgtcgcttgtggagccgaagccagaggatttttgcctctattatatggagtcgagcacccaccaggcggttgcaagggagcagcggcccgc

SEQ ID NO: 96562 - DNA, 1718 bp, Zea Mays
acctttctttccctcttccgtcttccccaacccaaccacccgcaccaagccgacccagagagaggagagcctgcttgcctgcctgggctggactcccccttcgcctcctcctcgtccgatcggccccgccccgcctagctgctgctgctgctgctgctgctgctgcgcgcgcgccgcggcgggacccgggaggagcgccggtggtggtggccgggcccgatggagtgggcgtcggcggcgtacacggctgcggcgctggtgtgcgccgcggcggcgagcgtggtcgcgctcgcgcacatctaccgccacctcctccactacgccgagcccatctaccagcggttcatcgtccgcatcatattcatggtcccggtatatgctgtgatgtcattcctttcccttatcctccctgacaacgcgatatattttaattctattcgagagatatatgatgcttgggtcatctacaattttctctcactctgcttggcatgggtgggaggtcctggtgctgtggtggtaagcttgagtggccgaaccctgaaaccgtcgtggattctgatgacttgctgttatccagctattcctctagatgggcgttttatacgaagatgcaaacaaggttgcttgcagtttgtgattctcaagcctattttggttgttatcacttttatactttacgcgaaaggaaaatacaaagatggcaacttcagtgtcaaccaatcctatctctacataactatcatatatacaatctcatactcgatggctttgtatgcccttgcattgttctatgcggcttgcagagatctacttcggccatataatcctgtcccaaaattcatcatgataaaatcagtggtgtttctcacatattggcagggtgtcctggttttccttgctgcaaaatctcgatttatcaagaatgctgataaggctgctgatcttcagaactttgtgttgtgtgttgagatgctaatagcagccattggtcacttatttgccttcccctacaaggaatatgcaggtccgaatgcccgcccttcaggtggtttcagagaaagccttcttcatgctttgaaattcaatgatttctaccatgacactgttcaccagtttgctcctacatacaatgaatatgtgctctacaatcacaatgagggagacaatgcagaaacgaaatttccctcagggagcactgccacaagtgggcagggtgtggagttggctggcattaccgttgtggcttcaaacagtccagtgacatcaagtgtatcatgcaaccaggcagatcaggaagagacaatgacaaccccaatcaaggacaaagtcgatcctggagggctttatgatctcacagaattgcttgatgtggatttgtctagctacccagacaaggttcctgcaatcaccgatgtaagaaaacaatgaccaagcttgatgagatgtactattagtagggttgcaaacttgcaattggggggaaattgtgattttgtcgaagagttgccatagttaacatttgtaaaaatgtgtgtattacttggtctgattttcccccattcaatggggtttattcattgtcaaaagctgctgccacatggcctccctcacccctgctctttactaactgtaaattgttgctcaaggtgaactttaggtgtcaaggggactccatactaatacaatattctgggtttctgatggagtattttccg

SEQ ID NO: 96563 - DNA, 653 bp, Zea Mays
ctcggaagttagtaggttctcggaagttagtagcttcacgccgtcagctgtttaacttgctacgactaacttcctacggctgactgtagcccctaggaagttagctggctaacttcctacggcccaattgacctctaggaagttaatttgaccagcattacaaatattgtttatttttattttacaccacattccacaacataacaaatatatcaacaactatatagcacaacatattttcacataaaacatctcacacacactcacataacaatatttaaatccatagtctcatcaattataccacaaaagtctcatccgtagtcatatttgttattcagaaataaattatagaattataatagtatccacatacaacgtcatttttcttgttccgtacaaagattgtaaggggaaaatagtatcaaagccatattgaaatttactacctctccatcctccatctctagcgcaactaaatattcactgatttgtgttcatccgttcttagtcaacaaatgaacttgcttcacattctgcttggtgataagaagacaccaatgcaaaggatgcatccagcttctttgccaaccatggtagtttcaagatgcagagtttttgtacggttgtctgtcttctttacttcaattcat

SEQ ID NO: 96564 - DNA, 375 bp, Zea Mays
atggggaggaaggaagaaggggaggaagggagagggaggaagaagggagaagagtcacagaccacgaagccagtcatccagagcaaaacaccattgcagccagtcatcccgcccgtacagcgcctgttcttctacaacagggccgacctgctcgacgtctccgacttcacgctgggcgagctgccacggttcagggactccctcgccgccgcgctacaccacttctacccgttggcggggaagctaacgtgcgagctggtcgacgaggagggcgccgcaccgccggagggaccgagggaccaggagcgccgggaggaggagggatcgagggagcagggagcgccgggtggatggagcagccgagcagggagctag

SEQ ID NO: 96565 - DNA, 1093 bp, Zea Mays
aaaaagaaatggaggagacctggccggcaggcggcagcaattaactgccggcccgtcagtcaaccgaccgacgaccgatccatcaccttctacgagccacatgctccaccgaccaccacgcccacgcacgaagattcatttggatctgtgtgactgaccttgaccgcgccggccgcgcgcgcgcgtgcgtgcaggcgtgggtggaggagatggcgccgtacgtgaagtccgtggacggcgggcacctggtgacggcggggctggagggcttctacggcgcgggcgcgcacgagagcaaggacctcaacccctggcgcatctactacggcaccaacttcgtggagacgcaccgcgcgcgcggggtggacttcgccaccatccacctgtacccggacgcctggctctggggctgcgccgccgacgcgcagcgcgccttcctccgcaactggacgcgcgcccacgcccgcgacgccgcgctctacctgcgcaagccgctgctcgtcaccgagtacggcaagttcctgtgggagggcgtcgccggcgccaaccgcacccagcgggacgccttcctccgcctcgtgctcgactccatctacgcctccgccgcgcggggaggcccgctcgtcggcggcgccttctggcagctgctcgacgacggcatggacacgctcagggacggctacgagatcatactccccgacgaccagctcgccgccaccatcatcgccacccactcccgccagctggccgacctcagcctcgtcaccgccgaggacgtccgggaagaggaggcggcgccgcttcgccggaggaggaggaagagcgcgcatggcaagatacaccacgtactcagcgtgggtggtggtactagtagtgatgatagttattatacgcaacggttgctgcacatattcttgcttcgtctcatctctttgttcgaatcaatctcttcattgtttcagtagtgtataggttacgtgtagaatttttttttctctatcgccaccaggaaaaaaaaacctggttaggtgtgtgtgcgcgtgtgcaggttgttctagaaagttaggcatagccagtgtgtgtagagtataca

SEQ ID NO: 96566 - DNA, 750 bp, Zea Mays
aatttgggtcaagcctttaaacgccgtacagcggataggataaggccatctcccataacggagagagacgaagagagcggaagcgaaagagcagcggcgcaaaggaaagggagccatgctcgcgtcgccggcgctcgccggcgcccactccttcgcggcgtccgtgtatggaagcctcctcgtcccctcgcctcccgtccccgcgccggcacgtcgcgcggcgctgtccgtcgtcgccaaggtcaaggtggccacgccccaggacgaccgcatcgcccgccacgtccgcctccgcaagaaggaaatagcacaaaagatcggtgaggtgattgccaagtcttgtttggagaaagggatcaccaaggttgtcttcgaccgaggtggtttcctctaccatggccgcataaaggctctcgctgattctgccagagagcacgggcttgaattctgagtcgtccaggcgtttgttcatatctccaggatcacctgtaatcttctcttttttttctctctccatatgccaaacagagctgttttgtagtcactcgccttgttctacagggtgcaaagccatggcccatggccactcgttgaccatgtcacgtttttttcgtttggtaagagtcttgtgttctgacgcttctcgaattgatattataaattaatatcattgatctatctctttttttttcagatccgtctgtactctatggtgcacatgatatgtactcatataataccatagaatga

SEQ ID NO: 96567 - DNA, 912 bp, Zea Mays
aatttgggtcaagcctttaaacgccgtacagcggataggataaggccatctcccataacggagagagacgaagagagcggaagcgaaagagcagcggcgcaaaggaaagggagccatgctcgcgtcgccggcgctcgccggcgcccactccttcgcggcgtccgtgtatggaagcctcctcgtcccctcgcctcccgtccccgcgccggcacgtcgcgcggcgctgtccgtcgtcgccaaggtcaaggtggccacgccccaggacgaccgcatcgcccgccacgtccgcctccgcaagaaggtaagtggcaccactgagaggccgaggttgagtgttttccgctcaaacaaacatctgtacgctcaagtcatcgacgacacaaagcaatgtactctggcttcagcttcaaccatgcacaaatctctctccaaggaatttgaatactcggctgggccaacgatcgaaatagcacaaaagatcggtgaggtgattgccaagtcttgtttggagaaagggatcaccaaggttgtcttcgaccgaggtggtttcctctaccatggccgcataaaggctctcgctgattctgccagagagcacgggcttgaattctgagtcgtccaggcgtttgttcatatctccaggatcacctgtaatcttctcttttttttctctctccatatgccaaacagagctgttttgtagtcactcgccttgttctacagggtgcaaagccatggcccatggccactcgttgaccatgtcacgtttttttcgtttggtaagagtcttgtgttctgacgcttctcgaattgatattataagctgatcgtggttgttagggtgtgtttgaatttactagagctaataattaattagctaaaaatataccagtagaattagctagctaacaa

SEQ ID NO: 96568 - DNA, 1012 bp, Zea Mays
aatttgggtcaagcctttaaacgccgtacagcggataggataaggccatctcccataacggagagagacgaagagagcggaagcgaaagagcagcggcgcaaaggaaagggagccatgctcgcgtcgccggcgctcgccggcgcccactccttcgcggcgtccgtgtatggaagcctcctcgtcccctcgcctcccgtccccgcgccggcacgtcgcgcggcgctgtccgtcgtcgccaaggtcaaggtggccacgccccaggacgaccgcatcgcccgccacgtccgcctccgcaagaaggtaggaatctgcgccagaaccaaccaagtttttagaatctttctccttctcctcctttcttcgtacgaatgtgggcgtcaatcagtgtgcacgaattctggcgaggacattttttcactctgcattcgattgtgctagtggtgtggggggcattggcaatgccgtgccacctagctgttcgacgaagtggttctcttggagtgtagcctaagaagaacctatcggctatagagtttccgatatggatgcaactacgactacgagttttactgctagtttatcccagttgtcagtcttacatacccctttccaggtaagtggcaccactgagaggccgaggttgagtgttttccgctcaaacaaacatctgtacgctcaagtcatcgacgacacaaagcaatgtactctggcttcagcttcaaccatgcacaaatctctctccaaggaatttgaatactcggctgggccaacgatccatcattggaaactaggtgataaattatgtggtaagggctaaggacttcaatgtgcaattaattatctatgacccaatcagatgtatatactctgtaacgacaatttcagattacatggtctgaggtactcctactttaaacacggggcttgtttcttctagattgtgtaatcactacaaatatgcatgcattcctgatttctccacaagaatagacacgaccttatgcctctgat

SEQ ID NO: 96569 - DNA, 1383 bp, Zea Mays
gaaagctacaggcaaattggcttctggatcattcgaatgctgaataccatgccaatatgccatgaatcaatctgctcaggcagctgcataactgttctgagagctttgggctgctataagtacagacagaacgagaagcaccggctctaacaccattcatctcagattcagaagccttcaacttcaaatccttgcattttgaagtttttgcagttttctgactcttgaggatggaggctattcttgaaagaccgaagtacgagtgcttgctgtttgatcttgatgacactctgtaccccttcagtgctggcatcaatctagcttgtcgcaaaaacatacaagattacatgcggcaccacctgcatattgaagaaaggcaggttgcagatatgtgcctggacctgtacaaggaatatggcaccacaatggctggccttaaggcattaggctacgaatttgacaacgatgagttccatgcaactgttcatggtaccttgccatatcacaacctgaggcctgaccctgttttgaggaccctcctactttcaattccacagagaaaaatagtgttcacaaattctgacaaagctcacgcggaggaagctctgtgcagacttggtttacagggttgcttcgatggcgtgatctgcttcgagacactgaatccctgcaatggtccgagcgcgttccgagacggcaacggcatgctgttcccagatgaaacgttccccgactcggctgatctgaatgaatccgatgggttcagacccatatcacccatcctctgcaagccctccattgaagccatggaagctgtaactcggattgcaaacgttgatcccaagaaaacaatattttttgacgacagcactcggaacatagcttcgggaaaggcagcaggcttccatactgtgattgttggcaggccgacacttgttccaggggctgaccatgctttggagagcattcacaacatgaaggaagctctacccgagatatgggacggccaggatcggtctgagtctgatgctcttctttctcccactgctgtcgagactccggtggctgcttgaatctgggggctatgtatccttcctgcgctaccatgagacctgctaccaatagttttgggtttggatagtggatgcagaaggtgtaccctagtagcttcattaatgagaaatagcattgcactcttatgttagttccaaatattaatggaactgtatcagttacattacagcagcgtgagctcaagtcgctgaacaagcaatatgcagtcagtattctgcagatgttcgcaccattctctatgtaccatgattgtacctcagaataaactgacagtactccaattctaccaagcttcaaaggcttacgatt

SEQ ID NO: 96570 - DNA, 1381 bp, Zea Mays
gttctgcactagggaacttttgttattaaacacactagggaaacattggtggctgatataatttggcatgttttccctccaagaatttttactctttgtgctttccagattcatttacttttgatttgtgtagtgtagctgaaatatctgaaatatgcaatgcaagcaattcttttgtgaggtgacggcatacttttaggtttccgattgctgttacgcaatgttaaaaatagtaataacataagcatgaactatcataagatgtgactggtctttgcttgaaatgtgaccttatcccagtcctccaaatctatggtacaccaatagttaagaggttcattgaaaaacatgtttgttttttttaacttatgttggaattgcatagccatcaatcatatttgcatctatggtgctaatacaactccaaacccatccagactcttccacgaatgtgtgtatcaatcattgctatgtaagaaatggcggtgatgttattgtcattaaaagtggctgggatgaatatggcatttcatttgctcaaccaagctccaatatcagcataagcgacatcacaggggagacaaggggtggttcagggattgcctttggaagtgagatgtcaggtggcatatcggaagtacgggctgtgggcctccgcattgtcaactcccttcacgggatcagaatcaagacggccccggggcgcggagggtacgtggagaatgtgtacatagcagatgtgagcatggacaatgtttcgatggccatcaggatcactggaaactatggtgaacatcctgatgacaaatatgacagcactgctctccctgtgataagcaatattacaatcaaggatgttgttggcgttaacattggggttgctggtatattggaaggcattcagggggacaatttcagcaacatttgtctgtccaatgtttccctcagtgtgcaatctgcacatccatggaattgttcacttattgaagggtattcgaactcggtgatcccagaatcatgcgaacagctcagaagcaattgtagacagacatccatttgctacgatggaagcagttcttcagtaatgagtgtgcagcaaccaagacatacatcgcccaccagccggttgctagatctttttactggagttggcttcattttagtgtaggtagagctgtgcttgttcttgctgcaaagggggcttgcttcatgtagtgagagccctattagtcatgtatatctgattcttgcaattatttgtgattagagtgccacttgcttcatgtatatagctgttgagatgactgtcggtgtatctttgcctgttttgttccaatttttggtatgtgaatgcaatctgcataactttatggttttgaac

SEQ ID NO: 96571 - DNA, 1804 bp, Zea Mays
gattgattaactggttgatgggcctgctgccggctcgtcggtgttgcaggcgggtccatacacggcggggtgctagctaagggagaggtgccggcgtcggcgtcggctgcgaggagcaggagcagcaggccaccgacggattcggagatctcgccggagaagatgaagagatctgcatctctgtttcaagtccttctggttttcacagccgtgattgagatccaatggtccactgtatccagcatttactgcaaggacatgccgccgaacgtgtatcggcctcacagtgtcacaataactgaatttggtgccgttggggatggtgtcaccctcaatacaaaggcattccagaatgcaatcttctatctcaattcatttgcggacaagggtggcgcgcagcttttcgtgcctgcgggaaggtggttgacggggagttttcatcttatcagccatctcactttatcactggacaaggatgcaataataattggatctccggattcatctcattggccagttatcgatcctcttccatcctatggtcgaggtagagaccttcctggaaaaagacatcagagtctgatttttggattaaatctgacggatgtaattataactggtgctaatggttcaattgatggtcaaggagctatttggtggggctggttccacaaccacacattgaattatactagaccacatcttgtggagttgatgtattctaccaatgtcgtcatatctaatctaaccttcaagaactcgccgttttggaatatccaccctgtgtactgcagccaagtgcttgtccggcatgtcacaatcctagcgcctttgaattcgccaaacaccgacggcgttactccagactcttccacgaatgtgtgtatcaatcattgctatgtaagaaatggcggtgatgttattgtcattaaaagtggctgggatgaatatggcatttcatttgctcaaccaagctccaatatcagcataagcgacatcacaggggagacaaggggtggttcagggattgcctttggaagtgagatgtcaggtggcatatcggaagtacgggctgtgggcctccgcattgtcaactcccttcacgggatcagaatcaagacggccccggggcgcggagggtacgtggagaatgtgtacatagcagatgtgagcatggacaatgtttcgatggccatcaggatcactggaaactatggtgaacatcctgatgacaaatatgacagcactgctctccctgtgataagcaatattacaatcaaggatgttgttggcgttaacattggggttgctggtatattggaaggcattcagggggacaatttcagcaacatttgtctgtccaatgtttccctcagtgtgcaatctgcacatccatggaattgttcacttattgaagggtattcgaactcggtgatcccagaatcatgcgaacagctcagaagcaattgtagacagacatccatttgctacgatggaagcagttcttcagtaatgagtgtgcagcaaccaagacatacatcgcccaccagccggttgctagatctttttactggagttggcttcattttagtgtaggtagagctgtgcttgttcttgctgcaaagggggcttgcttcatgtagtgagagccctattagtcatgtatatctgattcttgcaattatttgtgattagagtgccacttgcttcatgtatatagctgttgagatgactgtcggtgtatctttgcctgttttgttccaatttttggtatgtgaatgcaatctgcataactttatggttt

SEQ ID NO: 96572 - DNA, 1993 bp, Zea Mays
actgctctctgcctcaatgcccgccccagcctcccaccctctcactccagtcagtccctcccagcggctcgccagccacctgctcctccagtcctctctccatccctctccggctctccgcctctccccctcgtgaggaggtgaggagaggagaagcaacagagggggccgcggcgaccgaccgaccgaccgacgtgtcctgagtcctggtgctggtggtgggtgcttctcgttcctggcgggtccatacacggcggggtgctagctaagggagaggtgccggcgtcggcgtcggctgcgaggagcaggagcagcaggccaccgacggattcggagatctcgccggagaagatgaagagatctgcatctctgtttcaagtccttctggttttcacagccgtgattgagatccaatggtccactgtatccagcatttactgcaaggacatgccgccgaacgtgtatcggcctcacagtgtcacaataactgaatttggtgccgttggggatggtgtcaccctcaatacaaaggcattccagaatgcaatcttctatctcaattcatttgcggacaagggtggcgcgcagcttttcgtgcctgcgggaaggtggttgacggggagttttcatcttatcagccatctcactttatcactggacaaggatgcaataataattggatctccggattcatctcattggccagttatcgatcctcttccatcctatggtcgaggtagagaccttcctggaaaaagacatcagagtctgatttttggattaaatctgacggatgtaattataactggtgctaatggttcaattgatggtcaaggagctatttggtggggctggttccacaaccacacattgaattatactagaccacatcttgtggagttgatgtattctaccaatgtcgtcatatctaatctaaccttcaagaactcgccgttttggaatatccaccctgtgtactgcagccaagtgcttgtccggcatgtcacaatcctagcgcctttgaattcgccaaacaccgacggcgttactccagactcttccacgaatgtgtgtatcaatcattgctatgtaagaaatggcggtgatgttattgtcattaaaagtggctgggatgaatatggcatttcatttgctcaaccaagctccaatatcagcataagcgacatcacaggggagacaaggggtggttcagggattgcctttggaagtgagatgtcaggtggcatatcggaagtacgggctgtgggcctccgcattgtcaactcccttcacgggatcagaatcaagacggccccggggcgcggagggtacgtggagaatgtgtacatagcagatgtgagcatggacaatgtttcgatggccatcaggatcactggaaactatggtgaacatcctgatgacaaatatgacagcactgctctccctgtgataagcaatattacaatcaaggatgttgttggcgttaacattggggttgctggtatattggaaggcattcagggggacaatttcagcaacatttgtctgtccaatgtttccctcagtgtgcaatctgcacatccatggaattgttcacttattgaagggtattcgaactcggtgatcccagaatcatgcgaacagctcagaagcaattgtagacagacatccatttgctacgatggaagcagttcttcagtaatgagtgtgcagcaaccaagacatacatcgcccaccagccggttgctagatctttttactggagttggcttcattttagtgtaggtagagctgtgcttgttcttgctgcaaagggggcttgcttcatgtagtgagagccctattagtcatgtatatctgattcttgcaattatttgtgattagagtgccacttgcttcatgtatatagctgttgagatgactgtcggtgtatctttgcctgttttgttccaatttttggtatgtgaatgcaatctgcataactttatggttt

SEQ ID NO: 96573 - DNA, 2078 bp, Zea Mays
caatcgttgagcacaaggtgacggaagagctcatatgtaacagtccagtcgtcaaagaaagcagctttaccagctgcactgcgctccttgctgtctcccctgttctaaggtgcgagagagagagagaaaaaaaaaaggagcatgcatcgcatttctaatctaatacgatagtcatccactttgccgcgcataatgctcgtgctttcccactttgtacttaaattgcaaaagctcctgtctcccaccccttccttccccactgccgtttgcttggccatctccagctcactcccccctcgctagaggtagagcctgctctgctcagctcagccgcatccttgcctccactgcaaagatctctctcccttcttcaatggcatctgcctgccctcttactctcagattcctcttctcctgcatcctccttcaaacaatctgctgttcaggagtatctgtggagctatcatacgattcagcacaggtcaaggcgctgtccagctcagccgtcaccgagtacagagtcacggtcaccgacaagcggcgtgcctattacgtcttccagaagccgtttgtgtgcagagacaagccatgcagatcgtcggagcctatcgccgccgccggctcatttgtcaacgaggctattgctggtgccaaacggcatgagccagaggcaaacggcgagctcgccgtggttgcggagatcgaaggggccggcgtcgtgccccacgtcaagagccgtgtggctccaagcgcggtggcaatgagtagcggccgggagaagaggctcttgggtgtcctggtcgacgtgccctcccctcggcgggagctcggcgaggcaagagccacggcgcgcgacgagttctctccggtcagcaacccggcgacgactcccgtgagcaacccagtcaccgtgccggccaccaacccgatgcccccgggcttcgtcaccgtgccatcgaccaacccgggcaacgggatcgcgaccaacccgaacctgccgccgttgtacccggagccgacgacgccgggcaccatgcccatgcctgacccgacgacgacgcccgtgaccgtgccacccgccttcacgaatccggtcgccgcgccgaacaccatgccggggacggcggtgacgaacccggcgacgacgccgacgcagttccctggctcgtcgcctgtcaccaacccggtgaccacgtatccgtacccgcagcagggcggcatgccggcaacaacgccgccagcggtgtaccagcctccggcgacggcgatgcccggcacggtgcagccgggcgcgccgaccgtggcagggcaggcggcgtggtgcgtcgccaagtcggggctcatggacaccgccctccaggacgggatcgactacgcgtgcggcgtcggcggggccgactgctcggccatccagcccatgggcgcctgctacaaccccaacacgctgcaggcccacgcctcctacgccttcaacagctacttccagcgcaacccgtcggcggcgagctgcgacttcggcggcgccggcatgctcgtcaatgtcaacccaagctcaggaacttgcgtgtaccagacaccagcaggtttcggcgccggttacagcccggggacgacgggcgtcggtgtgcctagcggttacactccggggatgtcgggcgccgtgggagggggctccggctccacggtgctgaacgccaacgaccccgggggtaactccatgtacgacgacggctacgacaacccgacggggctcaccgccggctcggcgtcgctgtcctgcggcggccgggtcgtcgtgtgcctcatctggatggtcacctttgcatttgtcagggagaaaatgttgtagagcccacctcgagctgctggaaggaaataggatcacactgctgtcacatgtttgtttgttaatcagttgtgtcgtgctgtacatatacgatcgagtgagtttctcatatgcgagatgagatgacgagtacatgttttttatgtcggttgtacaggagtggattcaaagatgaaaatgggattggagcaattcaaaaaaaaaagtttaaaaacagaggaaaaaattaaaa

SEQ ID NO: 96574 - DNA, 2298 bp, Zea Mays
caatcgttgagcacaaggtgacggaagagctcatatgtaacagtccagtcgtcaaagaaagcagctttaccagctgcactgcgctccttgctgtctcccctgttctaaggtgcgagagagagagagaaaaaaaaaaggagcatgcatcgcatttctaatctaatacgatagtcatccactttgccgcgcataatgctcgtgctttcccactttgtacttaaattgcaaaagctcctgtctcccaccccttccttccccactgccgtttgcttggccatctccagctcactcccccctcgctagaggtagagcctgctctgctcagctcagccgcatccttgcctccactgcaaagatctctctcccttcttcaatggcatctgcctgccctcttactctcagattcctcttctcctgcatcctccttcaaacaatctgctgttcaggagtatctgtggagctatcatacgattcagcacaggtcaaggcgctgtccagctcagccgtcaccgagtacagagtcacggtcaccgacaagcggcgtgcctattacgtcttccagaagccgtttgtgtgcagagacaagccatgcagatcgtcggagcctatcgccgccgccggctcatttgtcaacgaggctattgctggtgccaaacggcatgagccagaggcaaacggcgagctcgccgtggttgcggagatcgaaggggccggcgtcgtgccccacgtcaagagccgtgtggctccaagcgcggtggcaatgagtagcggccgggagaagaggctcttgggtgtcctggtcgacgtgccctcccctcggcgggagctcggcgaggcaagagccacggcgcgcgacgagttctctccggtcagcaacccggcgacgactcccgtgagcaacccagtcaccgtgccggccaccaacccgatgcccccgggcttcgtcaccgtgccatcgaccaacccgggcaacgggatcgcgaccaacccgaacctgccgccgttgtacccggagccgacgacgccgggcaccatgcccatgcctgacccgacgacgacgcccgtgaccgtgccacccgccttcacgaatccggtcgccgcgccgaacaccatgccggggacggcggtgacgaacccggcgacgacgccgacgcagttccctggctcgtcgcctgtcaccaacccggtgaccacgtatccgtacccgcagcagggcggcatgccggcaacaacgccgccagcggtgtaccagcctccggcgacggcgatgcccggcacggtgcagccgggcgcgccgaccgtggcagggcaggcggcgtggtgcgtcgccaagtcggggctcatggacaccgccctccaggacgggatcgactacgcgtgcggcgtcggcggggccgactgctcggccatccagcccatgggcgcctgctacaaccccaacacgctgcaggcccacgcctcctacgccttcaacagctacttccagcgcaacccgtcggcggcgagctgcgacttcggcggcgccggcatgctcgtcaatgtcaacccaagtgagccaccaacgatactgaaatctgctacgcattgttttggcacatctaacactcgcattgggtttttgccaaccaaccttatttatttgcaggctcaggaacttgcgtgtaccagacaccagcagggtaagagtggatccatgatccatccatcggtccatctcaaaatcccatcttgccatcacccatcagcatgatcattatcacccacacgccatagatgacagatgcagtgtgccgcgcatggctgtgttctgactgcatcgatgctgcaactgactcgtgcagtttcggcgccggttacagcccggggacgacgggcgtcggtgtgcctagcggttacactccggggatgtcgggcgccgtgggagggggctccggctccacggtgctgaacgccaacgaccccgggggtaactccatgtacgacgacggctacgacaacccgacggggctcaccgccggctcggcgtcgctgtcctgcggcggccgggtcgtcgtgtgcctcatctggatggtcacctttgcatttgtcagggagaaaatgttgtagagcccacctcgagctgctggaaggaaataggatcacactgctgtcacatgtttgtttgttaatcagttgtgtcgtgctgtacatatacgatcgagtgagtttctcatatgcgagatgagatgacgagtacatgttttttatgtcggttgtacaggagtggattcaaagatgaaaatgggattggagcaattc

SEQ ID NO: 96575 - DNA, 1005 bp, Zea Mays
atgatgacgacgatgatgaacagaactcacgccgagtccatcgatccctggcaacgcgctaaccaagctagtagctagcaagcatcggccatgtccaagccaaggttggacgggaaggtggccatcgtgacgggcggcgcgagcgggatcggcgaggcggcggcgcggctgttcgcctcgagcggcgccacggtggtgatcgcggacgtgcaggacgcgctgggggaggcggtggcggcgtcggtggggccccggtgcgcgtacgcgcggtgcgacgtgacggacgaggcgcaggtggaggcgacggtggcgcgcgcggtggcggcgcacgggcggctggacgtgatgctgagcaacgccggcgtgctgctcccgacggggtcggtgatggacatggacctggcggagctggaccgcgtgatggccgtcaacttccggggcgccgcggcgtgcgtgaagcacgcggcgcgcgcgatggcgtccggcggcggcgccatcgtgtgcacggcgagcgtggcgtcgctgcagggcgggttcggcccggcgtcgtacacggcgtccaagcacgcgctgctgggcctggtgcgcgccgcggcgggggagctgggacggcacggcgtgcgcgtcaactgcgtgtcccccggcggcgtcgccacgcccctcagctgcgcgctcatgggcgtggggccccgcgagctggaggccatgacggtgccgcacaacgtcctgcaggggaaggtgctgcgcgccgaggacgtcgccgaggccgcgctgttcctcgcgtccgaccaggccgccttcatcagcggacacaacctcgtcgtcgacggcgccaccaccgccgtcaaccccgccgtgctgcacaccgtcgggctgtgaacgacgagcgctcgctgcgacagtagatacatatatactccacaccttcaatgccatgtttcatctttttcttttctttgtttgtttgcattggttgccatcaagaaaactgcttttgttagctca

SEQ ID NO: 96576 - DNA, 1812 bp, Zea Mays
ctagctctcccgatcctctcctgcctgtatcgcatagtcacaggctcacagcacaacgcctgccaaacctgcagccaccgatcgagctacgagccacctagtccggtagtccctgcagtagccatgtccaaggccttcgccaagtcgctgtcccagctgaacaaggccctggtgaggaggctcaaggccctcgtcgtcgtcacccgcgcgcagccgcctgcgccggcgaggccgacgacgtggtcggacgcgctgccgtcgccgtcgggcggcggcggcggcgtcgccgtgtgcaaggtggagggcggcctgctccggtcctcctccgccttcccgtacttcatgctggtggccctggagggcggcgggctcgccagggcgctgctgctcctgctgctctaccccgccctgcgcctgctcggccacgacaccgcggtcagggccatggccgtggtcaccttcctcgggctccgcaaggacgccgccgcgttccgggcgggcagggcctcgctgccccggctgctgctggaggacgtgagcgccgaggtgttcgacgcggccgtggcgccgccccgccgccggtgcgtctgcgtcagcgccatgccgagggccatggtgcagccgttcctggccgagtacctcggcgtcgacgccgtcgtggcgcccgaggtgagggagttcggagggtactacctgggcgtcatggaggacgagagcgaggtgctgcgtcggctggacgtggacaaggtgatcgccggagacaaaaaaggtggtggctgtggcgtcttcggcgttgctggactcggctcctcgttcgaccagctcttccaaaatcattgcaaggaggtatacgcgccgaccgagtcggcgcggcggcgatggcacgcgctcccgcggcggcgctaccctcggccgctcatcttccacgacggccggatcgccttccggccgacgcccggcgcgacgctggccatgttcatgtgggtgccgctgggcgtggcgctcgccgtggcccgcgtcgccaccttcctggccctcccgttctcgctctccgtgcccctgctcgccgccctcggcatgcacagccgcgtcatcgccaaccccgcctcggcgtccaagagcctcttcgcctgcaaccaccggtccctgctggacccgctctacgtggccgcggccgcggggcgcaaggacctcgcggccgccacgtacagcatcagccgcctctcggaggccctgtcgccgatccccacgttccgcctcacccgggaccgcgcggcggaccgcgccgccatgcacgcgaggctgcggtcgtgcggcggtctggtcgtctgccccgagggcaccacctgccgcgagccgtacctgctgcggttcagcccgctgttcgccgagctcgggcacgacgtggcgcccgtggcgctgcactcgtcggtcggcatgttccacggcaccacggcggccgggtggaaggcgctggacccactgttcctgctcatgaaccccacgccggcgtacatcgtgcacttcttggacaccgtcgacgtcgagtgcggcggcccggaggcggcgcgcgccgtggcgaacgagctgcagcggcgcatcgcggaggcgctcgggtacacgtgcacggggctcacgaggaaggacaagtacctcatgctcgccggcaacgaaggaatcgtcgacgtcagccacggcggcggtggcgccaagaagagaactacttgtgctacctagctagttctgaattttcattgcaggctttcacccgcttcagtgaatgaaggataacagttctatagatatataaca

SEQ ID NO: 96577 - DNA, 2186 bp, Zea Mays
atggtgaggctgaccggtgggcccaactgtacaggagacaaaagactacaggtcatcatcacgggatctcccgacggaacggaacggatatataacaagcctagggctaggggtagccaggcccaggaagagagagaaggttctccaagtcaatcgcaatcacgaagagtcatcacgccatacgacacggaggacaccgagccggaggcgaagtcggtgcgcagcgcgagagtagcggcgagtcggcaaccatcaagcaactgcatggccgcggtacccgccagcgcccccgccgccgccgaggcggcggagctcgtgccgacgctctcctcgctggagccggtctacggcgcgggcgcgcagctcgacgagtcgcgcctccgcttcgcccgcctcggggaccgcttccacgccgtctacggcgcccgccccgcgctcttcgcccgctccccagggagggtcaatctgatcggggagcacatcgactacgagggctactcggtgttgccgatggccatccgccaggacatgatcgtcgccatccgaagggccaacggcgcccaggtgagggtcgccaacgtcgacgacaagtaccccctctgcgtttaccccgccgacccagacaaggaaattgacgtaaaaaatcacaaatgggggcactatttcatgtgtggatacaagggagtttatgaatactgtagatcaaaagggatagatctgggcaaacctgttgcgcttgacgtcgttgttgatggcacagttcctcaaggctctggactgtcaagctcagcagcatttgtctgttcagcaacaattgctatcatgggaatccttgacaaaaactttccaaagaaagaagttgctcaattcacttgtctgtctgagcgccacattggaacgcaatctggcggcatggatcaggctatatctatcatggcgaaacctggattcgctgagttgatagattttaatccaatccatgcaactgacgtccaactaccttcaggtggtacatttgtgatcgcccattgtttggccgagtccaagaaagcagagacagctgcaacaaattataataaccgtgttgtggagtgtcgcttagcagcgattgttcttgccatcaaacttgggatggataggaaaaaggctatctcctccgttacaaccctctccgatgttgaggggctatgtgtttcttttgctgggagagaaggttcatctgatcctgcagtagctgtgaagaaacttctgcatgaggacccatatacagctggagaaatagagaaaattacaggagaaggcctgacatctgtcttccagggctctcagacgtcattggatgttataaaagcggcaaagcactacaagctatttcagcgtgcgacccatgtctactctgaagcaaggagggtttatgctttcagggatactgtctcttcaaaactcagtgaggaaggcaagcttaagaaacttggtgatcttatgaacgagagccattacagctgcagcgtgctatacgaatgcagttgccctgagctggaggagcttgtgaaggtctgcagagacaacggagcactgggagcacgtctgacaggagctgggtggggtggctgcgcggttgctctggtcaaggagcccatcgtccctcagttcattctgaaactaaaggaaatgtactacaaatcaaggattgacaggggagtaatcaagcagggcgatgtgggcctatacgtgttcgcatccaagccgtcgagcggcgcggccatactgaggttgtaggcaggcaggaaggcagaggcagccgctattcttttcacgagtgtggtggccctgtaaaacatggaataaagttgccatgaacaccgaacccttgtagtagcgttgaattatctcagacaacacgcgcattaaattgatatctatctacaggagtaacacacgagcgaaccatgctgttttaaatcctctttcttgctattctcgtttttcgttggttcaccggccatttcgtggagttgtttccagtaacgtaaaatataacgatacgtagataaaactatcaccctcgaagtataattttcttttcttagatatttaagtaatcctgtcactcatcttgagttggtaatcgatccatgcattgtcctataaaattcggtctcagtgagaattacacataagtttta

SEQ ID NO: 96578 - DNA, 2123 bp, Zea Mays
atggtgaggctgaccggtgggcccaactgtacaggagacaaaagactacaggtcatcatcacgggatctcccgacggaacggaacggatatataacaagcctagggctaggggtagccaggcccaggaagagagagaaggttctccaagtcaatcgcaatcacgaagagtcatcacgccatacgacacggaggacaccgagccggaggcgaagtcggtgcgcagcgcgagagtagcggcgagtcggcaaccatcaagcaactgcatggccgcggtacccgccagcgcccccgccgccgccgaggcggcggagctcgtgccgacgctctcctcgctggagccggtctacggcgcgggcgcgcagctcgacgagtcgcgcctccgcttcgcccgcctcggggaccgcttccacgccgtctacggcgcccgccccgcgctcttcgcccgctccccagggagggtcaatctgatcggggagcacatcgactacgagggctactcggtgttgccgatggccatccgccaggacatgatcgtcgccatccgaagggccaacggcgcccaggaaattgacgtaaaaaatcacaaatgggggcactatttcatgtgtggatacaagggagtttatgaatactgtagatcaaaagggatagatctgggcaaacctgttgcgcttgacgtcgttgttgatggcacagttcctcaaggctctggactgtcaagctcagcagcatttgtctgttcagcaacaattgctatcatgggaatccttgacaaaaactttccaaagaaagaagttgctcaattcacttgtctgtctgagcgccacattggaacgcaatctggcggcatggatcaggctatatctatcatggcgaaacctggattcgctgagttgatagattttaatccaatccatgcaactgacgtccaactaccttcaggtggtacatttgtgatcgcccattgtttggccgagtccaagaaagcagagacagctgcaacaaattataataaccgtgttgtggagtgtcgcttagcagcgattgttcttgccatcaaacttgggatggataggaaaaaggctatctcctccgttacaaccctctccgatgttgaggggctatgtgtttcttttgctgggagagaaggttcatctgatcctgcagtagctgtgaagaaacttctgcatgaggacccatatacagctggagaaatagagaaaattacaggagaaggcctgacatctgtcttccagggctctcagacgtcattggatgttataaaagcggcaaagcactacaagctatttcagcgtgcgacccatgtctactctgaagcaaggagggtttatgctttcagggatactgtctcttcaaaactcagtgaggaaggcaagcttaagaaacttggtgatcttatgaacgagagccattacagctgcagcgtgctatacgaatgcagttgccctgagctggaggagcttgtgaaggtctgcagagacaacggagcactgggagcacgtctgacaggagctgggtggggtggctgcgcggttgctctggtcaaggagcccatcgtccctcagttcattctgaaactaaaggaaatgtactacaaatcaaggattgacaggggagtaatcaagcagggcgatgtgggcctatacgtgttcgcatccaagccgtcgagcggcgcggccatactgaggttgtaggcaggcaggaaggcagaggcagccgctattcttttcacgagtgtggtggccctgtaaaacatggaataaagttgccatgaacaccgaacccttgtagtagcgttgaattatctcagacaacacgcgcattaaattgatatctatctacaggagtaacacacgagcgaaccatgctgttttaaatcctctttcttgctattctcgtttttcgttggttcaccggccatttcgtggagttgtttccagtaacgtaaaatataacgatacgtagataaaactatcaccctcgaagtataattttcttttcttagatatttaagtaatcctgtcactcatcttgagttggtaatcgatccatgcattgtcctataaaattcggtctcagtgagaattacacataagtttta

SEQ ID NO: 96579 - DNA, 1813 bp, Zea Mays
tgtttttttaatatttgtctggtaaaatatatggagacatggtcattatggtttgctgataaacatgtggaaatcgatggtatagtatactacttactagtttactactttgtcgcacatagtttcataacacttcacctttttcttactcttttgcaggattgaaaagattgagtccttggaaccatttagatgcgcagaaagaatgcagataattcttgaagacaatgacaatgcgaagatgaagttagttttatggggagagcagacttcacttgcaaatctgtgcagtgtagggagcatgcttgcactggacagacctttcatagcaaattttatagacaataatcatgaggattctcaggaactgtgccttgaatatggcagtgcaacacaggtttacatggtgccaatcgctcaacaagaggaacaggtgccttttacacctacccaagtaaagagccaaggacctcggctgtcatgtgttctgactgataatgtagcttcgcaagtaacattaccacgtgatttgtatggttcagttgatttcagcaaatacccgtttcgagcatatgtaagtgaccttcatgataaaatggtgggaatcagtctgtttggtaccgtaactagtgtttgcaaagtaagcacatcagggactacgttctatttggagttggaagacacaacaggagttgttctgatgaagcttatctttgttggaccctggtcattaggtagagtaggagttgggcatatggtgtacatctccggtttgacttgtgccttgagttcaacaaatatccttgaagtctcatggcgtgaaaaggagccagggtctctgtttgttaacttaagcttgctgccagcactcctaaactcatcgtgcctgcataatttatcacccttgtcagatcttccccgttcgacaaacagaacacatatatcccatgttcggttagatggcatcgattgtgacagtttaaaggtgtcgctgttccacaacatttgcggcagtgttgtgaatgaacattcaggtgtactccagtgttcattctgtaagtgtgcctgcgaaagtgtatgtgcgcgtggctttcagctgcacttgaccatcgcagacgacagtgcagatgtcttggcttggtgcgttgggcaaacggctgtcgagttccttcagatatctcctgacgaatacctagagctccccgaggatgaacgggcaatgtatctctacactctccagaacgaaagctttgtggtggctatcgcgaataccaggaagcgagtcgatggatgtgctgtgggtgatgaagccgtcccagcttgggagatcacgagagcccagaaatgcgaatgagttcgtatagcgctcgagaaagaaatgctgatgctgaaaagttactgtaacacgtgtttcaacctccgtttttcatcaaccaattcgtcgttcagcaatgcagccatatgcatgagttgtccattgactccaaatgatgcttaagcacgatggttaggatgggttcttcgttgacaaagtccgagagtaagacgtcgacgaaggcatagcgtttaactttaagatgggttcactactgaaaaatttcggttgttcttcattcatgttgacaataggttatttgcttggcaacgtagccagccgacttcagatttatctgaaactgtgccttttacatctagggacttgtacccagcaaacaaacgctgcccaccgcggttgagttacggagtgtttggttgtctgattaaaaggttattttgtgtcacattaaatatttaaattttaattatgagtttt

SEQ ID NO: 96580 - DNA, 2608 bp, Zea Mays
ggttgtagcggcgccattactttcgttcacttgttctcactcagctcttcccgtttcccgccctcgctcctcctggactagggttcatggatcccgacaccgccgtggcctccgcagacggggggccattcctagagttcgtagactatgccatctccatgctctcctcgtccgctggcgacggcgatggctatgagtctccgggggacgggccggcgccggcgcggccgccctgggggtgggcggtggcgcagctgctcaagtcctgctgcgcctactccagcggcgtcaccgccgccatccttctctccgacctcttccaagttacgttgtttcgactcgctgcgtggtagtcattggatcgattttttatctgtaccgagtccatgctacgtctcaatttgcacacatttccgtaagctggcgcgggcatttgtttatgctttgtgttcggctcgaatttgaagcaaatgtcaatgccatgaaggagttttaagctctgcagcaataacagcttcggctgctgctgcagcagcttctgctgcctggttatatagaaaggaaatactgtagcgatagtgtacatttgcagctgcaaccctttgaaaaccagcagccgaacagcttctacagaaaatttgtacaaaggcaatatgaaccgttttttggttattactatttttttttgtacagccgaaagtaggattgaatcttggcttctcttgttagtcttggacagaacagcggaaatccctgaccctgaagaggaaggtcaagctgcccaaacttataaacacgaagaataagaggaggaggcttccaaatactgtcacgatcgattctatccacgagaagaacttcctttctcccaatagtgtccttgaagttgttgtcattgccgtgtttgtccttcctggtacaaacatatacatgcttaccttgggagacatgtggagcgcatccacaatcgacatatatctacaccgaaggtactatgactgcataggacaaaatggtatattgaagaagggtcgagaagttatgctcacaggatgttgtcttcgtacagccatggagggatctggccatgctcgtattttgccaacagaatacatggtgatattactggatgaggaacaagatgaagatgccttgctacttgctgcacaattttgcaactattcattctcttctttgattctagaggaaagtagaaacaatgttccgtactcattttatgccaggattgaaaagattgagtccttggaaccatttagatgcgcagaaagaatgcagataattcttgaagacaatgacaatgcgaagatgaagttagttttatggggagagcagacttcacttgcaaatctgtgcagtgtagggagcatgcttgcactggacagacctttcatagcaaattttatagacaataatcatgaggattctcaggaactgtgccttgaatatggcagtgcaacacaggtttacatggtgccaatcgctcaacaagaggaacaggtgccttttacacctacccaagtaaagagccaaggacctcggctgtcatgtgttctgactgataatgtagcttcgcaagtaacattaccacgtgatttgtatggttcagttgatttcagcaaatacccgtttcgagcatatgtaagtgaccttcatgataaaatggtgggaatcagtctgtttggtaccgtaactagtgtttgcaaagtaagcacatcagggactacgttctatttggagttggaagacacaacaggagttgttctgatgaagcttatctttgttggaccctggtcattaggtagagtaggagttgggcatatggtgtacatctccggtttgacttgtgccttgagttcaacaaatatccttgaagtctcatggcgtgaaaaggagccagggtctctgtttgttaacttaagcttgctgccagcactcctaaactcatcgtgcctgcataatttatcacccttgtcagatcttccccgttcgacaaacagaacacatatatcccatgttcggttagatggcatcgattgtgacagtttaaaggtgtcgctgttccacaacatttgcggcagtgttgtgaatgaacattcaggtgtactccagtgttcattctgtaagtgtgcctgcgaaagtgtatgtgcgcgtggctttcagctgcacttgaccatcgcagacgacagtgcagatgtcttggcttggtgcgttgggcaaacggctgtcgagttccttcagatatctcctgacgaatacctagagctccccgaggatgaacgggcaatgtatctctacactctccagaacgaaagctttgtggtggctatcgcgaataccaggaagcgagtcgatggatgtgctgtgggtgatgaagccgtcccagcttgggagatcacgagagcccagaaatgcgaatgagttcgtatagcgctcgagaaagaaatgctgatgctgaaaagttactgtaacacgtgtttcaacctccgtttttcatcaaccaattcgtcgttcagcaatgcagccatatgcatgagttgtccattgactccaaatgatgcttaagcacgatggttaggatgggttcttc

SEQ ID NO: 96581 - DNA, 2572 bp, Zea Mays
gtgccacacacacagccacgcccgtcggcccgctaggccgctactacccagaaggatggcggcggcggtggtggtgaggcgtgccgctggccttatccctctcctctcctcgcggttcggtgctcgcatgcccctccaccgggcgctatcccagatccctccgcctcgcttctgtcgcctactatcgcagcaaaccaagcccttctccgcctccgcgtcgaatggcgcggctacggacagaacccgcgagctgcgtctgtacaacaccaagtcgcggaagaaggagcagtttcggccgcgcattccaggcagggaggtcggcatgtacgtctgcggtgtcaccccctacgatgacagtcacatcggccatgcccgcgcatacgtagcctttgacgtcctctacaggtacttgcgctatttggactatgaagttcgctatgttcggaacttcaccgacattgatgacaagataattgcaagagcaaatcagctgggggaagatccttttagcttaagcaaaaggttctctgatgacttcttgtcagacatggccaatcttcaatgtctaccaccatccgtggagccccgtgtttcagatcatgttgatgagattataaatatgattaaacagatccttgataaccgttgcgcatatgtagtgggtggggatgtttatttctctgtagacaattttcctgagtacggagaattatctggtagaaagttagatgataatagagctggtgagagggttgctgttgatgagaggaagagaaatccagctgattttgctctatggaaggctgcaaaagatggggagccatggtgggatagcccatggggcccaggaaggccaggatggcacatagaatgcagtgccatgagtgcacattatttgggtcattcttttgacatacatggtggtggggaggatctcatctttccacaccatgagaatgagattgctcagagtcgtgcggcatgttgtgacagtaccataaattactggatacacaacggttttgtgaatgtaaacagccaaaaaatgtctaaatcacttggtaattttgttaccatacgtaaggttatagagatgtaccacccgctggctttgagaatgttcttacttggcacacactataggtccccaattaactacaccatagaacaactcaatgttgcatcagatagattgtactacacgtatcagaccttgcgtgattgtgaagagatctgtcagcatcaacaaagcaacactggaaatccattgcctgctaataccttaaattacatccagaaacttcatgatgaatttgagacctcaatgtcagatgatcttcacacttcagtggcattggctgctatgtctgagccattgaaagttatgaatgatctgctgcacactcgcaagggaaagaaacaggacaagaggttggaatcgctttccgccttagaagagaaaataagagtagttctctctgttctaggattgctaccttcaagttatcatgaggctttgcaacagctgcgggataaagcactgagacgagcttccatcactgaggagcttgtggtacagaagattgaagagaggactgcagcaaggaaggcgaagcagtatgaaaaatccgacgagatccggaaggaattggctgctgttggaatcgccctcatggatggccccgacggaacaacttggaggccatctttaccacttccagaggaggaagcggtgcttgctaaaacatgatgtgcgccgactttaggatcgagtcgagtatataggggtgattaatcttgttttaaaaagttaaatgcgtctgctagcagaaataaatgtgaatttagttagttgctctagtcaagactacggctctttatctatactagatctatgcccgtgcgttgccacggaaaacacatgaaatcgttatgtgtggtactacaaatcaaacaaagtgaaaaacattaaatatttattcacacgatattgtaaataaaacaacatatcatagcaacagtgagagatccatccatgccacaaacgagcataggagagagctggagtgtgccttttcatcaccttcttgacactggcagcatctactaacaaacgactactaattaactactactactattattatttatgcctactactcactcactatcatatacttatcataggcctaagagctaaaaaaacaacctggacttgtttcttctctgttgctgtcttcactgtcccctccttaagattacacctctccaaaggtatttcttttttctttgtcaaagcttctctacgctcggttgatagggccggccatcatgtagccatattagtagtcccctgcgcacaacagcccgtcaacacacagattatgaccatcatgattcaggatctatgctggcatatatatgcatcatggtcatggaagcagcagctagcttattattaatggttacagcactatcagaaagataggcacaaggagagctattgttgacacttactcccagattagaggaatggagggccccccttcccctttttttgctctatgcacct

SEQ ID NO: 96582 - DNA, 1883 bp, Zea Mays
cacacacagccacgcccgtcggcccgctaggccgctactacccagaaggatggcggcggcggtggtggtgaggcgtgccgctggccttatccctctcctctcctcgcggttcggtgctcgcatgcccctccaccgggcgctatcccagatccctccgcctcgcttctgtcgcctactatcgcagcaaaccaagcccttctccgcctccgcgtcgaatggcgcggctacggacagaacccgcgagctgcgtctgtacaacaccaagtcgcggaagaaggagcagtttcggccgcgcattccaggcagggaggtcggcatgtacgtctgcggtgtcaccccctacgatgacagtcacatcggccatgcccgcgcatacgtagcctttgacgtcctctacaggtacttgcgctatttggactatgaagttcgctatgttcggaacttcaccgacattgatgacaaggaaacctgagttgcacttctggaattatgtagataattgcaagagcaaatcagctgggggaagatccttttagcttaagcaaaaggttctctgatgacttcttgtcagacatggccaatcttcaatgtctaccaccatccgtggagccccgtgtttcagatcatgttgatgagattataaatatgattaaacagatccttgataaccgttgcgcatatgtagtgggtggggatgtttatttctctgtagacaattttcctgagtacggagaattatctggtagaaagttagatgataatagagctggtgagagggttgctgttgatgagaggaagagaaatccagctgattttgctctatggaaggctgcaaaagatggggagccatggtgggatagcccatggggcccaggaaggccaggatggcacatagaatgcagtgccatgagtgcacattatttgggtcattcttttgacatacatggtggtggggaggatctcatctttccacaccatgagaatgagattgctcagagtcgtgcggcatgttgtgacagtaccataaattactggatacacaacggttttgtgaatgtaaacagccaaaaaatgtctaaatcacttggtaattttgttaccatacgtaaggtaaaagaagcactccaatcttcctcaagtaatgactgtacctttgctttctcaaggactgccattttcctcaggttatagagatgtaccacccgctggctttgagaatgttcttacttggcacacactataggtccccaattaactacaccatagaacaactcaatgttgcatcagatagattgtactacacgtatcagaccttgcgtgattgtgaagagatctgtcagcatcaacaaagcaacactggaaatccattgcctgctaataccttaaattacatccagaaacttcatgatgaatttgagacctcaatgtcagatgatcttcacacttcagtggcattggctgctatgtctgagccattgaaagttatgaatgatctgctgcacactcgcaagggaaagaaacaggacaagaggttggaatcgctttccgccttagaagagaaaataagagtagttctctctgttctaggattgctaccttcaagttatcatgaggctttgcaacagctgcgggataaagcactgagacgagcttccatcactgaggagcttgtggtacagaagattgaagagaggactgcagcaaggaaggcgaagcagtatgaaaaatccgacgagatccggaaggaattggctgctgttggaatcgccctcatggatggccccgacggaacaacttggaggccatctttaccacttccagaggaggaagcggtgcttgctaaaacatgatgtgcgccgactttaggatcgagtcgagtatat

SEQ ID NO: 96583 - DNA, 658 bp, Zea Mays
aacaaacagagaagacaggcagcggcagggcggcagcgcccacctccatctcccagccccgctccccaaatctcagccccgctccttcccagtcccaggatgtcctcctccgacccggacgacgcccccgacgggggcgaggactcgcccctcttccgtcgcagcggggggccgtcctccggcggcaccgttggcgacgtccccgtctcgcagtcgctcatcaaggcggcaagcaacgtgtgcttctccctcttcgtgctcgccgtcctcgtcgtcaccgtcgtcgccgtcacataccagccgccggacccctggctccagtcctccgccgccatcaccacctcgctctcccgcgtcctccccaactccaccttcctcgtccccgacgactcgctcctccccaccggcgaggatttcaactcctccaccgccgtcccagccccggtgcgggatgaagatgacgcggctgcggccgtcagcgccgcctccgccgcggccgcgggcaacaggacctgcgacccggacctgcgacccggattcgcggcggggggagtgcttcgcgcgggcgcttcgcggcgggcggcgtgcgtgtggtaggtgaggagttcggtagcggctggcgtgcgggagtcgcggcggctggcgtgcggcgggcggt

SEQ ID NO: 96584 - DNA, 2130 bp, Zea Mays
attttgttttttattaaaaaagggttccccacagcaccaagcgcgacgtgagcgaggaggcaggcgcgcacggcgtctcggcgtcgcaccgaacccgacacggctcggcctacggcccccacacatccggctgggccgttccgttccgtttcgttcccttcccattcttctcgtacgcggccgattgcgaccctcgctcgccctcgcttccccaccacagcaccgaaactgccccgcctccgcagccgccgcccgcgcccgctcgtcctccccgcgccgcctcggggacgccccggtcggcgatgtggcgggagcatgctaggcccgctcctcaggctcctctcggcgtgcggcggggtctggcccacctcgccggcccccggcgccgcggcctcctcttccgcctcctccggggacgactctgagggccgcgacggccttctctggtggcgcgacctcgcgcgctgccacgccggcgacgtctccgtcgccgtcgcccaggccaaccaggtgctcgaggaccagtgccgcctcgactccgccccgtccatcggcaccgtcgtcggcgtcttcgacggccacggcggccccgacgccgcccgcttcgcctgcgaccaccttgtccccaacctccgagaggcgtcctccggcccgcggggcgtcaccgcagacgccatcagggaggccttcctggccacggaggaaggattcctcgcgctcgtgtcaagcctctgggaggcccagccggacatcgccacggccgggacatgctgccttgtcggcgtcgtgcacaacaggacccttttcgtcgccaacctcggcgactcccgggccgtcctcgggaagaaggcgggccgcgctggccagatcgccgcggagcagttgtccagcgagcacaatgccaaccaggaggctgtcaggcaggagctcatggcgcaacacccagatgatgctcagattgttgcgctcaagcatggggtctggagagtgaggggcctcatacaggtgtctagatcaatcggtgatgtatacctgaaacatgcaaagtataacacagaccagatcaaacccaagttcaggcttcccgaatcattcagcaagccactattgagtgccgatccatctatcatctcccgcgatcttgaaccaaatgactgtttcatcatattcgcatcagatggattgtgggagcacctcagcaatcaagaagccgttgagattgttcacagccatcaacgtgctggaagcgcaagaagactcattaaagccgctctacaagaagcagcgcggaagcgtgagatgcgttactcggatcttacaaagatcgataagaaagttcgcaggcatttccatgatgacattactgtcatcgtcttatttataaactatgacctattattgaaaggtgctccgcagggacaacccctctccatcagatgtgccctagattattgacagtgagctagttcacccactggtattcaagctcctgcgggcagccatatccagagtcagctgacatggtcaaccggttgtgaaaagcgcacaacctccggcaccagtttccttttcgtttccccttttttgcacataaaattgacaagtcgctgaaattgccagttttcccctcttggattatgtcggataaaatgcgtatactcttcggttttggagatatatgtctagactctagagcgtgagggaaggttataaagtcttgtatgtctttgttctcttgcagtcttgcttacagttacagctagctctttttgtatgtaacaattgtcagcaatcagcatgtttaaccacctccgtgacgttttacagcgacctggtcacggtactccacaccgtcatgagcataaattctttacgacttcaaggcttgaaagcaaacagctggtgggcttgtgccagtgaggatctgcagaattctctcctttttttcataaaatgtccaattgttctaccagaattctcaaactagacagttaccgaatgtttcttttgtttaattcactgccttttgcattcattcacacacatcacagtcctccaaccagccatggttttcaacgtgcccatgaaatgaaaagaaacggaaccggaaaagccacagtttccagctct

SEQ ID NO: 96585 - DNA, 1406 bp, Zea Mays
ccgcatcgatcaccctcctcgctcccggtcaacagcagcggcgcagagcacgacaccgacacgcgccatggcggcggtgaggcaccggcagctggaggccaacggcatcacgatgcacgtcgcggaggccggccccgtgaacgcctccgcgccggcggtgctgttcgtgcacggcttcccggagctctggtactcgtggcgccaccagatgggctacctcgccgcgcgcggctaccgctgcgtggcacccgacctccgaggctacggcggcaccaccgcgccgccggaaccgaactcctacaccgtcttccatatcgtcggcgacatcgtcgcgctcctcgacgccctccacctcccgcaggtgttcgttgtcggccacgactggggcgccatcgtgtcgtggaacctctgcctgctgcggccggatcgggtgcgcgcgctcgtcaacctcagcgttgccttcatgccccggaggcccggcgtcaagcctcttgagtacttccgcgccgcatacggggatgagtactacgtctgccgattccaggaaccaggactcgaagcagaatttgctacgtttgacttgaagagtttcttcacattggcattgactcttcgggcaacaggttcttcagctatggaccttcgaaaaatgcaaacttacagtaagcaaatggtgctaccttcttggctatctgaggaagatgtcagttaccttgcaagtgtgtactcaaaaactggatttgctggtggagtaaattactatcgctgcttggacctgaactgggaactgatggcgccatggacaggagcaaaggtgcaagttccaaccaagttcatcgttggggacggtgacctggcgtaccatcaccctggagtgaagaggtacatccacaagggcgggttcaagagggacgtgcccatgcttgaggaggtggtggtcatcaagggcgctgggcacttcatccagcaggaaagagcgcaggaaatcagtgagcacatccatgactacatcaagaagttcgaagcttgtggtctgccgccactgagagtttcaaagctgtgagagacctgatggcttctgtacataactcaaatggtctgggagctattgtagttgtttgtagtgctgcagatctatatattatgaatggtatgaagtactgacgatctattcaagggacccacgttgcgttgtgctgtgtggggggcactggtccccacttaattttcttgtttcagtggacatcttattttatttgatgtagctacaaaggttcattagggcatgtacaatccaaaaaataatttgtatcatatgaaatctaagagggtaagtgaaaaaacaggatatgtatattggttaaaggacgtttttagcacggttctctaagagcaactctaaaaga

SEQ ID NO: 96586 - DNA, 1136 bp, Zea Mays
atccgtgaacgtgtatatatatctacgtgcgtgcgatcaggttatgctgcacagaccgatcacatcgtcactcactgcttcgttcgttcatccatcaactactggaaattagagagccggatctctcggtcggagaagctagaattaaaaagtacctgcgaggaaggactaaggagtcgaagatggctgcggcggtgctgtccgtgcgcacgacgacgacgtcgctgctagcagcagtcgtcctgtgcctctgcgtcgtctccctctcctcccgtggcgccgccgccgcgcgggtctcccccggcgccagcccgatcgtggccacctgcatgacgggcccgtacccggagctgtgcgtggcggagctggggcagcggctgctggacgtgcagacgtcgatcgcgtccgcggcgcccgatcagcgcgcggccaggatcgcgggcgccccggggcaggtggacgtcagagcgctggtggccgtggcgctggaggcggcctcggaagccggcgccgtcgcggtgtccatcttcgagggcaagctccccgggttcaacaccggcgtgcccgacttccgccgctgcctcggcaactgcaccgtcaccatgcgcagcgccatgcagaagctccacggcgccaccgccgcgctgcactcgggcgacacgcaggtggccaggacgctcgcgatgcgctctgccgccgacgtctcgtcctgcaccgtcagctgcagggagctcaacggcgacgtgcgcctcatcgtcgtgcagagcctcaccgagttcaccaagatgctccagatcgccgtcagcttcatcagcaagatgaagccgcttccaccgtcagctccagcgcgaactgccacgccatgatcacctacatatgcgcagcgtggttcttctaactaagagagcgggatcgagaagaaattgaagccgctaataattagccatcgttctctagagttcctttcttcgtttgttttggtgtgtgttccttttccccgtttttttttttgttttagtgtgagttctctcttctgtaaataagatgcaggtttcatggccattgtgcctggctctggttgtgaacctgagaatgagattacatgttttctttctgattcaagaaaaaattgtgaa

SEQ ID NO: 96587 - DNA, 96 bp, Zea Mays
cgttgctctctctcgaatatcccctgaccaactgtttgcgttatctgttttgcaacctacttggcttcaaaccatctctgatcagcacgttcagca

SEQ ID NO: 96588 - DNA, 836 bp, Zea Mays
attcctgtcggcaaggtgaacgcgagagccgaccgtctcagtgtgcgcgcgaagaagagaaggaggaggaggaggaggaagaagaagaagaatgtatccggccaagcccaccgtcgcgaccgccagcgagccggtaaccgggatggcggcgccgccggtgaccggcatccccatcagcagccccggccccgccgtcgcggccagccagtggtcctcgggcctctgcgcctgcttcgacgactgcggcctctgctgcatgacgtgctggtgcccgtgcgtgacgttcgggcggatcgcggaggtcgtggaccgcggcgcgacgtcgtgcgcggccgcgggggccatctacacgctgctggcctgcttcacggggttccagtgccactggatctactcctgcacgtaccgctccaagatgcgcgcgcagctggggctccccgacgtcggctgctgcgactgctgcgtccacttctgctgcgagccgtgcgcgctctgccagcagtacagggagctcagggcacgcggcttggaccccgcgctcggctgggacgtcaacgcccagaaggcggccaataataacgccggcgccggcatgacgatgtacccgccgacggcgcaggggatgggccgctaattacgctaccagctccatcggtaaactcatatgttgttgtgttgtgtcagccagatcatcgcgtacgtacgggtatacttgtgatatgtaatgtcagggaccggcatgcccatgtgtttcaagatatttcacgttcaagtcctttctgtctgctcactatccgaatgaaaaccattttccttgaatctgaatttttttttct

SEQ ID NO: 96589 - DNA, 763 bp, Zea Mays
attctagctactatagctagctatagctatttcttctcgcctctcccaccggcccggtcgcccggagtagcaagcgtctccgatccgatccatcgtgcgagcatatccacggcgatggaggcgagagcggccatgagctggtactgcggctcccttctggccgtggccatcgcgctgttcctgtccgtgtccctcggcgtgcgcgccgccggcgccggcgccggcgttgacatcaaggtgtcgtgtgcagcgacgccggacccggacgtgtgcctgcgcgcgctccaggcggacagcgactccaagaccccgcgggacctggcggaggcggcgctccgcgcggcgacgacccgcgggcggcgcggcgggcgactacgcgcggcacgagatggacgtggtgaaggacaacgacatgtggcagtgcctgaacgagtgcgccggggagatcgaggaggcgctggaccacctggacgacaccgagggcggcctcgacgacggcaagctccacgacgtgaagctgttcctggacacggcggaggaggacacgtggtcctgcgacgtctgctgcaagcacgccccatccacgcccgtcaaaaccacgctgctcgccaagaacaaggacttcgaggcgctcatgcgcgtcgcccacgcgctcatcaagcgggccaccggtggcgccggtgacgcgccggcgccggcgcccgccgcccgcgccaagattcattaattgattattaattcgttgattaatccgcggagcgcc

SEQ ID NO: 96590 - DNA, 567 bp, Zea Mays
atggaggcgagagcggccatgagctggtactgcggctcccttctggccgtggccatcgcgctgttcctgtccgtgtccctcggcgtgcgcgccgccggcgccggcgccggcgttgacatcaaggtgtcgcggacagcgactccaagaccccgcgggacctggcggaggcggcgctccgcgcggcgacgacccgcgggcggcgcggcgggcgactacgcgcggcacgagatggacgtggtgaaggacaacgacatgtggcagtgcctgaacgagtgcgccggggagatcgaggaggcgctggaccacctggacgacaccgagggcggcctcgacgacggcaagctccacgacgtgaagctgttcctggacacggcggaggaggacacgtggtcctgcgacgtctgctgcaagcacgccccatccacgcccgtcaaaaccacgctgctcgccaagaacaaggacttcgaggcgctcatgcgcgtcgcccacgcgctcatcaagcgggccaccggtggcgccggtgacgcgccggcgccggcgcccgccgcccgcgccaagattcattaa

SEQ ID NO: 96591 - DNA, 1186 bp, Zea Mays
atggcgttctccttgcgatgccagtatgccacccccaaccgtagcaccaacggagtaaattttggccgctcaaagtttgaaaccgtctgcgttgaccgttttgccgtggacgtcgtccgtacgctcggcctcgacgtgcgtgcatgcatgcatgcatgcagctctgcaaacctccctggcctcacgtcacgctacaagaccgagaagaacgacacctccaatggtcccagccctctacgagacgacgacctcgatcgcgttccctgtaacgccaccaccaccgtcaccgccatcgctcgcccggatcgcgtcaacatggcagcagccctccgtgtcctcatcgccgtcctcgcggtcgtctcggtctctctccggcgcgccacggcggccacggtccccaccgtcgtcgacgaggcgtgcaagcagtacaccaagtacccggagctgtgcgtcaagtccctgtcgtccgcggcgccggaggcgaaggcgaaggcggagcggggagggctggcggggctggccgggctggcgctggcgcaggcggcgcagtgcggcgccgagacggtggcgttcgtcaagggcctggagaaaatgccggggggcatgccgcccgtgtgcctgaacgagtgcgtggccaagttccagggcgcgctggtcgacctgcagcggtccaaggtggcggtgcagaaggccaaggacgaggccgccgtcgacacgtggctcacggcggcgaaactcgacggcgactcgtgcctgagcgactgccagaaggtggagggcggcggcgagatgcgcatcgtcgacaagatcggtgacctcggcaagatgtgctccgtcgccatgtccctcgccgatgcttctcatcgtaaccacaccgcgtccgccgccgccgcctgagaggataattaagacgtgcaagatgtgctggatcggatcgcccggccggcgcatgcttaataatctgttatatgctcccgttgttgcatttcttgaacggattggagtgtctgtgtctttgcgtactccctcagtctagagtcacaatatacttatacatgttgttaaggaataaggatggagggggatctttctatctgtgagaacaaagttacactggctatacaaatataatgtccacaaatccgatttgaaaagggttttttaattaatactgagaagcggttct

SEQ ID NO: 96592 - DNA, 2361 bp, Zea Mays
gatagggcatgtcgggtctggtgggaaaccctttcatcgtcctcctgcgtcgccagagcggagcaacgaggggcgcgcgcgatggcaggcggcggtctccagggagcgaagaagcgcaagcgcgagcacgcggaagggaaggcaaagcctcggaagcaagtcaagggaggcggggacggagcgaagcggaagagccactcggccgccggcggctacacggcccatggcggcgccggcgaagttgtcgcgaggaagaagaccccggttacccccaaggagaagcgcctcgcggccaaggaaatgtcggaggccaggaagatgaagaggaggcagcattacagccttgagaaggaactaacgaaattgtgggaaaagatgagatgtcacgatgtgagcaaagaggagaggtccaaggcagtaagtcaggctatccataaaatggatgggaaatatttggacattgccacatcacatgttactgcacgtgttcttcaaacatgtgtaaagtggtgctcggagtcagagagggatgctatctttgatgttctacagccacatttgcttaccctttcttgcaagaaatatgccgtttttcttgtaaagaagcttatagaactcgcctctaaaaaacagtttgccagtttcatatcttcccttcatggtcgtgttgccaaccttcttcatcatactattggagctgcagtcgttgattatgcatttcagcgaggaacacaacgtcagaaaaggcaattgttagttgaactgtactcccctgaacttcagctattcaaggatctgactgtgcaaagttcctcctgtttgatagatacaatttccaagcttgggttgcagatatcatctgtcctgcttcatatgactattgtgattgataaaatcttggagaaaggtactgttgagtacttaatagtgcacacggccatattggagtactttacaattgcagataagacctcagcctcggatgctatttgtcaacttatcccccttcttactcaaggggcattaatcatagatggagatgaacctacaaacgctccagaactaccaaagaaagcaaaagctaagaagaaaaggtcgaaagagccacttattgttcggatcatgcagacaagggaaggattaaaactaggaattagttgcgtcaagtatggcagtgcaaaggacaggaagaagattattaaaagtttgaagggccacattatgaagcttgctctaagtgattttggatgtctttttcttatctgcattatttctattgttgatgacacaaagcttgttaataagattgtcattcaagagctggtaaaacatttaaagcagctcatttttgacaagaatgggagacggccattgctgcaactacttcaccctttttgctcacgctatctttctccgaatgatctagcttgtctgaactacaatgtgccttctcttagttcaacagaggttgagacatcagagagtgctataggagttataacagaaaataaattagatgatgtgactgctcaagatcccaatggcttagaaggcaagcaaattgtgtttgagagcaagaaggatccattacaaaggcgacatgaactgttgataaaaagtgagcttgccgaggctctcgttcagtcatgcattgaaaatgttggagaattacttcgaacaaattttggcaaagaagtattgtatgagatggctgttggtggtaaagacaacgttctggatggcctcaccgataggatccacatgttgcacgatgcaatagcgtctgatgcggcccaaccgaagactgaagatacggaacatgcatttgaaaacttcttttccagccgtgtaatcagaagaatggtaatcgattgcccagcgtttgcagtcactctctggagaaaggctcttcaggggaagtgcaagatatgggctgaaggacacagttcgaaggtggttgcgagtttcctggagtcgccaagtacggaggtcaaggatcttgcaaaacctgagttgcagccgctggttgatgctggcatccttaaagtgccagaccctaaggttgttcaaaaatgactcgtgcgcgggggcctttttgcgccagtaaatgactcgaggaccatcccttgtttaagggatacggataggttttttgaagctcgttctgccgataaaaattgttaaatcactcgttcgtgtgtacgccagtccgttgtacacataccctggatatatggtgaatcggatacgttattttgttttaaactcggaatgctcctttttatctataaatttttttaggagatttgtgttcttgtcctgctttggaaggccaaaaattattttactcttgtttttttt

SEQ ID NO: 96593 - DNA, 399 bp, Zea Mays
atggcacagatactgcaattctatccgtcagatccccttccctaccaacctcagcagacagctctaagaagtaagaccacaacacagcagcctactgaggtggcgaagagtaatcccgatgataccttgggcaagtactgcgcggtcacggaaggcgtcgtggaggtgagaaacctctccaaattccccgccgccgtggacgccaccgacggcttggacgaggtcgtcgacgaggagtcgtcagaatccacccgactgtccacatccgccgccgaggccagggcccccggcggcggcgggggcttctgccgtgccgaccgcggcgacggcgacggtgacggggacggggacgcggaccgcaaccgctgttgctcctgctgctgctgtcgacgtacgtga

SEQ ID NO: 96594 - DNA, 405 bp, Zea Mays
atggaggcacggaatttgtacggtgccagcccaaaggtaggcaaagatagcttcccagatgcagctgtgcagcggttgatccccccaaagccagggcatgctggcgtaggagggtcacaatctgcaagaacaatgagagtaagaactctacatgcaacagatgtgaaatctgaagttgcgtctataggggcaaaatgtcacgcgggtggccattgccatctgcccgaggcaaaagtaaaacccctatggcgctacaagtcacttagtatttacccttgcaaggcgttgctaggcaatggaatgtcaaaaaacaggcatcgagatccttcagtgttggccctgttggaattctatatatggggtacctgcaatcggaagcatgaggatgaaaccagtaacgtatag

SEQ ID NO: 96595 - DNA, 1369 bp, Zea Mays
gatgaatctactcccatttctctgcacgcagctcagtctcgtccatccagtgctgtagaattttctttggtctgttggcaaggcagccatgaaaccccctcagctgccggcaggggagggggcctcctgggctcacgaggtcaagcaggccctccgtgagaaactccggcgctcctacggcgccggagctgcctccgccacaccggaggccaggccggccggcgaaccaagccgtggcgctgagtgccgcggctcggcggccgaggaccccataaggagagtcatgttcttggctccctggggtcacacataagaacacaaaccggccggccgagatctgggcatgcaagcttgcatggccatgtcttggtcagtcagatctgcaaacaaccaaactgtaaaaaagaactggagcctgtcttgtaaatcatggagcttgctgctgcttgcacccatgaaaaacatgaacgcatggagagctggttaactagctaggtagatagatatatcatatatgggtatgatggtgtggatgagaataaaaaacaaggtacgtagtccatgtctctggtcttggggagtggctgtgagcctgtgagatcctgggaagttcatgcatggcatgagtcatgggtgtggtgggctcaagagggagatctgaaacttgtgtagccactacgaacttgttttccagaaatcttgtaagtaggggagcctgtgaataatctagaaaacaaatcttcctgctctgcgtgtccacctttgcttccaggttcagaagattcttcttctagtggtgatgctttatctctatgctctgtccaaaacttctttactgccttcttgatcttttcagctgttgggtggtttaatcctacagccatgagaggcaaacatgctcatgaactgaattcgtgttttcttcttgcaaagaaacgtctagaaactgacatggctggcaaaataatgcaacggctttgcatgtcaaggtgatttgattcagttggttgtgaagaaaggccattttcatttccttatgatctgctgggattttaggaaccatgaatccagccagctacgtgcccacggaagattaatgatctcaacacttgcaaatttgaagcaacaaacctcaaaagatctcgggagttcagtgaagatcaaagacaaaacctattaaaagctgcaccctgcgataaagctgagagcttcttttccaaatatatctttgcactatcatatggtttgctatatgtgcagtatcatttcgttgctataatttggacagaacacagaagtcacccaggaaaaaagaagaataaaaggagaccctttataaaactggactcctcttttcctatggattaat

SEQ ID NO: 96596 - DNA, 2695 bp, Zea Mays
ctgccttccgtgtctcccttccattctacggccacctcggcagggagcgttaaaagcgtcgcccgcgaagaacgtgggccagcgtcggctcgccgtctccctccctccttccagatctcggcgcgagttcacccttcagatttccatttccaacacgacggcgaagaagagctgcgatccggaggagtaaaccctacccgccggttgcccggtgcgcgggcgagatccgggcggagatctagggcgcggcgccggccatggcgagctccggactcgcttaccccgaccgcttctacgctgccgcggcttacgctgggttcggagccggcggggccacctcctccgcagctatctcccgcttccagaacgacgtcgccctcctcctctacggcctgcaccagcaggtgacgcgtcggccagtgtcagtgtgcttttgctgattttgtcgattgattcgggcctgggggtgaaattgcgtggatcttgcgtgagatagcctgagtttgtggtgtttgttgggattaaattgtgtcgtaagtttgctcttcgtccctcgggagagatttcgtttggttaacgatcgccaattcggttggtgatttttggtctctttttgatgcaggccacggttgggccatgcaatgtgcccaagccaagggcgtggaaccccgtggagcagagcaaatggactagctggcatgggcttggaagcatgccttcagcggaggcgatgcgtctttttgtcaaaatcctagaggaagaagatcctggatggtactctagggtccctgagttcaaccctgagcctgttgtagatattcagatgcataaaccaaaagacgagccacaaagtgtaccggcttcaacaaatggaacatcaatttcagaaccaaaaatcatttctgaaaatggaagttctgtggagactcaggacaaagatgttattctggaaggccttagtactgttatttctcatgatgagtggactccattatctgtcagtggtctccgtccgaagcctcgttatgagcatggagcaactgtgttgcaaaataagatgtatatatttggtggaaaccataatggacgttaccttagtgaccttcaggctttggatctgaagagtttgatctggtccaaggttgataccaaatttcaagcagaacctgctgactccactataaccacacaaattgctccatgtgctggtcattctttgatttcttggggtaacaaatttttatctattgctgggcatacaaaagatccatctgaaggcattacagtgaaggaatttgatccgcatacttgtacctggtcaattgtcaagacttatgggaaaccaccggtgtctcgtggaggtcaaacagtgactcttgttggaacgacactagttttgtttggtggtgaagatgcaaaacggtgtctcttgaatgacttgcacatccttgatcttgaaaccatgacatgggatgatgtggatgcaataggcaaccctccttctccaaggtcagatcatgctgctgcttgccatgctgaccgctatcttttaatttttggtggggggtctcatgcaacatgtttcaatgacctacatgtccttgatttgcagacgatggaatggtcaagacccaaacaacaaggcctgactccaagcccaagagctggacatgcaggtgcaactgtcggtgagaactggtacatagttgggggtggcaataataaaagtggtgtttctgaaacactagtgctcaatatgtcaactctgacatggtcagttgttagcactgtggaaggacgtgttcctcttgccagtgagggcatgactttagtgcatagcaattacaatggttatgattatctcgtctcttttggaggatacaatggacgatacagcaacgaggtttacactcttaaactcagcctcaaatcagattcacagccaattgtagaagaagaaactgtctcagatactatatctagggtcagagaacctgagaccgaaatttctcaagatgggaggatacgcgagattgccatggacagtgccgattcagacctgaataacagaaatgatgaagcaagtgaacagcttgtagcagatcttaaagctcagaaagaggaactagaagcaacaattaacagggaacagctgcaaactgtgcaacttaaagaagacattgctcaagcagagaccagaaatgcagagctgacaaaggaacttcaagctgtccgtggccaacttgcttctgagcaatcaagatgtttcaaacttgaggttgacgttgcggaacttcgacaaaagcttcagagtatggacgccctggaaaaggaggtcgagctgcttcggcgacagaaagccgcttcggagcaagcggcgctggacgcaaagcagaggcaaggttcgggtggtatgtggggttggctcgctggaagcccgccaccatcacagtagttcgtacaggccgtggttcatatattttacttgtaacattacatatcatttgacatttgtctacattttttttttgtcacatggcattcgtgtttcgttttgaccacacaaagaacaacgtgctctggcgagagttatattgtgctcatagagaatcgttaggttgccccctcacaatcactcaaatgtatcattaggttttaacaatgtactgatcatgtatgaacttccatttgacgt

SEQ ID NO: 96597 - DNA, 2477 bp, Zea Mays
ctgccttccgtgtctcccttccattctacggccacctcggcagggagcgttaaaagcgtcgcccgcgaagaacgtgggccagcgtcggctcgccgtctccctccctccttccagatctcggcgcgagttcacccttcagatttccatttccaacacgacggcgaagaagagctgcgatccggaggagtaaaccctacccgccggttgcccggtgcgcgggcgagatccgggcggagatctagggcgcggcgccggccatggcgagctccggactcgcttaccccgaccgcttctacgctgccgcggcttacgctgggttcggagccggcggggccacctcctccgcagctatctcccgcttccagaacgacgtcgccctcctcctctacggcctgcaccagcaggccacggttgggccatgcaatgtgcccaagccaagggcgtggaaccccgtggagcagagcaaatggactagctggcatgggcttggaagcatgccttcagcggaggcgatgcgtctttttgtcaaaatcctagaggaagaagatcctggatggtactctagggtccctgagttcaaccctgagcctgttgtagatattcagatgcataaaccaaaagacgagccacaaagtgtaccggcttcaacaaatggaacatcaatttcagaaccaaaaatcatttctgaaaatggaagttctgtggagactcaggacaaagatgttattctggaaggccttagtactgttatttctcatgatgagtggactccattatctgtcagtggtctccgtccgaagcctcgttatgagcatggagcaactgtgttgcaaaataagatgtatatatttggtggaaaccataatggacgttaccttagtgaccttcaggctttggatctgaagagtttgatctggtccaaggttgataccaaatttcaagcagaacctgctgactccactataaccacacaaattgctccatgtgctggtcattctttgatttcttggggtaacaaatttttatctattgctgggcatacaaaagatccatctgaaggcattacagtgaaggaatttgatccgcatacttgtacctggtcaattgtcaagacttatgggaaaccaccggtgtctcgtggaggtcaaacagtgactcttgttggaacgacactagttttgtttggtggtgaagatgcaaaacggtgtctcttgaatgacttgcacatccttgatcttgaaaccatgacatgggatgatgtggatgcaataggcaaccctccttctccaaggtcagatcatgctgctgcttgccatgctgaccgctatcttttaatttttggtggggggtctcatgcaacatgtttcaatgacctacatgtccttgatttgcagacgatggaatggtcaagacccaaacaacaaggcctgactccaagcccaagagctggacatgcaggtgcaactgtcggtgagaactggtacatagttgggggtggcaataataaaagtggtgtttctgaaacactagtgctcaatatgtcaactctgacatggtcagttgttagcactgtggaaggacgtgttcctcttgccagtgagggcatgactttagtgcatagcaattacaatggttatgattatctcgtctcttttggaggatacaatggacgatacagcaacgaggtttacactcttaaactcagcctcaaatcagattcacagccaattgtagaagaagaaactgtctcagatactatatctagggtcagagaacctgagaccgaaatttctcaagatgggaggatacgcgagattgccatggacagtgccgattcagacctgaataacagaaatgatgaagcaagtgaacagcttgtagcagatcttaaagctcagaaagaggaactagaagcaacaattaacagggaacagctgcaaactgtgcaacttaaagaagacattgctcaagcagagaccagaaatgcagagctgacaaaggaacttcaagctgtccgtggccaacttgcttctgagcaatcaagatgtttcaaacttgaggttgacgttgcggaacttcgacaaaagcttcagagtatggacgccctggaaaaggaggtcgagctgcttcggcgacagaaagccgcttcggagcaagcggcgctggacgcaaagcagaggcaaggttcgggtggtatgtggggttggctcgctggaagcccgccaccatcacagtagttcgtacaggccgtggttcatatattttacttgtaacattacatatcatttgacatttgtctacattttttttttgtcacatggcattcgtgtttcgttttgaccacacaaagaacaacgtgctctggcgagagttatattgtgctcatagagaatcgttaggttgccccctcacaatcactcaaatgtatcattaggttttaacaatgtactgatcatgtatgaacttccatttgacgt

SEQ ID NO: 96598 - DNA, 486 bp, Zea Mays
gtagagggaagactgaagagtgaaaccatacgtatagtgtcgcaagatgaggcgttgatagtccctcagcaaaggtcctagttcctgtagttgtagtgagcttgctggagaacttttccaatgatcacgaacacctgaattgatgcaacctggtcactagctggaagcgattgaccagcaagtctagatgacaattccacaagttctttatcattggcttcgtcaacaaaacttgctgaaacttcttcagaaagtgcaatccccagacgtttggccaattctgttattggattttctagagcttgtgactcctgcaaaacatattttagaatttatagaattttctagcacctgaagctttcgaagcgaacacacatgcaagcatgtacctttaggttcaatagctggttatcatcagtcacagtgctaggtttgctgtttgaatcgatgctaggaactaagtctcgtttcgcaataggatcgtct

SEQ ID NO: 96599 - DNA, 2009 bp, Zea Mays
gctatgacaactgtcgccgcgcacataaatgaaacggacgccgttcctcttctcccctcttccatagcatagcagagcaggcgcacggcgcaccgcacacctcactgccgctcccttctcgtctcctctcctctcctctcctcggcggatccggcaccgacccaccgcccctctgctcgctccttccgccggaatcgctgctcctctctgtgctgtcgatttgtgcggcgactgttagtttggttcggtcccatccttctgttgatcaatggctgacggtgaggatatccagccacttgtgtgtgacaatggcactggaatggtcaaggctggctttgctggtgatgatgcgcccagagcagtgttccctagtatagtcggccgccctcggcacacgggtgtgatggttggaatgggccagaaggacgcctatgtaggtgacgaggcacagtcaaaaagaggtatcttgaccttgaagtaccccattgagcacggtatcgtgaacaactgggatgatatggagaaaatctggcaccacaccttctacaatgaactgcgtgttgctcctgaagagcacccagttctgctgacagaagcacctctgaacccaaaggcaaacagagagaagatgacccaaattatgttcgagacattcaatgcaccagcaatgtatgttgctatccaagctgtcctttccctgtatgccagcggtcgcactacaggtattgtgctcgattctggtgatggtgtgacccacaccgtgccaatctacgagggatacgcgctccctcatgccattcttaggctggatcttgctggccgtgatctgactgactgcctaatgaagatcctcacggaaaggggttattccttcaccacgacggcagaacgggaaatcgtgagagacataaaggagaagctggcctttgtggccctagactacgagcaggagctggagaccgctaagagcagctcctccgtcgagaagagctacgagctgcccgatgggcaggtcatcacgatcggcgcggagaggttcagatgcccagaggtgcttttgcagccgtcgctgatcgggatggaagctcccggcatccacgagaccacctacaactcgatcatgaaatgtgacgttgatatcaggaaggacctgtacgggaacatcgtcctcagtggagggacgaccatgttccctggcatcgctgacaggatgagcaaggagattactgccctcgcgccgagcagcatgaagatcaaggtcgtggcgcctcctgagagaaaatacagtgtttggattggtggctcgatccttgcgtcgctcagtacgttccagcagatgtggatatccaaggatgagtacgatgagtctggccctgctatcgtccaccgaaaatgcttctgagctagctatctgccgcgcctttcatagcgtgtcaagctgttgagatctgcgttgttgagttgagtgtctctatggagtatcacatactttctgcatgaggggggaagagtatacccaactaagcgcatgcctttcggatgccctgcttcgtgattcagatgctgctttctttcaagtgatatgtcgatgtagtgtgcgagcaatgtatttggtttggctacagctgttcctgtcgtctgtgcgtaaaacattagctatgtatctatccatatctgcatatttgaatgtatggtcgttttctcatatggtgtcaagttaaaattcttatgttctcttattaaattttagttacccatatgtggccataatagccatgatatcttgtgaaagggtctttagctgggttggttggttggtctaataagtataatattttgtgaaaggggatttagctgtggtggttggatgatctgaataacacttctcctgtcctgagtttaaaaatatcttgtctgttattctagggacttttttttaatataataccaatgagctatcttatgagtttgttttgcacaaaaaatgaatcaaatttgacaaaagtact

SEQ ID NO: 96600 - DNA, 1440 bp, Zea Mays
atggccgtctttggtggaggtcccgtgcttgtcgccgtcgcgctggcatgcgcgggcctcgtcgtctggctgcggtcacggagctcctcttccaaggagatgggggacatcccgggcacgatggggtggccggtggtcggcgagacgttctccttcatctccgacttctcgagccccgcggggatcctgagcttcatgcgcgaccggcagaggcggttcggcaaggtgttcaagacgtacgtgctggggcgggtgacggtgttcatgacggggagggacgccgccaagatcctgctgtcgtcgggcaaggacggcgtggtgagcctcaacctcttctacacggggaagcaggtgctgggccccaccagcctgctcaccaccaacggcgacgagcacaggaagctgcggcggctcatcggcgagccgctctccgtcgacgctctcaagaagtacctgggcttcatcaacgaccttgccgtgcagacgctggacacgtggcacggccgcagcagggtcctcgtgctggaggaggcatcgtcgttcacgctcaaggtgatcgccaacatgctggtgagcctggagccggagggcgaggagcaggagaagttccgggccaacttcaaggtgatatcgtcgtcgttcgcgtcgctgccgctcaaggtccccggcacggccttccaccggggcctcaaggccaggaaccggatgtacgcgatgctggactcggtgatcgcgaggcggcggagtgggagtgagggcgaggcggccgccccgagcgacttcctgcagacgctgctgcggaagcacgccggcgacgaggccgacaagctgacggacgcgcagctcaaggacaacatcctcaccctgctggtcgccggccacgacaccaccacggcgggcctcacctggctcgtcaagttcctcggggagaaccccgacgttctggacaagctacgggaggagcacctggagatcaaggagagcctcaacggctcgtcgcgtctcaggtggtctgatgtcaacaacatgccttacacaaacaaggtgatgaacgagaccctgaggagagcaaccatcctgccatggtactcgaggaaagccgcacaggacttcagcatcgacgggtacgcgatcaagaaggggacgtcggtgaacctggacgtggtgtccatccaccacgacccggccgtcttcgccgaccccaaccgcttcgaccccaacagattcgacgaaacactcaagccgtacagcttcctggggttcgggagcgggccgcggatgtgccccggaatgagcctggcaaagctggagatctgcgtcttcgtccaccacctcgtctgccgatacacatggaagccactggaggacgacgacacggtgcagccgacgctggtgcggatgcccaagaacaagtaccccataatgccaaccgcgctctaa

SEQ ID NO: 96601 - DNA, 3024 bp, Zea Mays
ccctcccccagtcatccatcactccgcagcagctgcctgcccgcctccgcgtctgcgacgagatccggcgccggcagcgagctctggcagcccagcaggaataaatattggtattggtagtgtgatcttcataaggagtcaagatggtgaagttcacagctgaagagctccgtgccatcatggacaaaaagaacaacattcgtaacatgtctgttattgctcatgtggaccatggcaagtctacacttacagattcccttgtggcagctgctgggattattgcccaggaagttgctggcgatgttcgcatgactgatactcgtgcagatgaagcagagcgtggcattacgatcaaatctactggtatctctctttactatgagatgactgacgagtcactgaagaactacaagggtgagagagatggtaatcaatacttgatcaaccttattgactcgcctgggcacgttgatttttcttcggaagtcacagctgctcttcgcatcaccgatggtgctctggtggtggttgactgtattgaaggtgtatgtgtgcaaacggaaacagtgcttcgccaagcccttggtgagaggattaggccagttcttaccgtgaacaagatggacaggtgcttccttgagcttcaggttgagggcgaggaagcttatcagactttctcccgtgtgattgagaatgccaatgtcattatggcaacgtatgaagataagctccttggtgatgtccaagtctacccagagaaggggactgttgccttttctgctggcctgcatggttgggcatttaccctcactaactttgccaagatgtatgcatctaagtttggagttgatgaatctaagatgatggagaggctttggggtgagaacttctttgaccctgccacaaagaagtggaccaccaagaacacaggttctcctacctgcaagagaggatttgttcagttctgctatgagccaatcaagcaaatcatcaagacctgcatgaatgaccagaaggagaaattgtggcccatgctgcaaaagctcaatgttaccatgaaggctgatgagaaggagttgattggcaaagctttgatgaagcgtgttatgcaaacgtggcttccagctagcactgctctgcttgagatgatgatattccaccttccttccccagcaaaggctcaaaagtatcgtgtggagaacttgtacgagggaccccttgatgatgtgtatgcaactgctatcagaaactgtgatccagagggtcctcttatgctgtatgtttcaaagatgattcctgcatctgacaagggcaggttctttgccttcggtcgtgtcttctcagggaaggttgctactggtatgaaggttcggatcatgggtcccaactatgtccccgggcagaagaaggatctgtatgtcaagagtgtccagcgtactgttatctggatgggaaagaagcaagagtcggttgaggatgttccgtgtggtaacactgttgctatggttggtctggatcagttcatcacgaagaatgctacactcactaatgagaaggagactgacgcttgcccaatcagagcaatgaagttctccgtctctcctgttgtgcgtgttgctgttcagtgcaaggttgcctctgaccttcccaagctagtcgaaggtttgaagcgtctagcaaagtccgatcctatggttctctgtacaatggaagaatctggtgagcatatcattgctggagctggtgagcttcatcttgagatttgcctgaaggatctgcaggaggacttcatgggtggtgctgaaattattgtttccccacccgtcgtctccttccgtgaaacggttcttgagaagtcctgccgtactgtcatgagcaagtctcccaacaagcacaaccgtctgtacatggaagcgcgccccttggaggagggtctcgctgaggccatcgatgacggccgtattggcccacgtgatgatccgaaggtgcgctcccagatcctctctcaggagtttgggtgggacaaggacctggccaagaagatttggtgttttggacctgagaccactggcccgaacatggttgtcgatatgtgtaagggagtgcagtatctcaatgaaatcaaggattctgttgtggccggtttccagtgggcatcaaaggagggtgcactggctgaggagaacatgcgtggaatttgctttgaggtatgtgatgtcgttcttcatgctgatgctatccacaggggtggtggacaggtcattcccactgccaggagggtcatctatgcttctcagctcacggccaagccaaggctgctggagccagtgtacctggtggagatccaggccccagaaaatgcactcggtggtatctacggtgttctgaaccagaagagaggtcatgtctttgaggagatgcagaggccgggcaccccgctctacaacatcaaggcttacctccctgtcatcgagtcctttgggttctccagccagctgagggctgcaacctctggtcaggcgttcccccaggctgtctttgaccattgggacatgatgggctctgatcctttggaggctggctcccaggctgctcagctggtgctggatatccgcaagaggaagggtctcaaggaacagatgatcccactttctgagtttgaggacaagctctaaatttgtggttgttggttacactgttacagctgccggttcaatcgtcaattggttttactgtaaatgcagtgtgtgctgctgtgcggacagtctgatgctctattttaatatctgttaagctatctccagcagcttactcatcccacccgttatcttaaactccatgctgatgagacagttggtatatgtggtcttgtaagtggttgtatacttattcccagtgtgttgctcacttctaatgctctgcctgatctgtccgagaatttcacccttttgttggtttgtttccttgccttttccatgtgaagtgtgtagtcatttttgcagcactattggtttatgtatcgat

SEQ ID NO: 96602 - DNA, 102 bp, Zea Mays
ggtaagagctcgccaagttgaagaaggcatccatggcttaatcgagatttattgtttgtatatatcttatcataacatttttacttcgtagcaacacatgaa

SEQ ID NO: 96603 - DNA, 189 bp, Zea Mays
gtgcaaacaaagactagaccatacaggtaggcaaaaacgaaatacttgtcgcagcacaagccagttgctacaccattgtcagtttgtcactaaacttggaacgacaaagaaacttaagcagacactgtagccactaactccatattaccttgcagtggcctcgaactaacggttgcctttgtagcacct

SEQ ID NO: 96604 - DNA, 875 bp, Zea Mays
ataaatgacaagacaagtaaatttgtctcaaatttagtgattgctcctcattgcaattagttcagtcatatagatctaactcggtatgggtatcctcttgttcccagtacgtaacacttcagctatggtctgttttgacagatgcaccagcacatactcacattttactagagcgcaggcgatggtaaaactactgcagaaattgcaccggcggcaacagtttgttatttgctccgacggcacccataagcggagcagcttattagagttaggtttgggatccgaccctaccgccacttcatttcatcattgcagttctccgacaggcgcttcgttgagccacaagaaatggatgaagtcatacagcttagcactcacgcttacctgttcaggcgtcgggttcagccgcctcatatggtctggcctcattcggtccagatggtgaatacaccgagtcctaatctcatggatggatggaagctcctcccgttccatacatgaatttccaggccagtagcacttcaataattcctcaacatgctgtggaacaacgtacgctctctttgattcattgaaagggtgacgacataggagcctttcaccaatctataaacgaatggtaaatcataaaacccaccatctgtttcagatttcgtaaaatagtaactatggcatacaaaatcacaactgaaaaaaataacaagcaaatgttttttttacgcaggctcagtggctcactgactgtatttataagcattgacatgaatattgtttacctttggacctggctcatcttctccggtcattatatcaaccaacggatacccttctttgccatacaatctgtagcattttttcttacatggtatcgatac

SEQ ID NO: 96605 - DNA, 1065 bp, Zea Mays
gtccctaaattctctgggcccaacgtctccctccactccccttgtcggccttcgccgtccatttcaaaaacccgcgaaaccaaagcacggcgtcacgaccgcagcatccccagaggcggcaaggcggtctctctcgggcccgggcaccagaggcgatgtcgtcgtcggcgaaggccaaggccaaggcgagcggcggcaagcgggctgcggcggcgaaggaccccgccgaggcggtcgtttccgacaagaggcggcgggagcgcggcggcatggacgactccgaccacgagttcgacagtgacatgaaggagatcgtcacgctgctgaagcacatcaaggacaaggcccacaaggacggccagaagaagaccgagcaggccatttccagcgtggcaacagagattcagactatggtacaggacaccaagaataggcttgagaaagaaaggcagagttttctgaaagcattgtcaaagacttcaaaagagtgcgaaagtttgttgaagaatgagtacaccaaatttctagcaacacatgacaagttctgcaaagataaagttgcacacatacagaatttcaaagacctgttctcaaagtttgaagatgataaagagaaattgcttgtgcagtatgaactgcaaaggaagaaggagaaggctactctatctgaacttgagaaaacattttcagagaagatagcaaatgctgaagaatctctgaagaagatgaagcaggatgataaatcaatccacatccttcgcaagtccattggctcatttctgagtggtgaccctgatgatcagtctggtcaagatgatgactgaagatgctctcaccaaatggtttctagtttgagatctatgtggataatatgttattggagaatagatatcagttcataggggaggcaaggattagggagttgatagtttgtgactgcacaactcagtgtgtttagctttcatcggctggagctgtgatgttctggagaatggtttcaggttattttcttgttggtggattttagtattttacggcaagatgcttagacgctttacaatttgg

SEQ ID NO: 96606 - DNA, 3338 bp, Zea Mays
tgcatcatccatctatggggaggagaggagcctcacttctagtctagtacaacttgcttctgcttctgcctctcccggtccaggtctcgctctcctccgctgttctgttctaccactaccactaccagcccgggcggtccaatccaattccccccgctcccacctagtccttcctcctcgtgccaataccagatccacgcgctccattgcgaaataaccttaccaatcgcagaggacaagagaagacgccatgccacatgtgagagcggggagcttaggtttgatctgctagccagctgcctctgcgtctgccatcggccatcgcccatcgccatcggagaaaaataaagggttgaagggaccagaggaggcggccgcccccgaaccgccgggaaggcaaaaagatgcgccctttgcggcgaagctccgggggccttgcggccctcggctgctgcctcttcctcctcccgctgctgtcccgcggcgcggacatgccgctggggtcgaccctctcgccgggcaactcggcgacgtggacgtcgcccaacagcaccttctcgctcggcttcacggcgtccgcgtcctccccgtcgctcttcgtcgccgccatcacctacgccggcggcgtgcccgtctggtccgcgggcaacggcgccgccgttgactcggggagctcgttccgcctctcgtccaacggcgacctccagctcgtcaacggatccggggccgtgctctggtcctccaacacggggggccagaacgtgtccgccgcggccgtccaggagaccggcaacctcgtgctcaaggacaagaccggcgccgcgctgtggcagtcgttcgaccaccccacggacacggtggtcatgtcgcagaacttcacctcgggcatgaacctcacctccgggtcctacgccttctccgtcgacagggccacgggcaacctcacgctccgctggaccggcgccggctccaccgtcacctacttcaacaggggctacaacacctccttcacggggaacaagacgctcaccgcgcccacgctcacgatgcagaccaacggcatcgtctccctcaccgacggcaccctcacctcccccgccgtcgtcgcctacagcagcaactacggcgagagcggggacatgatgcgcttcgtgcgcctcgacgcggacggcaacttccgcgcctacagcgccgcccggggcagcaacgccgccacggaggagtggtcggccgtggcggaccagtgccaggtgttcggctactgcggcagcatgggcgtgtgcagctacaacggcacgtcgccggtctgcggctgcccgtcgctcaacttccagctctccgacccttccaagccgcgcgccggctgcacgcgcaagctcgagctcgccagctgccccggcaactccaccatgctcgagctcgacaacacgcagttcctcacctacccgccggagatcaccacggagcagttcttcgtcggcatcaccgcctgccgcctcaactgcctctccggcggctcctgcgtcgcgtccacagcgctctccgacggctcgggcctctgcttcctcaaggtgtccagcttcgtcagcggctaccagtcggccgcgctgcccagcacgtctttcgtcaaggtctgctccccgccgctgcccaacccggccccgggcagcgcggcggcgccctcggccggcggctccggcttccgcgcctgggtcgtggcggtcgtggtcctgggtgtggtgtccgcgctggtgctctgcgagtgggcgctctggtggttcctgtgccggcacagccccaagtacggcccggcgtcggcgcagtacgcgctgctggagtacgcgtcgggcgcgcccgtgcagttctcgtaccgcgagctgcagcgctccaccaaggggttcaaggagaagctgggcgccggcgggttcggcgcggtgtaccgcggcgtgctggcgaaccggacggtggtggcggtgaagcagctggaagggatcgagcagggggagaagcagttccggatggaggtggccaccatcagcagcacccaccacctcaacctggtccgcctcatcggcttctgctccgagggccggcaccggctgctggtgtacgagttcatgaagaacggatcgctggacgcgttcctgttcggcgacgcgccgccgggcgggaagatgccgtggccgacgcggttcgccgtggccgtgggcacggcgcgcggcatcacgtacctgcacgaggagtgccgcgactgcatcgtgcactgcgacatcaagcccgagaacatcctcctggacgagcacttcaacgccaaggtctccgacttcgggctggccaagctggtcaaccccaaggaccaccgccaccggacgctcaccagcgtgcgcggcaccaggggctacctggcgccggagtggctcgccaacctgcccataacggccaagtccgacgtgtacagctacgggatggtgctgctggagaccgtcagcgggcgacgcaacttcgacgtgtcggaggagacgcgcgggaagaagttctcggtgtgggcgtacgaggagtacgagaggggcaacctcgccggcatcatcgacaggaggctccccgcagaggacctcgacatggcgcaggtggagcgcgcgctgcaggtgagcttctggtgcatccaggagcagccggggcagcgcccgtccatggggaaggtggtgcagatgctggatggggttatggagctcgagaggcctccgcccccgaagtcgtcggacagcttttttagcaccaccacggccagcggcggcaactccagcatggtctcgacagtcgcctcgtcggcggcgcccccggtcgcgccctcgacgtcgccgaacctagagcaggagatggcgttgggacgctccgagtcggctaggaaccgtgaccgggtgacgcggcagctgctgtcgccgcagccgtacatgacgatgtaaaatgtgcgtctgcgtcatcgtcatcctcatccatccatggcagagatcatcatctggatacacgcactcaggcagaatgcctgcttctgtcgtccattccaggtttactacagattgtagagcgattacggtagggctacgctgaatttgctcctaacattctggttggcaatatgtaattgtaagcatcaaaattggaccgagtttggtattgggcattgcaatctgtacaaaatcaccgaaacgagacgacaaactgtagcatggatttgcaggctagtggtttgtttgttttgttcccccggcagctcacacaggcgatatgtaattgcatcataatttcataatactgagctaccgcatactgttggaggt

SEQ ID NO: 96607 - DNA, 1509 bp, Zea Mays
atggatggatggatggatggatggatggacgcacaggaggttctcgcagctatttcaattcgggggcgtggacatgggcgcgacggcggcggcggcgcgtggcccgtggtcggtgacgtcgtagagctcgccgtctccccagagcgcgtacgcctcctcgccatggacggcgtcgtcgccgacctcgagcttgtcctgggtcatgcgcagcgggacgacggcgttgatggcgacgcagatgatggaggtgacggccacgttccatccgatgatgaagagcgcgcccgccagctgcttgccgagctgcgcgccgtcgccgtagaaggcgcccttggagttggtgaccggcaggaagagcgcgcacagggtggggtcggcgaggagccccgtgagcaggccgcccaggagccccgccacgccgtgcgtgtggatgacgcccagcgtgtcgtccacgtgcttcagcagccgggaccgcttgtgcaggatcatcatcgtgtaccacggcacgctgccggccagcacgcccatcaccatggccgcccacccctgcaccagccctgcggcgggcgtgatgcagacgagtccggtgatcatgccctggacggcgcccacgacggagggcttcttgaagaagacgacgtcgaggcaggtccagacgaggaggctcatggcggtgcagatgttggtgttgagcaccgacatggacgccaccacgttggcggcgtacggcccgccgccgttgaagccggcccaccccatccacagcaggcccgcgccggtgagcgtgaacaggatgttgttcggcgggaacctctccctgtccttctgcgcccggggccccacccagtaggctgccgtgaacccggcgaagccagcggagaggtggatgacgtagccgccgcagtagtcgatgacgccccactggaagaggaacccgccgccccatacggagaaggcgccgacggtgtaggagaaggtgagccagagcggcacgaacagcatccacgcggcgaagctcatccggcccagcagcgacccggcgaccagcaccagggtgatggccgcgaacacgcactggaagtacaccaccgtggccatcgggtacagcggctccgcggccggggtctccagggcgccgctggcgaagtggtgcgccgtggcggggaggccggcctgccccaccagcccgccctggctcagcgccggccgcgccttgccccacagcggcagcagcctgtcgccgaaggacatgttgtaggcccaggtcacccagcagatccacaccgccgcgaacgcgtacagcgccatgaaggccgagttcacggcccacttcttcttcaccacgccgccgtacaggaccaccagacccgggaagctctgcagccccaccagcgtcgccgccgtcagctgccacgcgttgtcgcccttgttcagccactcgggagacgacgccgacgtctggtacgccagcggcatcgtcgtcccggacgacgacgacatgttagttag

SEQ ID NO: 96608 - DNA, 811 bp, Zea Mays
gaaatcgattggtggtgccccgaagagatcaaatccatcaaagtcacaggaatcgagccccactggccagggtgagagcgaccctcgtccgtcgtcgtccagacactgtccttgtccatccatgagcgcgaagccctcgatgtcagaacagctgagagcatcgagcatggtgtccgagaagaactccaagctcgctgcctcggtgtccatcgtcgtcaggcggcgataagagtcggtgccgagtccgccattggcaacattgtgggcagccgcgtcgtcctcgggcggcagcgcgggcgcgtggccgtcgaaggcggcgacgtgggcgaagagcttgtccttccgcgagaaggaggtgccgcaggagcagacccagcggtcgcgtccgcagtgcttctcgtgcgtgcgcaggtcggcgagcacggagaagcgcttgacgttgcagcggcggcaggtgtagctcttgtcgcagtggctgcgccggtagtggttcttgacgcacacggccgtcttgagcggctggaagctgcggtgctcccgcctcccggttgcgcttgcaccccacgaaggggcaggagtagaagcaccgggcggaggaggaggaggacgactgcgccgtggccgcggccgcggcggcgggcttggcgagcgcggccgccgtcttgtactcctcgccgtggccgcgcatgtgcatgcgcaggttggcgtcgcgcttgaagcccttgccgcagaccttgcacgagtgcacgtgcggcgccaggatctcctcctcgccgagctcgatcacctcgtaggagccggccggcgggag

SEQ ID NO: 96609 - DNA, 1463 bp, Zea Mays
agttggctcttgcgggagggatgagatgggaatgggatggcgacgggcgggcgtgtgcggctgcaagcggctcggaaggggcacggtggagacgcagcggaccctcgcctcttctcctgctcctgctgctgacctgacgagctgagcccacggacgagaggggagacgaggaggggcacaccacgcaggagaccggaggagagcgcgcgcgcggatccacctcgtatacacttcctcttcttctccgtgtccttggctcagatttagttgctgcgccgcttcttaggattgattgctgcttcacccggtgatcgcgtcgtcatcttcgcgtttgcttaatcgcctggttgctgcatcggttttttttttttgtgtgtgtgttgtgtggttgggggtgcgggcacagggtttcctcctgcttagcctggattggtgtaggatttcgatgtgatcgatggcggccgaagacaaaattttaggatgttggcaagaccatcagcaccgcctttggtgactgctcaaactcctgaagtcggcatcttcattacagctcgcaacgtctcgggtgcactggtcgccaagcttcctggtaacaaaaacaagtgtggaggaagatcgaatgtccggcagcggaacatccaacctgggaaaaggggctgtcgtcgggagtggcgggcgctctcagcagctgaccaagcgcaggcttctaccttggacgtagatgaggagtgcaaacgggtgctcactccattgggtttctccagcgaagacgccgagaagatgctgaagaaagcgtttggctggacccactcgccgtactggagcgaggagagggagaaggaggttccgaccgccgaggcggtagctggagtgctggactacatcaggagcctggggctgtcggacgaagaccttggcaggctgctgaagaagttccccgaggttcttgggtgcgacctcgacggcgaggtgaggccgaatgtgggcaagctggacagtgactggggaataaacgggaagaccctgcggagccttctgctgaggaaccccaaggttctgggctacaatgttgactgcagaggggattgcatggcccagtgcacccgctgttgggttaggttctgatgatgattggttttgttcttcgtcgccacatcgttggtcaggaacttgggacttggttttgcttgctggccatttttctgtaagctagcacctgtcgaatgtagcacaatcgctagctgctggatattgggttggccactgttagttcttatgtacgtacaacagattcaagagctaaaccatgctgctgttgtctgtaaaagagttgcaataaatatggccagaattcctgaatggcctgtggtaccgcagtgacttgctattgttcttctgctctggatttccacattgtcttgttgtgatgtgaggtcctgtccttgtgctttgatgcatctccc

SEQ ID NO: 96610 - DNA, 1207 bp, Zea Mays
agttggctcttgcgggagggatgagatgggaatgggatggcgacgggcgggcgtgtgcggctgcaagcggctcggaaggggcacggtggagacgcagcggaccctcgcctcttctcctgctcctgctgctgacctgacgagctgagcccacggacgagaggggagacgaggaggggcacaccacgcaggagaccggaggagagcgcgcgcgcggatccacctcgatgttggcaagaccatcagcaccgcctttggtgactgctcaaactcctgaagtcggcatcttcattacagctcgcaacgtctcgggtgcactggtcgccaagcttcctggtaacaaaaacaagtgtggaggaagatcgaatgtccggcagcggaacatccaacctgggaaaaggggctgtcgtcgggagtggcgggcgctctcagcagctgaccaagcgcaggcttctaccttggacgtagatgaggagtgcaaacgggtgctcactccattgggtttctccagcgaagacgccgagaagatgctgaagaaagcgtttggctggacccactcgccgtactggagcgaggagagggagaaggaggttccgaccgccgaggcggtagctggagtgctggactacatcaggagcctggggctgtcggacgaagaccttggcaggctgctgaagaagttccccgaggttcttgggtgcgacctcgacggcgaggtgaggccgaatgtgggcaagctggacagtgactggggaataaacgggaagaccctgcggagccttctgctgaggaaccccaaggttctgggctacaatgttgactgcagaggggattgcatggcccagtgcacccgctgttgggttaggttctgatgatgattggttttgttcttcgtcgccacatcgttggtcaggaacttgggacttggttttgcttgctggccatttttctgtaagctagcacctgtcgaatgtagcacaatcgctagctgctggatattgggttggccactgttagttcttatgtacgtacaacagattcaagagctaaaccatgctgctgttgtctgtaaaagagttgcaataaatatggccagaattcctgaatggcctgtggtaccgcagtgacttgctattgttcttctgctctggatttccacattgtcttgttgtgatgtgaggtcctgtccttgtgctttgatgcatctccc

SEQ ID NO: 96611 - DNA, 2837 bp, Zea Mays
gaatgctatacagagagaggctgcgttgcctcgtatccaatctaacggcggataacaccgagtggcgaccgcctgacgcgcccgtgtcggcaagccgccgacgacttgacgtggggcgggggaaacaaaacaacgcgggcagcgctacggcaagcgcgtccctgccacggcgcggacacagagagtggaaaccggaaggggggaagagagatggattcctccacctcggcggcggcggcaggggaggcggccgtgccgccggaggacgacgtctgctccgtctgccacgaccgcttccggatcccgtgtcaggcgaactgctcccattggttctgtggagagtgcatcatccgcgtttggaattatggacctcctgtacaggcttgcaagtgtcccatttgtcgccgccttataaatctactggtgcctgctgcattatcagggcaggaggatggtccacaagctcaacgtattctaggagagattcagcactataactgtatatttggtggagcaccacgcagcctaactcagaggttgcaagacctacccttcttcatccgaagactgttcagagaactaatggacccccagcggaccctcccactcgtgttcagggcgcggatgctgatgatggtcgcactgagtgcaatttatgtgctgagccctgtcgacattcttcccgaaagcatgctgggcctctttggattcgtcgatgacctgctcatcctgctgatcgtgttcctccacctcgccgcggtgtaccggtcgttgctcctgtaccgccacgggggccagtagaagtcgctgtgcataaaccgtttgtttagctggtttccatgtggagttctctgagatcgcagcagcggatttggaagatcgccgactcgccgagtagatggcaacgtcacggacggcttagcctgtccctgctctgtaccattctactacgcctgtttttctgagactctgacacggtgaactgaactttggttggttgatgcaagtgaatttcccttcgttttactcgtcaggaaaagaaagggaaagagtttgcgttcgtttgtctttgtttctgctctttggaagttggaattgaaactgcactgatgtttgcgtttcaggaactgcattgacgtggatcctgctcagttctcttagcatttacttatgggccaagtttgtagaagtttagtgggctgtagacccattggtgtcatgttgggccaccgcgacgagtaaagaagaggtaggggatcgccctggccgggtagttggctcttgcgggagggatgagatgggaatgggatggcgacgggcgggcgtgtgcggctgcaagcggctcggaaggggcacggtggagacgcagcggaccctcgcctcttctcctgctcctgctgctgacctgacgagctgagcccacggacgagaggggagacgaggaggggcacaccacgcaggagaccggaggagagcgcgcgcgcggatccacctcgtatacacttcctcttcttctccgtgtccttggctcagatttagttgctgcgccgcttcttaggattgattgctgcttcacccggtgatcgcgtcgtcatcttcgcgtttgcttaatcgcctggttgctgcatcggttttttttttttgtgtgtgtgttgtgtggttgggggtgcgggcacagggtttcctcctgcttagcctggattggtgtaggatttcgatgtgatcgatggcggccgaagacaaaattttaggtttcgttcggttcactgcgcgtcttgctgtcctctctgctaggaatcacaaattttagtctcccctgctctgattgataccagctttctggtgctgtgcaggatgttggcaagaccatcagcaccgcctttggtgactgctcaaactcctgaagtcggcatcttcattacagctcgcaacgtctcgggtgcactggtcgccaagcttcctggtaacaaaaacaagtgtggaggaagatcgaatgtccggcagcggaacatccaacctgggaaaaggggctgtcgtcgggagtggcgggcgctctcagcagctgaccaagcgcaggcttctaccttggacgtagatgaggagtgcaaacgggtgctcactccattgggtttctccagcgaagacgccgagaagatgctgaagaaagcgtttggctggacccactcgccgtactggagcgaggagagggagaaggaggttccgaccgccgaggcggtagctggagtgctggactacatcaggagcctggggctgtcggacgaagaccttggcaggctgctgaagaagttccccgaggttcttgggtgcgacctcgacggcgaggtgaggccgaatgtgggcaagctggacagtgactggggaataaacgggaagaccctgcggagccttctgctgaggaaccccaaggttctgggctacaatgttgactgcagaggggattgcatggcccagtgcacccgctgttgggttaggttctgatgatgattggttttgttcttcgtcgccacatcgttggtcaggaacttgggacttggttttgcttgctggccatttttctgtaagctagcacctgtcgaatgtagcacaatcgctagctgctggatattgggttggccactgttagttcttatgtacgtacaacagattcaagagctaaaccatgctgctgttgtctgtaaaagagttgcaataaatatggccagaattcctgaatggcctgtggtaccgcagtgacttgctattgttcttctgctctggatttccacattgtcttgttgtgatgtgaggtcctgtccttgtgctttgatgcatctccc

SEQ ID NO: 96612 - DNA, 2810 bp, Zea Mays
gaatgctatacagagagaggctgcgttgcctcgtatccaatctaacggcggataacaccgagtggcgaccgcctgacgcgcccgtgtcggcaagccgccgacgacttgacgtggggcgggggaaacaaaacaacgcgggcagcgctacggcaagcgcgtccctgccacggcgcggacacagagagtggaaaccggaaggggggaagagagatggattcctccacctcggcggcggcggcaggggaggcggccgtgccgccggaggacgacgtctgctccgtctgccacgaccgcttccggatcccgtgtcaggcgaactgctcccattggttctgtggagagtgcatcatccgcgtttggaattatggacctcctgtacaggcttgcaagtgtcccatttgtcgccgccttataaatctactggtgcctgctgcattatcagggcaggaggatggtccacaagctcaacgtattctaggagagattcagcactataactgtatatttggtggagcaccacgcagcctaactcaggtcggtacactgtccatgaaagctgatgtcctttgttttagggttttagggtgaggcctttcatatagatcaaaagaaaacaattcagattacagtgcggggttgaaagctgatgatacaaaaactcggccggggagtgaaagaccttcctcttggtattatattaaaagagatcgaaacatggtccagactgagaaaattcctgaacctgaccatcactagcgggccgtcaccgctcactctgcaatggccaagccggagggtggcgtacaggacgtaacccgggagcgggcggggcacaacgaggggatctttttaaccaagcccaaaattcgcccccgatggggatcgaacccaagacatggaggtgctactcggaagatttaaccattacactagaggccctttcacaaagctgatgatacttttaagaatgaaatcgggaattgagattggtaacggttgttgtgtttgatatttctacaatgctactattgttagagtgcatgaaaaaacactggccaaagtcctttataaggtacgcacgagacaataataggatttgtatatattattgggaaatcatctatccaacaaatcggactgttgtgtacacatgcctaaggcatgtgtgattttaatggatcatagtgttagcacatatggggtctgtttggttcggcttttttctgaccagcttttctaataatctggttgtgggaagaatctgaatattgtgagaattacgtgcggaggaagatggagtgatccaaagggtctaggatctagaaagatcgtgacgactcgactgattatgtgttcatgttgattttggacgttttttaccaaaatgattcttatagaagcggtctgaaaagctggagcgtttggtagcccgcagtagcttttggtggccagaagctgaaaaaaggccaaacaaacagggccatgattacttcgatcactcaatttgtactatcatctgtgttattaggagtaaaacaatgtggtgcccccacattccttgtagagaatgttagaaattcccaggttagttggagggttcatattataacagatacatgttggttcccatgccaactaagatacatctatcagaattgtacatcaagatggctactttttcaactagaaatgtatatctctagcatctggccatagaatctcgtgggtggttttcatctaaatcctttgacctttgttttttgacaacctcattttgttgctgtgttttttttctccagaggttgcaagacctacccttcttcatccgaagactgttcagagaactaatggacccccagcggaccctcccactcgtgttcagggcgcggatgctgatgatggtacgtctcataggattgagctattatttcgcttcatattcctcttcaacgttatgctgggaagttactgagttgggaaagcaaacaggctgcgttgtttctgacctcagtttcataccttcgcccagtgcaatggatgtgagagatgagaccgtatatgaatcttctgataagacaatgacttattccaaaacctgtaggtcgcactgagtgcaatttatgtgctgagccctgtcgacattcttcccgaaagtaagttccatattcccaagaacaagtagcggcatcttaggttgtgtttggttccagagtatggtggaacggagctgatccgctctcaattttttgttgtttggattgattccatatagaatagagtggttctaaaaatggaaaattatgctcaaatgtcgaaccatttggctcccaaaattccccggacggagccgtttccaacatagtaaacctgtcattactatgcctgtgttatgaactactaccatatatttgtatcacatcggggatttgatcctgcaggcatgctgggcctctttggattcgtcgatgacctgctcatcctgctgatcgtgttcctccacctcgccgcggtgtaccggtcgttgctcctgtaccgccacgggggccagtagaagtcgctgtgcataaaccgtttgtttagctggtttccatgtggagttctctgagatcgcagcagcggatttggaagatcgccgactcgccgagtagatggcaacgtcacggacggcttagcctgtccctgctctgtaccattctactacgcctgtttttctgagactctgacacggtgaactgaactttggttggttgatgcaagtgaatttcccttcgttttactcgtcaggaaaagaaagggaaagagtttgcgtt

SEQ ID NO: 96613 - DNA, 3112 bp, Zea Mays
ggagcaggaggcgacggttgccaggcaggagcgccggtccaacggaataggacgcgggcgcaagtcggggggcagggcgaggggtcccatactcccatccactgcctggtcgcgcacgccgcagcatccgcccccgccctgtgagccgccgtgcagatgaaggtgtcttccaggaggaagcagccgccgccgccgccgcagcagcagcagcgggaagaggccgaggccatggacgccgatgctggcgtccaggaggtggaggaggaggaggcggcggggtgctcggggaaggcgcccgaggcggagggcaggacagtggtggtcggcgtgcgcgcggacgccgagagccgggcgctgctcacctgggtgctcgtcaatgtagccgcgcccttggaccgcgtcgtcgccgtccacgtcgcgctgccgtccgccgcggaggcgcccgacttcgacgccatgctcgccgtctaccagggcttctgcaacctcaagcagatcaatctgaagctgaagatttgcaaggactcgtcggtgcgcaaggcgctagttcgtgaggccagcctgttgggggctgccaaggttgtcctcggcgtcgccaagaagaggcgtgcgatctcgtcctcgcattcagttgcaaagtactgcgcaaagaagctgcccgcaaagtgcgcggtcctcgccgtgagcaatggcaagatcgagttccggagggagtcgagtgcccattcaggcaaggtctcagcagaggttcttccgtgtgctgacgatgagatgtattgtgcagtgcggttccaagcccatgaacctaaggatggtggtgagggtggcaccacgcatgatgttggcaccaagggaagtgaattggaggacaccatcaaacacgaacagcttgtctcaagcgtggtcctccctgcggatttggcaacggatcaggtcaagatcgacgcagatctttctagcagcaaggctgtagaatcaactgtcaaacagagagatgagactgccgagcttccaggtaagggtgccagtgtgttgtactgcgtgcttcctgggagaagtagcgattctgctgcaagtacatctagtaggcaagaccaggattcagtggatgtgctgccatctgaaggcaccggggagctatattgcttattgccccccaggaatggccattcagtcaggagttctggagattctaagcgttcaaatgcgagccaaagagatgatagaccagccaatccatcgcctgaaggagatggcgatctggactgccggctgccgaggagtggacgacccagtaggagttcttctgccgtatccatggaagctgaggactcgccgaaagacgctgcacgaaatgctgaaacaccctctagttctccaatgtcactgagacggatgatagaaggaagatctgatcgcagccgccttcctagaagaatctttagacatcatagaagctcatctcttgaatgggcaaaaatctcgatggttcaatgggcgacgagacttccgagccggtacacttcagtgcacacagatagcagatcattgaaacaggatacaagcccaaggctgaactgtggttctgaacccactacaacagctgttgagccggaatcatcatcgatgttttctttcgctttctatggtgtagcatggcctcccagtgaattggaatcgcttcgagagaagtattcttcagtctgtaggctgttcagttatgaagaactgaaacttgcaactggcaactactcacctgatatgttgattgggaagggtggaaccagccaagttttcaaggcacgactcgacgatggaacgttttgtgccgtaaagattctgaaaccctcggtcgatgcagtacatgagtttgttacggagatcgagaccgtgagcagcctgcagcacgagaacatcgttgcgctgaggggattcagcttcgagaactacaaccttgtgctggcatacgattacatgccccaagggagcctggacagagctcttcacgggaagaatggtggcacggagtttcttgtttgggagagaagaattaggatagcgatcgacgtcgcaagagcagttgaattcctccatcttggcggtgtcacccagtctgtgatccatggagatgttaagtcttcgaatatcctcctttcagaggattttggggcacggctgtgtgatttcgggttagcgaagcgagtgtctgcatcgactccccacctaacgtgtaccgacatcaccgggactttcgggtacatggcgcccgagtacttttcacacgggacggtcaacgagaagatcgatgtctatgcgttcggagtcgttctgctggagatcatctcaggaaggagacccattacgccgggaagcacgaagggacaagagagcctggttggttgggccaagcctttgctgtgcggcggcggaattagagagctggttgatccgttgctggggaggaacgagtacgactgcgatgagatggagaggatgacgctcgccgcctcgctttgcacgaggacatcttctcgctctcggcctgagatgtcactggtaaggaactccgttgcaagaagaagaagaaggaggaatggcttgcgttgcatgactctttctgacccgcgaacgccctgcgtaaccacaaccaaccaggtcctgagactcctccagggcgacgacgaggcgatcggctgggcgagggcgcaggtcacggccagcttcgacgggtccgacgaggaggctgcggcggcggcccctgacctgaacatgcagtcgcatcttaacctcgcgctcctcggggtggaggtggaggacgacgacacgctgtcgcagtcgcagtcgcaatgcagcagcaccgtggacacctcggccgacggctactggagccggtcctccagtttcgactagcgctgcggtctgcggggtctcttttagtagtagtagtagtacgtttatgtacagttggtggcaattggtgagttgattgttcttgtgagtgttgctaatttattagcttggagttggttctgttgtgtggtagaagatcttaaaaaattagttcagattcagcagagtgttgatggcaatgcaatttgttcagattcgtgtt

SEQ ID NO: 96614 - DNA, 1469 bp, Zea Mays
ccaaacaactatatatactctcccaaccttattcctctctctcgttgtcttggcggctgcggcggagcacggaggcgaaggaggagcagcagcagcaggcggcgccgaggagcggcatcccactcagtgcttgcaaccatggctaggggattgaagaagcacttgaagaggctcaatgcgcccaagcattggatgctcgacaagcttggcggagcttttgctcccaagccatcttctggacctcacaagtccagggagtgccttcctctgatcctcatcatcaggaacaggctcaagtatgctctgaactaccgtgaggtcatttctatcctgatgcaacgccatgtacttgttgatggcaaggtcaggactgacaagacctaccctgctgggttcatggatgtcatttccatccccaagacaatggagaactacaggctgctttatgacaccaagggccgcttccgtcttcacccaatcagggatgaggatgccaagttcaagctctgcaaggtgaggtctgttcagtttggccagaagggcatcccctacctgaacacctacgacggccgcaccatccgctaccccgacccgctcatcaaggccaacgacaccatcaagatcgatctggagaccaacaagatcatggacttcatcaagtttgacgtcggcaacgtggtcatggtgaccggcgggaggaacaccgggcgtgtaggtgtgatcaagaacagggagaagcacaagggcggcttcgataccatccacgtcgaggactccatgggccaccagttcgccacccgcatgggcaacgtgttcaccatcggcaagggcaacaagccgtgggtgagcctgcccaagggcaagggtatcaagctcagcatcatcgaggagcagaggaggcgcgactttgctgcccaggctgctgccaaggcataagttctctgaatgtgctgcttggagctttttgctatgtctagtttaatttttatctgcaaggatatagagctaccttcccaagactttatcatcatgttttgttgcttttggttcttgaacagcgtttgcagcttagctgtaatgctttaattcgactttctatatattgttgaaccgtgttgtcgacaccatgacagcttgttttgcttctatgtttttgcttgagctacggtggttgtttggaatcttgtatggtggtttgttgtaattctgtcaatcggatcaggaactggccacggcactggatgccactaaccacgtccgtggtggtaccagacgccaatgaccatgctcttgttttgtccgagttggggctggtgctgctcgtctgcgggcgtcctggagaaagccagcgcgtcgtccgcggcaggtgctgaatgactgactgaggagcccggagcgtgttcatgcaagtttgcactggatcttttttttcaatcacaatgtactgtggtagtcgaactcctccatcc

SEQ ID NO: 96615 - DNA, 1876 bp, Zea Mays
caggttcgatcaatcggagagtttgtaagtagagagtacaagaagtcacgataagaagaagaaaaaaagtagatagaagaaagtttcgacatcagtttttttcagtatttcataagtaaatacacattagaacaggcctgattgccggacatacagggcagccttttccccggcccggcccggcccgaagtggacaccagttggcacccgacccaaaatgggcacggcatttcgcacgaatcgtccccgtccagagcgcgagcaacccacgccgccccgctgtctccgccggtccgcccccgtccctcccctcccccgaatcgcgtcgtcccgtctcctgctgccgcggaaccctcgccatggcggaggcgcccgagaccgccgcccccacccagccgcctcccgcgccggcggcttcgtccccgcctcccaagtcggggatcccgccgcggtacgacctggacgccaagtgggacgcgtgcctcgacctctccatccgccgcgtcgcctactcctccctcggcggcgcctttgcgggcctcctcctcttccgtaaggatactccccccgttgcgtgttgtctcgtgagatctggttgtggcttgcttgctcggtgtcttagctggattgcttgtccggtgcggttgctagtcttcgctccattttgaccagcctgccccgatgtagatgagggtcaattgatgcaatcacgttgcgcattatgcctgttatatgattgctttagggtatcatagagttcctatacgtgctgtctcaatgattaacatggagcgttttaggtaggtgacttgagtcatttgcgtcaagggcggtgatttgctctatgtgtgcaagtgaagttttcttaggttagttttattggctggcatggagggagtattgtaccatatatgttgtactctgggaaattttatactcaacttggtggattgaacggaggatgttgaaatgtttgtctcatcgcctcaatgttgctttcaggtagggttctacctgttgagagttttaaatagaaatatgatacatcgctctttacctaaaaaagaggctgtgttgttcgataggttcgtgatgcctatggctactaatgaaacttgtgttcttaggacgcttcatacctgctgatcaggttactgatatgtctagcaaatttggatatagcaaccgtcctgcagattgcagtttatctctttcagtgccgaatcacatgtccagagctctgcactgcatatattctgtggttttcgattgcacaggacatggatatgtataattcagactgttagtgttcactctatgtattctttgtttgaagtgatatatatggaaatgagataaatgacgaactgcttggccatgagggtgacaattatgttgctcatgcctacttgtaagcagtacaaggtagccctactactcgctgggcatcagttgcccttggagctggtgtggggataggggctgcatacactgaatgctcatacttattcaatggtgctccaaagtgttcacccaaagtctcaactattacctctgcacactctgatgggggagataagtaaacccttgctgttggattggtccatctcggtggagtttttgtatgtgtgaagtaccggttgtttcatgctggatattgcgctacttgtggccatagtatgtcattgaagctagatgcgcctcacttgagagttttgttgcaaacctattccaattgtggtctgatgacccctggcaaagagcttttgcaagctgacgttgaaacggtggcttggtgaccgctaataaattttccatcatgtgaacttgttctcagaatgttttgcgccttacatgagtaatatgcttttacaca

SEQ ID NO: 96616 - DNA, 1003 bp, Zea Mays
caggttcgatcaatcggagagtttgtaagtagagagtacaagaagtcacgataagaagaagaaaaaaagtagatagaagaaagtttcgacatcagtttttttcagtatttcataagtaaatacacattagaacaggcctgattgccggacatacagggcagccttttccccggcccggcccggcccgaagtggacaccagttggcacccgacccaaaatgggcacggcatttcgcacgaatcgtccccgtccagagcgcgagcaacccacgccgccccgctgtctccgccggtccgcccccgtccctcccctcccccgaatcgcgtcgtcccgtctcctgctgccgcggaaccctcgccatggcggaggcgcccgagaccgccgcccccacccagccgcctcccgcgccggcggcttcgtccccgcctcccaagtcggggatcccgccgcggtacgacctggacgccaagtgggacgcgtgcctcgacctctccatccgccgcgtcgcctactcctccctcggcggcgcctttgcgggcctcctcctcttccgtagccctactactcgctgggcatcagttgcccttggagctggtgtggggataggggctgcatacactgaatgctcatacttattcaatggtgctccaaagtgttcacccaaagtctcaactattacctctgcacactctgatgggggagataagtaaacccttgctgttggattggtccatctcggtggagtttttgtatgtgtgaagtaccggttgtttcatgctggatattgcgctacttgtggccatagtatgtcattgaagctagatgcgcctcacttgagagttttgttgcaaacctattccaattgtggtctgatgacccctggcaaagagcttttgcaagctgacgttgaaacggtggcttggtgaccgctaataaattttccatcatgtgaacttgttctcagaatgttttgcgccttacatgagtaatatgcttttacaca

SEQ ID NO: 96617 - DNA, 2038 bp, Zea Mays
caggttcgatcaatcggagagtttgtaagtagagagtacaagaagtcacgataagaagaagaaaaaaagtagatagaagaaagtttcgacatcagtttttttcagtatttcataagtaaatacacattagaacaggcctgattgccggacatacagggcagccttttccccggcccggcccggcccgaagtggacaccagttggcacccgacccaaaatgggcacggcatttcgcacgaatcgtccccgtccagagcgcgagcaacccacgccgccccgctgtctccgccggtccgcccccgtccctcccctcccccgaatcgcgtcgtcccgtctcctgctgccgcggaaccctcgccatggcggaggcgcccgagaccgccgcccccacccagccgcctcccgcgccggcggcttcgtccccgcctcccaagtcggggatcccgccgcggtacgacctggacgccaagtgggacgcgtgcctcgacctctccatccgccgcgtcgcctactcctccctcggcggcgcctttgcgggcctcctcctcttccgtagccctactactcgctgggcatcagttgcccttggagctggtgtggggataggggctgcatacactgaatgctcatacttattcaatggtgctccaaagtgttcacccaaagtctcaactattacctctgcacactctgatgtaattgctctctcattctctcttaatcctgtttgaactctctgctgactggtttaaacatcattattacatgactagtcttctattagatggatggatccttctttttgcctgatcagtgtatctttgctagagttactccctctctgattatgaaagtctaagctatactgactttggctatccgttagatatattcaaaaaaagggcagactcagcgtcggaggctcccccacatgagtggggggtttgggaaagtgataagccgaggtagccccccccccccccccccccccaccgagtgtggagaggctgctttgaatccacgacctagtgagtcagcgagacagttctcggcactgcaccatgcctgcccttctcgttagatatattagttcataggtaatatgatcgtctaaattctcaaatggtatagactgcctagtggatcttgtatttatcttccattttttttactaaaatctggtctgcggcttagctcgcaatttcagaagaactattgtgatcttctggattcaactggcttgttgcatttttggatccttgcctcggttattcggttccttccccagactccactcatttgggagccgccagtacttctttcttataaatgccaacaagtggtaatcttagaagataaaataggtatacagaaaaagatgattataaccaaaagcacaaaaccagagtatgggagtacttctgtaactatggatttttatagtactatattctgctactgcttgtgtttcatttgttttgcttatcttatctatagaaggttagcagcatgtttaaaactcattttctatcaggaatcgtttagatgattgtatcctaggtcagctacattttatgcaatctggtatagttttatttttagcacacatgatctgtgaacaggatcgtgtatgctttggtaaaaccactacaagactaattggctgtgatgaagtgatgataatctgtatagttttgtattgctgtctctgttagcggttctgatgataatgaaatcggtgctggtggtagattgaaatgctactggttaacctatacttgtatatattcttattaacgtctctttttattcccctttttgcaggggggagataagtaaacccttgctgttggattggtccatctcggtggagtttttgtatgtgtgaagtaccggttgtttcatgctggatattgcgctacttgtggccatagtatgtcattgaagctagatgcgcctcacttgagagttttgttgcaaacctattccaattgtggtctgatgacccctggcaaagagcttttgcaagctgacgttg

SEQ ID NO: 96618 - DNA, 870 bp, Zea Mays
atggacagcctcaggggagtcaagttgccgggcgtgccgaagggcgggagtgcgctcgtgaaggtggcgctgctcggcggcgcggggctctacgccgtcctcaacagcttctacaacgtcgagggcggacaccgcgccatcgtcttcaaccgcctcgaggggatcaaggacaaggtgtaccccgaaggaactcacctgatgatcccgtggatcgaaaggccgatcatctacgacgtccgcgcccgacccaacctcgtcgagagcacgtccggaagccgcgacctccagatggtgagaattggtcttcgtgtccttactcgacccatgccagaccagctacctaaaatctacaggaacctgggggagaacttcaatgagagagttctgccttcaatcattcatgaaacactcaaagctgtggttgctcaatacaatgccagccagctgatcacccagagagaggctgtgagcagggagattaggaagattctgactgagagggccaacaacttcaatattgctctggatgatgtgtccatcacaagcctcagctttggaaaagagtttactcatgccattgaagccaagcaggttgctgcacaagaagctgagcgtgccaagttcattgttgagaaggctgagcaggacaagcgcagtgcagttatcagggcacagggtgaggctaagagcgctgagttgattggccaagccattgccaacaaccccgccttcctggctctgagacagattgaagctgccagggagatctcccacaccatggcggcctccagcaacaaggtgttccttgattccagggaccttttgcttggtcttcagcagctgaacgtggggggcaagcaaaagaagtga

SEQ ID NO: 96619 - DNA, 1545 bp, Zea Mays
atggaagccgacatcgctttcaggtatgagatcccccggaccgcccagttcctccgcgacggcgcctacaccagggtcgcgctccagttccccgacgagatgctgaaggatgctgctgcggtggcgagggcgttgcggcgggagcttgcctccggcggcgccgacagtggggttagggtgttcgtgatggccgacacggcgtacaactcctgctgcgtggacgaggtgggcgcgtcccacatcgatgcgcagtgcgtcgtccactacggccacgcctgcatgagcccaacatcaaatttgccagctttctttgtatttgggaaggcaccgttggatgtccacgcatgtgccggcacattgctggagtgctcaaggaaaagcaataagcgcattctggttttatatggactagagtacgcatatgcattggatgaccttagacagactttcatggagtcatgtaaatcaaattctggcaatcatgaagtccagtatgcagaagttctatgttcagttatgagtccatcatcaagtactacagaagaaaacaaaattcctcagtcgagtggcccctcttgtaatggggatatctccagaaacagcgagtcggcaacattcctgaataatcgtaatggcatggaatgttccagttccacacaaaagtacagccttgctggcatgacatggaatatttcagttgaggagaaaatggaggactatttcatattttggattggacaagatagctcagcatttgccaacatagtgcttaccttcaataaatgtgaaatagttagatatgatgcaatagaaaatcaactcacagcggacgtctctcatctgatgaaaattcttaggcgaagatattacctcgtggagaaggcgaaggatgcaaatattattggcattttggtgggaactctgggtgtagctggttatcttcatataatcgaacaaatgaaagatctgatcaaggccgctggaaagaaatcctatacattggtcatgggtaggcctaattctgccaagcttgcgaattttccagagtgcgaagtttttatttatgtttcttgtgcccaaactgctctgctggatagcaaggattttttagctccagttattacaccttttgaagctgtactagcttttggcaggggaagagagtggaccggagagtatcttttggatttcaaggatttgatcacttcagagaaacaagaagctgcgagcacaacaggagaagcacgcttttcttttatcaaaggtgtctatgtggaagataattgccctcaagaaaatgaggaacaatcggaaacgtcgctcgctctggctgaggtaactgaaaaggcactgagcatccaaaaccagcacaacgacgctgtcctttaccaaggaagagcaatgtcctcaatcgactacctcaaggcacgttcctaccgtggtctaactggagaatacgaaggcccagttcctgattcagtcttggtaggcagaatgggcagggcagctggttacagtgacgagaaaactgagagcgcacagtga

SEQ ID NO: 96620 - DNA, 780 bp, Zea Mays
atgggcgcagtgaaccatctggtgaacaccgtgagcttgggccacgacttcagcttcgaggaggccggcgacaccacggccttccctcacctcatggacatcaacttttggggcaacgtgtacccgacgcacgccgcgctgccctacctccggcggagccacggccgcgtcgtcgtcaacgcgtccgtcgagagctggctgcccatgcccaggatgagcctctactctgcggcgaaggcagcggtggtggacttctacgagacgctccggtacgaggtgaaggaggaggtgggcgtgaccgtggcgacgcacggctgggtcagcggcgacgccggcggcagcaagttcacgctggaccagcagcagcaccaccaggaaggcgcggcggcggatcaggtgcagtggaagcagcagggagagcgcgagccggcggcggcggcgctgccgggagggcacgtggaggcgtacgcgcgggcgctggtggccggcgcgtgccgcggcgacgcctacgtgaagcgccccagctggtacgacgtcttcctcgtcttccgcgtcttcgcgcccgacgtcctcgcctggaccttccgcctcctgctgtcgacgtccacgcccgcgcccgccggccccagcgcgagcgcgagcgcgatcgccgcgcgtcgccagcctcccgccgcgctgccggccccgccgctccgcccgctgctcgagtacccgccggcggcggtgtcccggggccccgcccacgcccacgcccagcaggtggtgcagaagctggaatga

SEQ ID NO: 96621 - DNA, 705 bp, Zea Mays
atgtcggggcggcggccggcgacgtgggaccaggcagcggacgactacgactacctgttcaaggtggtgctggtgggcgactccggcgtgggcaagtccaacctgctatcccgcttcacccgcaacgccttctccctcgactccaagtccaccatcggcgtcgagttcgccacccgcaccatccaggtggacggcaagacgatcaaggcgcagatctgggacacggcggggcaggagcggtaccgcgcaatcaccagcgcctactaccgcggcgcggcgggcgcgctgctggtgtacgacgtgaccagggcggacacgttcgagagcgcggcgcgctggctccgcgagctccgggaccacgcggacggccgcggcgccgccgtcatgctcgtcggcaacaagaccgacctggcgcgctccggctcgcgctcgcgccaccaccatccccgcgccgtgccgcgcggggacgccgccgcgctcgcggagcgggagggcctctcgttcgtcgagacctccgcgctcgacgccaccaacgtcgacgccgcgttcgagacgctgctcacggagatctaccgcgccgtcagcaggaaggcgctggccgcctcctccgcgggtgacgatgcgggcgccgtcggggaggggcaggcgattcaggtgtccgccagcgactccgccggcctcacgacgcggtgctgcgcgttctag

SEQ ID NO: 96622 - DNA, 1935 bp, Zea Mays
catttcgtcgaatccgccgtgagatccgcccgactctcgctccgttccggcgctctcggtcgggcgaaggctccaccttcctccgacaagatggcggggaagggagccaaggccacggccgccaagtcggcggacaaggacaaggggaagaagaccggcggccccgtctcgcgctcctcccgcgccgcaccccatgagaagtcagctccgaagaaagatgtttatcaattgtttgctgagaaggtcagggataacaaacaactggaatcaagatgggcgatcatgcaagaaacccgcgtggagtatttccgtggaaaagatttcaataccttcgtcaaaaatcatccagaagtcagggaaattttggggccagataaggatttagaggtggaagacattgttaacactttgctgaccaagaaccttgtgataaggtgtgatcgagtcatgaaaactgtgaggcctggcaagaaaaagctatcgtcatggcctgctcatttggagatacataatgaacaagtgtttactgaaaatgatgggttttttgcttggatgtttctgaaaagaaggaccttgtggcagacaattctttcatttgtttggcctctttttgcactggcagtctgcttatttccagtttacccataccagtgcaagattgttgtactgtactcatgtgctggagctctacttttcattgtctccattcttttgctaagagctgctatctttggtatcctatgggttctccttgggaaacgcgtgtggttcttccccaatataaatgcggaggagacaacttttagagaactcgttcgtttttggcctgaaaaggatgaaggagagcggccaaagtggacatcaagacttttctatgcccttgttgctctattggtgatattactgcttaggcatcatgctcctgacgaagcagctagagccaggtaccaaaagaaggtttctaacataatcgatgacgttcttgaatggtctccgaagttagctatttctggaatgattgaaaagcacactggggctaacattacagaagaaagcaattacaccaccagggcggcgagtagtcacatgcctccatccaccgaaggcaaagcttcagaagatatggacgttgatggggataccgaggctagcttagatgaaacccaagataatgaatatgctgatgatacaagatcaagcggagcttaaaatcagagttttttttgtttgagcaatctttgttgttgtgaatctgcagaattatatagatagcttactgctggcaacaaaagaaatcagggtgtcatgttttgatgttgcatccatatattccctgcaattggttgtgttctaaggtccccagagaataattctcatatacgacaaggccatctctgcattgccaaatggtcatccagccccctgacgccatgcttctagcacacgtagtttcccaagtactacatcatatatacacaactttttcgacgtaaaaaaaataattgttattcagctgaatgtgaattgaattggacactgctagctgtggtgcggtgaaccagtacaggaaggttttgactgttatcgcaataacaacacacacaaagtaatatacattgattaggatttgcaatccatctctacttgttgacatgcctcaaagcgtcagcagctaacaacaataacaagctgctaccatgcgtgagtgcttctatttttcacagggctctgatggtgcctacaccaaactgactgcacccaaaaggaagccagatccatttacatgatgttcgcatcaaactttcagtggatccagcctccagtgttagttgatgtccgtcggccgcacaaacgccacttctgtacacctgctctctttcctgtcaaccagtggttcctgttcacttctttccccgctcttgttcttcaagcttg

SEQ ID NO: 96623 - DNA, 1482 bp, Zea Mays
gctcctctcagcatctcgcgcttcagatctcgcccaccgatctggaactggaattccctcccgatctagcaagcatgtcgtcgtcggcggagaacgaccccacggtgacggtgaccgagcgcggaggcaaggacaagcacgaggacggcggcgacaaggagcagggcggcggcggcttcatcgacaaggtgaaggacttcatccacgacatcggcgagaagatcgaggaggtcgtcgggttcggcaagcccacggccgacgtgtgcggcatccacatcccgcacatcagcctccaccgcgccgacctcgtcgtggacgtgctcatcaagaacccgaacccggtcccgatcccgctcgtggacatcgactacctcatcgacagcgacggccgcaagctggtgtcgggcctcatcccggacgccggcaccatccacgcgcacggccaggagaccgtcaagatcccggtgtcgctcgtcttcgacgacatcaagagcacctacaaggacatccagccgggcagcatcatcccctacctcgtccgcgtcgtgctcctcgtcgacgtccccatcatcggccgcgtcaagatcccgatccagaaggacggcgagatccccatcccttacaagcccgacgtcgacgtggagaagatcaagttccaccacttctccttcgaggagaccaccgccacgctccacctcaagctcgagaacaagaacgacttcgacctcggcctcaacctgctcgagtacgagatgtggctcggcgacgacagcatcgcctccgccgagctcacacagaccgccaagatcgagaagcaggggatcaccaggatgcaggtgcccttcagcttcaggcccaaggacttcggatccgctgtctgggacatgatcagggggaggggcacgggatacaccatcaagggaaagatcgatgtcgacactcccttcggcaacatgaagctgcccataagcaaagagggtggaaccacccgcctcaagaaggaggaggaggaggacgacgacgatgacaactgaagtgaggactgctggggggcgctgctgttacctttcacgaaacgcagcgaagcagaagatgcggggatcgtcgtcgacctgatacccacacccttagcgctggttaagctcttgcctttagcttatggtgctctgttgttttgcattgtctgaacatcctctcacttcctgagtgtacgttcagtttgaggtttcctgtgttgtccatctgaattctttcaaactttgcggttggaactggatgaagaataaaattccaacccgccctggttcttttgtgggtctgtttggaatagatgctgcctgccaatgatcctgaaataagctttactgaaaggctttatccatccagattccagaagctcacggcctcgcgggctcaacctcaaaccaagagtgtaatccgcctgttgcatcacatcaacaagttaacacattggatgtcatt

SEQ ID NO: 96624 - DNA, 1606 bp, Zea Mays
gtctctgtcagccatcaactctccagtgagctgcgagcctacaaggctgtgggcagtgccagcctcaacctcgacctcccccagtcccccaccgaccaccggcctcctttcccgcaggcacgggtgcacggcacgcggtttccactcgcttcgtccgcgttcggatcgccctcagagtaacagtctagcagagcaagcatgtcgtcgtcggcggagaacgaccccacggtgacggtgaccgagcgcggaggcaaggacaagcacgaggacggcggcgacaaggagcagggcggcggcggcttcatcgacaaggtgaaggacttcatccacgacatcggcgagaagatcgaggaggtcgtcgggttcggcaagcccacggccgacgtgtgcggcatccacatcccgcacatcagcctccaccgcgccgacctcgtcgtggacgtgctcatcaagaacccgaacccggtcccgatcccgctcgtggacatcgactacctcatcgacagcgacggccgcaagctggtgtcgggcctcatcccggacgccggcaccatccacgcgcacggccaggagaccgtcaagatcccggtgtcgctcgtcttcgacgacatcaagagcacctacaaggacatccagccgggcagcatcatcccctacctcgtccgcgtcgtgctcctcgtcgacgtccccatcatcggccgcgtcaagatcccgatccagaaggacggcgagatccccatcccttacaagcccgacgtcgacgtggagaagatcaagttccaccacttctccttcgaggagaccaccgccacgctccacctcaagctcgagaacaagaacgacttcgacctcggcctcaacctgctcgagtacgagatgtggctcggcgacgacagcatcgcctccgccgagctcacacagaccgccaagatcgagaagcaggggatcaccaggatgcaggtgcccttcagcttcaggcccaaggacttcggatccgctgtctgggacatgatcagggggaggggcacgggatacaccatcaagggaaagatcgatgtcgacactcccttcggcaacatgaagctgcccataagcaaagagggtggaaccacccgcctcaagaaggaggaggaggaggacgacgacgatgacaactgaagtgaggactgctggggggcgctgctgttacctttcacgaaacgcagcgaagcagaagatgcggggatcgtcgtcgacctgatacccacacccttagcgctggttaagctcttgcctttagcttatggtgctctgttgttttgcattgtctgaacatcctctcacttcctgagtgtacgttcagtttgaggtttcctgtgttgtccatctgaattctttcaaactttgcggttggaactggatgaagaataaaattccaacccgccctggttcttttgtgggtctgtttggaatagatgctgcctgccaatgatcctgaaataagctttactgaaaggctttatccatccagattccagaagctcacggcctcgcgggctcaacctcaaaccaagagtgtaatccgcctgttgcatcacatcaacaagttaacacattggatgtcatt

SEQ ID NO: 96625 - DNA, 2828 bp, Zea Mays
atacatactgcgcgttgcaagctcccacttcctgaggaacaggaactccatgagatccgcggcatccgccgtcccgttcatctgcacaaaaagaccgtaatccttctttttcctctcctccccatccgcggagtgtaaatcgtctctcgctagcgcgttcagtagaaaccctaaaccccgcctcctcccctcgccggggtaggggctacgggtgtcaacgcccgccatggacgcattccggaagcaactggatgtgctcatgggcgctaaccgcaacggcgacgtcgaggaggtgagccgcaactactacgaccgcgacgtctgccggctcttcctcgccggcctttgcccccacgacctcttccagctcacgaaaatggatcttggtccttgttctaagattcactcgcttcaactgcggaaagattatgaagaagcgaaagcaaagggaacagagaattttgacagagaactcgaggatatgatagaaaggctcattgtggagtgcgacaggaaaattcagagggccctgaaacgacttgcggatgacgatgccaaggctgctattgcgatatccgtctcggaggttactctgacggatgacatactgcagctgtcaaaacagatcaaggaaaaaatggtagaagttgatgcctttgattttgaagggagaactgatgataaaataaaggcccaggaagtagtggaagaactcagaactaaaagagctgatatgcaggctaccctcttgcttgatgcttttaacaaggacagagcttcattaactcagcctgctcaacctcctcaagtggcggcagcgccaccaccagctccacccgatgctcgtactcaagaaatgatcaatgaaaagcttaagaaagctgaagagcttggggaacaaggcatggttgatgaagctcagaaagctttggaagaggcagaagctctgaaaaagctggcgcgacgtccggagccaccttcagacccttctaaatatactgccgctgatgtttggattaccgatcaaaagttgcgcctctgtgatatatgtggagcatttctgagtgtatatgacaatgatcgacgtcttgctgaccattttggagggaaactgcatctaggctacatgctgattcgtgacaaacagaaagaacttcaggtaaattcctgcatgcctatgcccaaagtagaagttaaacactggagatttatgaaacagattaatacttccaaggtttccaaaccttaaagacaaataaaacaaaatttacattctgtttggccatcatcagaatacgataatcttggtttattcacttatcctcaatctaaatctataaaggtgcaatttatcaggtgctgagtgtaatgtaccgttttctgctttaaagagttactctgttttgggccttttggcatctgtgagttttcttatctcaagagcctcaaggttctcaccttccctctatatattatttgattctcacattgccgggcactatggttattacgatagtcattacaggaattagtccatgtcgcgtgattggaatctcatgcgatgatcttcatacctatggctacaacagtcactgtctgttgacaaatgtaagcataggagcgtgcggaccatggtatgaaaaaaatcatgtttacttaattgtgacaaactgctcatgtgtctgcttagtatcgattgttgggcagaagctggaggttgcctttttactgcctgagccatattatgtagaccaggtgacaaataatactggttaagttatcctgaaagcacacttcttttgccaacattttgctgtaagtgacaacttgttctgttttctatctgctacctcctccataagtttgcaagttacattttgctgaagcaaccttgcctgtaaagtatcgcccgccctatcttttggaacgttgtctctgattttaaatatgccaaaatatcattatctgtactgtcaataaacaaaatacactgtggcatcttgcaggagcagagaaacaaaaggaggacaggcaaaactgaagatgataggcgatctagagagcagagcaaggatcgaaacggcccgccgtccagggatagagattcagaaaggagagacagggttgagtctcgagatggaagaagagattatgatagggaacgcgataggcgtcacgatagggaccgtcgccatgaccgcgaccgggatagggattatgaccgctcccgcggatatgactcaaggagaagagagcgttcacgctccagggagcgcagcaggcgccatgagagatactaaatgttactccatggctgacagattttggattgctggcgtctgttctggtttgtgttgtgctttgtgtcttatcttccgaagtttcctgttcctgctcgagaaatccgaaagccaatctgcgttctgcatcatgtcatgtcctagtgtcgtactgtttagttatatgccgagaacatctctttcatcaaatgaatatttggaaacaccaacgcacttgacgctaaatgggaatgaagtgtggagtatttaaacgcctctgaaatcaaatgaaagttgtacttgtacgaatctcttccacaaattgcactgtatatgcttgtactgttgcagatttacgatgggtttggactgttctccatccccggagcgcgctcaggctcgacgctacctagctacggacctttatttttggtacctgatgaaacatgatggttttaggaggcgcggtgtttctctggcgaacgatggccggacgtccattttcgagaaccacaagacaagaaacatattcaaaaaaaaaaaactcaa

SEQ ID NO: 96626 - DNA, 2612 bp, Zea Mays
atacatactgcgcgttgcaagctcccacttcctgaggaacaggaactccatgagatccgcggcatccgccgtcccgttcatctgcacaaaaagaccgtaatccttctttttcctctcctccccatccgcggagtgtaaatcgtctctcgctagcgcgttcagtagaaaccctaaaccccgcctcctcccctcgccggggtaggggctacgggtgtcaacgcccgccatggacgcattccggaagcaactggatgtgctcatgggcgctaaccgcaacggcgacgtcgaggaggtgagccgcaactactacgaccgcgacgtctgccggctcttcctcgccggcctttgcccccacgacctcttccagctcacgaaaatggatcttggtccttgttctaagattcactcgcttcaactgcggaaagattatgaagaagcgaaagcaaagggaacagagaattttgacagagaactcgaggatatgatagaaaggctcattgtggagtgcgacaggaaaattcagagggccctgaaacgacttgcggatgacgatgccaaggctgctattgcgatatccgtctcggaggttactctgacggatgacatactgcagctgtcaaaacagatcaaggaaaaaatggtagaagttgatgcctttgattttgaagggagaactgatgataaaataaaggcccaggaagtagtggaagaactcagaactaaaagagctgatatgcaggctaccctcttgcttgatgcttttaacaaggacagagcttcattaactcagcctgctcaacctcctcaagtggcggcagcgccaccaccagctccacccgatgctcgtactcaagaaatgatcaatgaaaagcttaagaaagctgaagagcttggggaacaaggcatggttgatgaagctcagaaagctttggaagaggcagaagctctgaaaaagctggcgcgacgtccggagccaccttcagacccttctaaatatactgccgctgatgtttggattaccgatcaaaagttgcgcctctgtgatatatgtggagcatttctgagtgtatatgacaatgatcgacgtcttgctgaccattttggagggaaactgcatctaggctacatgctgattcgtgacaaacagaaagaacttcaggtaaattcctgcatgcctatgcccaaagtagaagttaaacactggagatttatgaaacagattaatacttccaaggtttccaaaccttaaagacaaataaaacaaaatttacattctgtttggccatcatcagaatacgataatcttggtttattcacttatcctcaatctaaatctataaaggtgcaatttatcaggtgctgagtgtaatgtaccgttttctgctttaaagagttactctgttttgggccttttggcatctgtgagttttcttatctcaagagcctcaaggttctcaccttccctctatatattatttgattctcacattgccgggcactatggttattacgatagtcattacaggaattagtccatgtcgcgtgattggaatctcatgcgatgatcttcatacctatggctacaacagtcactgtctgttgacaaatgtaagcataggagcgtgcggaccatggtatgaaaaaaatcatgtttacttaattgtgacaaactgctcatgtgtctgcttagtatcgattgttgggcagaagctggaggttgcctttttactgcctgagccatattatgtagaccaggtgacaaataatactggttaagttatcctgaaagcacacttcttttgccaacattttgctgtaagtgacaacttgttctgttttctatctgctacctcctccataagtttgcaagttacattttgctgaagcaaccttgcctgtaaagtatcgcccgccctatcttttggaacgttgtctctgattttaaatatgccaaaatatcattatctgtactgtcaataaacaaaatacactgtggcatcttgcaggagcagagaaacaaaaggaggacaggcaaaactgaagatgataggcgatctagagagcagagcaaggatcgaaacggcccgccgtccagggatagagattcagaaaggagagacagggttgagtctcgagatggaagaagagattatgatagggaacgcgataggcgtcacgatagggaccgtcgccatgaccgcgaccgggatagggattatgaccgctcccgcggatatgactcaaggagaagagagcgttcacgctccagggagcgcagcaggcgccatgagagatactaaatgttactccatggctgacagattttggattgctggcgtctgttctggtttgtgttgtgctttgtgtcttatcttccgaagtttcctgttcctgctcgagaaatccgaaagccaatctgcgttctgcatcatgtcatgtcctagtgtcgtactgtttagttatatgccgagaacatctctttcatcaaatgaatatttggaaacaccaacgcacttgacgctaaatgggaatgaagtgtggagtatttaaacgcctctgaaatcaaatgaaagttgtacttgtacgaaagaaacatattcaaaaaaaaaaaa

SEQ ID NO: 96627 - DNA, 914 bp, Zea Mays
gaattagtccatgtcgcgtgattggaatctcatgcgatgatcttcatacctatggctacaacagtcactgtctgttgacaaatgtaagcataggagcgtgcggaccatggagcagagaaacaaaaggaggacaggcaaaactgaagatgataggcgatctagagagcagagcaaggatcgaaacggcccgccgtccagggatagagattcagaaaggagagacagggttgagtctcgagatggaagaagagattatgatagggaacgcgataggcgtcacgatagggaccgtcgccatgaccgcgaccgggatagggattatgaccgctcccgcggatatgactcaaggagaagagagcgttcacgctccagggagcgcagcaggcgccatgagagatactaaatgttactccatggctgacagattttggattgctggcgtctgttctggtttgtgttgtgctttgtgtcttatcttccgaagtttcctgttcctgctcgagaaatccgaaagccaatctgcgttctgcatcatgtcatgtcctagtgtcgtactgtttagttatatgccgagaacatctctttcatcaaatgaatatttggaaacaccaacgcacttgacgctaaatgggaatgaagtgtggagtatttaaacgcctctgaaatcaaatgaaagttgtacttgtacgaatctcttccacaaattgcactgtatatgcttgtactgttgcagatttacgatgggtttggactgttctccatccccggagcgcgctcaggctcgacgctacctagctacggacctttatttttggtacctgatgaaacatgatggttttaggaggcgcggtgtttctctggcgaacgatggccggacgtccattttcgagaaccacaagacaagaaacatattc

SEQ ID NO: 96628 - DNA, 1828 bp, Zea Mays
atacatactgcgcgttgcaagctcccacttcctgaggaacaggaactccatgagatccgcggcatccgccgtcccgttcatctgcacaaaaagaccgtaatccttctttttcctctcctccccatccgcggagtgtaaatcgtctctcgctagcgcgttcagtagaaaccctaaaccccgcctcctcccctcgccggggtaggggctacgggtgtcaacgcccgccatggacgcattccggaagcaactggatgtgctcatgggcgctaaccgcaacggcgacgtcgaggaggtgagccgcaactactacgaccgcgacgtctgccggctcttcctcgccggcctttgcccccacgacctcttccagctcacgaaaatggatcttggtccttgttctaagattcactcgcttcaactgcggaaagattatgaagaagcgaaagcaaagggaacagagaattttgacagagaactcgaggatatgatagaaaggctcattgtggagtgcgacaggaaaattcagagggccctgaaacgacttgcggatgacgatgccaaggctgctattgcgatatccgtctcggaggttactctgacggatgacatactgcagctgtcaaaacagatcaaggaaaaaatggtagaagttgatgcctttgattttgaagggagaactgatgataaaataaaggcccaggaagtagtggaagaactcagaactaaaagagctgatatgcaggctaccctcttgcttgatgcttttaacaaggacagagcttcattaactcagcctgctcaacctcctcaagtggcggcagcgccaccaccagctccacccgatgctcgtactcaagaaatgatcaatgaaaagcttaagaaagctgaagagcttggggaacaaggcatggttgatgaagctcagaaagctttggaagaggcagaagctctgaaaaagctggcgcgacgtccggagccaccttcagacccttctaaatatactgccgctgatgtttggattaccgatcaaaagttgcgcctctgtgatatatgtggagcatttctgagtgtatatgacaatgatcgacgtcttgctgaccattttggagggaaactgcatctaggctacatgctgattcgtgacaaacagaaagaacttcaggtgctgagtgtaatgtaccgttttctgctttaaagagttactctgttttgggccttttggcatctgagcagagaaacaaaaggaggacaggcaaaactgaagatgataggcgatctagagagcagagcaaggatcgaaacggcccgccgtccagggatagagattcagaaaggagagacagggttgagtctcgagatggaagaagagattatgatagggaacgcgataggcgtcacgatagggaccgtcgccatgaccgcgaccgggatagggattatgaccgctcccgcggatatgactcaaggagaagagagcgttcacgctccagggagcgcagcaggcgccatgagagatactaaatgttactccatggctgacagattttggattgctggcgtctgttctggtttgtgttgtgctttgtgtcttatcttccgaagtttcctgttcctgctcgagaaatccgaaagccaatctgcgttctgcatcatgtcatgtcctagtgtcgtactgtttagttatatgccgagaacatctctttcatcaaatgaatatttggaaacaccaacgcacttgacgctaaatgggaatgaagtgtggagtatttaaacgcctctgaaatcaaatgaaagttgtacttgtacgaatctcttccacaaattgcactgt

SEQ ID NO: 96629 - DNA, 1763 bp, Zea Mays
atacatactgcgcgttgcaagctcccacttcctgaggaacaggaactccatgagatccgcggcatccgccgtcccgttcatctgcacaaaaagaccgtaatccttctttttcctctcctccccatccgcggagtgtaaatcgtctctcgctagcgcgttcagtagaaaccctaaaccccgcctcctcccctcgccggggtaggggctacgggtgtcaacgcccgccatggacgcattccggaagcaactggatgtgctcatgggcgctaaccgcaacggcgacgtcgaggaggtgagccgcaactactacgaccgcgacgtctgccggctcttcctcgccggcctttgcccccacgacctcttccagctcacgaaaatggatcttggtccttgttctaagattcactcgcttcaactgcggaaagattatgaagaagcgaaagcaaagggaacagagaattttgacagagaactcgaggatatgatagaaaggctcattgtggagtgcgacaggaaaattcagagggccctgaaacgacttgcggatgacgatgccaaggctgctattgcgatatccgtctcggaggttactctgacggatgacatactgcagctgtcaaaacagatcaaggaaaaaatggtagaagttgatgcctttgattttgaagggagaactgatgataaaataaaggcccaggaagtagtggaagaactcagaactaaaagagctgatatgcaggctaccctcttgcttgatgcttttaacaaggacagagcttcattaactcagcctgctcaacctcctcaagtggcggcagcgccaccaccagctccacccgatgctcgtactcaagaaatgatcaatgaaaagcttaagaaagctgaagagcttggggaacaaggcatggttgatgaagctcagaaagctttggaagaggcagaagctctgaaaaagctggcgcgacgtccggagccaccttcagacccttctaaatatactgccgctgatgtttggattaccgatcaaaagttgcgcctctgtgatatatgtggagcatttctgagtgtatatgacaatgatcgacgtcttgctgaccattttggagggaaactgcatctaggctacatgctgattcgtgacaaacagaaagaacttcaggagcagagaaacaaaaggaggacaggcaaaactgaagatgataggcgatctagagagcagagcaaggatcgaaacggcccgccgtccagggatagagattcagaaaggagagacagggttgagtctcgagatggaagaagagattatgatagggaacgcgataggcgtcacgatagggaccgtcgccatgaccgcgaccgggatagggattatgaccgctcccgcggatatgactcaaggagaagagagcgttcacgctccagggagcgcagcaggcgccatgagagatactaaatgttactccatggctgacagattttggattgctggcgtctgttctggtttgtgttgtgctttgtgtcttatcttccgaagtttcctgttcctgctcgagaaatccgaaagccaatctgcgttctgcatcatgtcatgtcctagtgtcgtactgtttagttatatgccgagaacatctctttcatcaaatgaatatttggaaacaccaacgcacttgacgctaaatgggaatgaagtgtggagtatttaaacgcctctgaaatcaaatgaaagttgtacttgtacgaatctcttccacaaattgcactgt

SEQ ID NO: 96630 - DNA, 1755 bp, Zea Mays
atacatactgcgcgttgcaagctcccacttcctgaggaacaggaactccatgagatccgcggcatccgccgtcccgttcatctgcacaaaaagaccgtaatccttctttttcctctcctccccatccgcggagtgtaaatcgtctctcgctagcgcgttcagtagaaaccctaaaccccgcctcctcccctcgccggggtaggggctacgggtgtcaacgcccgccatggacgcattccggaagcaactggatgtgctcatgggcgctaaccgcaacggcgacgtcgaggaggtgagccgcaactactacgaccgcgacgtctgccggctcttcctcgccggcctttgcccccacgacctcttccagctcacgaaaatggatcttggtccttgttctaagattcactcgcttcaactgcggaaagaaagcgaaagcaaagggaacagagaattttgacagagaactcgaggatatgatagaaaggctcattgtggagtgcgacaggaaaattcagagggccctgaaacgacttgcggatgacgatgccaaggctgctattgcgatatccgtctcggaggttactctgacggatgacatactgcagctgtcaaaacagatcaaggaaaaaatggtagaagttgatgcctttgattttgaagggagaactgatgataaaataaaggcccaggaagtagtggaagaactcagaactaaaagagctgatatgcaggctaccctcttgcttgatgcttttaacaaggacagagcttcattaactcagcctgctcaacctcctcaagtggcggcagcgccaccaccagctccacccgatgctcgtactcaagaaatgatcaatgaaaagcttaagaaagctgaagagcttggggaacaaggcatggttgatgaagctcagaaagctttggaagaggcagaagctctgaaaaagctggcgcgacgtccggagccaccttcagacccttctaaatatactgccgctgatgtttggattaccgatcaaaagttgcgcctctgtgatatatgtggagcatttctgagtgtatatgacaatgatcgacgtcttgctgaccattttggagggaaactgcatctaggctacatgctgattcgtgacaaacagaaagaacttcaggagcagagaaacaaaaggaggacaggcaaaactgaagatgataggcgatctagagagcagagcaaggatcgaaacggcccgccgtccagggatagagattcagaaaggagagacagggttgagtctcgagatggaagaagagattatgatagggaacgcgataggcgtcacgatagggaccgtcgccatgaccgcgaccgggatagggattatgaccgctcccgcggatatgactcaaggagaagagagcgttcacgctccagggagcgcagcaggcgccatgagagatactaaatgttactccatggctgacagattttggattgctggcgtctgttctggtttgtgttgtgctttgtgtcttatcttccgaagtttcctgttcctgctcgagaaatccgaaagccaatctgcgttctgcatcatgtcatgtcctagtgtcgtactgtttagttatatgccgagaacatctctttcatcaaatgaatatttggaaacaccaacgcacttgacgctaaatgggaatgaagtgtggagtatttaaacgcctctgaaatcaaatgaaagttgtacttgtacgaatctcttccacaaattgcactgt

SEQ ID NO: 96631 - DNA, 702 bp, Zea Mays
atacatactgcgcgttgcaagctcccacttcctgaggaacaggaactccatgagatccgcggcatccgccgtcccgttcatctgcacaaaaagaccgtaatccttctttttcctctcctccccatccgcggagtgtaaatcgtctctcgctagcgcgttcagtagaaaccctaaaccccgcctcctcccctcgccggggtaggggctacgggtgtcaacgcccgccatggacgcattccggaagcaactggatgtgctcatgggcgctaaccgcaacggcgacgtcgaggaggtgagccgcaactactacgaccgcgacgtctgccggctcttcctcgccggcctttgcccccacgacctcttccagctcacgaaaatggatcttggtccttgttctaagattcactcgcttcaactgcggaaagagtatccttcattttacctcattatctttgtttttccttctcttaattgtttttttggatttcttgtgcaaaatactgtatacacatgttttcctgagctattggtagttatgaagaagcgaaagcaaagggaacagagaattttgacagagaactcgaggatatgatagaaaggctcattgtggagtgcgacaggaaaattcagagggccctgaaacgacttgcggatgacgatgccaaggctgctattgcgatatccgtctcggaggttactctg

SEQ ID NO: 96632 - DNA, 528 bp, Zea Mays
atgggtcttccatcctttctcggcgtcgtagactctgacgcgcttctgttatcatcacatttttcacatagaagaatcgtcaacaactacacaacctctatgtacgtaacttctcatgagcagaaagcgaacacctacccaaaatccagcgatgaacaacgagccatcgacgaagaactgcgagacgtaggcctcgctgtccacgtcgtcgatgcccacgacccctttggtggggatgtgctgcctgccgaggtaggatcgatcggccgcggggaacccgatgccgcccgcaccgacacgagcttgaaggtcgagaagggcatccatctcctgttgctggcagctggaacacgaggccgcgagcaccgagcgaagggccgaggctgcgccatgcgcgcaggcgacggggggcgacgcgtcgacggtgctagatctggctcgccgctcgcggggcacaatggtggacagtggcctgctaggtcgaggccctcgagggagaggcggatgcggcgctgtcgaattggataa

SEQ ID NO: 96633 - DNA, 107 bp, Zea Mays
agaaaaaggtgttcaaagttggactatcagctaggtggctgaattctgaattttcagatttggaatggtatataagtctgaatttcagtggttgtgacagactttgg

SEQ ID NO: 96634 - DNA, 2074 bp, Zea Mays
atggcgaggccggaggcaaccggaggaggaggtggtgccgtggtggtcggtctccgcgcccgcgcccgtgtgcgtggtgtttttgcgggcggtgggagcggcggcggtgtggggaggagagtcggggggagtcctgccgcagtgggacagcagaggcggggctggaggggctggcagcgccggacgggcggcgcaggagggaggacggcctggagcgcggcggcacgcagaggctctgaggcggggctggaggacggcctcgagagcagcggcctggagcggcctcgagagcagcgccctggagggaggacggcctggagagcagctgcctggagcggcggtggcctggagcagcggcacgcagaggcgggcctggcggcgccggacgggcggcgcaggagggttggagcagcggcagcggcggcctggaggctggagcgcgccctggagtgcggcggctgtcataaaaactttttgcagtttatgactgaaaatggtatgtctactggtgttatcttatatgatggcgtagaggattgtatgacaacagttactggaagagaaatgggtctaaactttctaaattacatttttaataaatttaaggaaagaaagtgctggagtgatggctgggaattaagtgatatggaaatagaaattgaggcaggaagaaagtttgtcattaccaagtaggctgacgcagatcttactgttgaagagggcacacaaaatttatttgtttatcttggtctcctggtaccgtattataagaaagaaaactcaattctagcatttttttattccttgagaaaaaatatcttatactttcatgattttaagaaatttctaataaaatggaaaatgtttgtcaaactcattagatcagtgttagctttaaaagcgtctttgatcagatcgaccttaatctgtgagatgtccacagttatcgcattgcagcttaaattatctaattctgcatatcatcaagtgttatcaaaaaatgtcaatattggcgtgcttcaataaaatgggttatgccacacggacaggtctaccactacaggaacaatatctctttaatgtattcctatgataagtggtgttgtaacttatggcacgtaatgtggtattgaagaaacttccttcagcatttcctctactcttttacgtaggtcaggacatgcttaacgaagtttcttaaataccacattacgtgtcataagttacaacaccacttatcataaaaataccttaaagagatattgttcctgtagtggtagacctgtctgtgtggcataacccattttactgaagcacgtcaatcttgacatttttttataatacttaataatatgcagaattagataattaaagctgcaatacgataattgtagacatctcacagattaaggttaatctgaccaaaggcgctttcaaagctaacgctgatctaatgagtttgacaaaccttttccattttattgaaaaattcttaagatcagaaaagtataatatatcttttccgaaggaatcaaaaaatgctggattgagtttccttttttataatacggtaccagaaaaccaagatgaacaaatatattttgtgtgtcatcttcaacagtaagatctgcgtcagcctccttggtaatgacaaactttcttcttgcttcaacttccatttccatatcacttaattctcagccatcactccaacactttcctctctcgaatttattaaaaatgtaatttagaaagtctacactcatttctcttacaataactgttatcatacaatcctttacgtcatcatataagataacaccagtagacatatcattttcagccataaactgtaaaaaggttttatgactgcaaatgcaaattaaacacatatcactaacttaaacaaatagaaattaatttcaggtaataaaagtagaaattgatttattttattatttaaaatttggaatagctgataaatgtacccctttgtgtgtgacacattcaatatacgatcttatttacttgtgggttcctccacaatattcacatcctcatgagggaatgtagc

SEQ ID NO: 96635 - DNA, 693 bp, Zea Mays
atggcgaggccggaggcaaccggaggaggaggtggtgccgtggtggtcggtctccgcgcccgcgcccgtgtgcgtggtgtttttgcgggcggtgggagcggcggcggtgtggggaggagagtcggggggagtcctgccgcagtgggacagcagaggcggggctggaggggctggcagcgccggacgggcggcgcaggagggaggacggcctggagcgcggcggcacgcagaggctctgaggcggggctggaggacggcctcgagagcagcggcctggagcggcctcgagagcagcgccctggagggaggacggcctggagagcagctgcctggagcggcggtggcctggagcagcggcacgcagaggcgggcctggcggcgccggacgggcggcgcaggagggttggagcagcggcagcggcggcctggaggctggagcgcgccctggagtgcggcggctgtcataaaaactttttgcagtttatgactgaaaatggtatgtctactggtgttatcttatatgatggcgtagaggattgtatgacaacagttactggaagagaaatgggtctaaactttctaaattacatttttaataaatttaaggaaagaaagtgctggagtgatggctgggaattaagtgatatggaaatagaaattgaggcaggaagaaagtttgtcattaccaagtag

SEQ ID NO: 96636 - DNA, 990 bp, Zea Mays
tggccaacggtgagtagacctaaagacttgggcagacttggggttctcgaccttgaaatgtttggacgcgcgctcaggctccgctcgctctggcaggagtggacggatgactcaaaaccttggcaagacctgtaggttccatgcaacaaacttgatcgcttgcttttccaagtttccacctccatagccgtcggtaacggtgccaaagctaagttctggtaggatagctggctagacggcgaagccccttgcaacctagcgccccacctctttgctctggtcaggaggaaaaacatgtcggtactacaggagctaacaagcgacgcctggatcaatccgctaagaaggaaaatcacaatgaccatgcaaattgaggaattcatcgcgctctggattaggctccagcaaatccacctacagcaggatgttcaagacatcattacttggaattggtcgtcaggcggcatctactcctccaggtctgcatgcaaagcccagttctttggctcctactatggccacaaccttgatctcatctggcgcgccaaagcggaaaacaaatgcaaattattcgcttggattctcatccaaaacaagatcctcacggcggataacctcgcgcggcgcggctggcctcatcagacatcttgcaccctgtgtaacggacccaggaaatccagattccatttatgcttgacttgccccttcgcacaagaggtttggaaccgcgtccttgcctgggagaacatgtctctaccacagcaggccgactcgcggaacgccacaaatctgggtgattggtgggagaggatggaggcccttttcccaaaatgccgcaggaggaacttcaacagtgtcgccatctacataatgtggaacatttggaaatagcggaatcgaggaattttttaacatagttcgctttcttcgctccaggtagcggggtgtgtcaaggagagcctaacgctatttagaggtgcggatagtttt

SEQ ID NO: 96637 - DNA, 684 bp, Zea Mays
atgaaggacaagaatgccgaaggggtagcagctcaaggtccttcagaggtagctatagaggaatcgaccaaggcgcgtgttgaaagcgctcctcagaagaagtgtcgaatcaaaatagtgatgaaggccatatgcaagactccaccggcagaggcgaagaagaaagcttcgattgctgaggaaaatgttgaagtggccatgactactgaggcggtagggaacaaaagagatatttgtgtgagctatagcactagttcactgctggagtgtggtgctcctcgagtctgcaagtctgtaaaaccctctccacagtcccttattctcttgcttcagctggtgagtgccaaccccctgagtggtgaactggtgaccacgccgctctgtgaaccgtcacgcatcgacgccgtgctcgaggttgcggcggaagtcgatgccgctgcgagggagcagctcgatcgagtcggacgcgaagatgccgcgtgcgtcattgaactcgcgaaagttgaactaattccagacgaagtggcgggggccagcaccgagtgccggcagcttgccgcaaggctcggagaaggtgtggccgagctggatgaggtgcagcatgtcgacattggccttgagggtggcgccgacgggtcgacagaggaaggcagacttaggggaaatgccgaggtacggatgtag

SEQ ID NO: 96638 - DNA, 2145 bp, Zea Mays
atgaagaacgtagaccgacctccatctaatccaaaacggattataattcagtctactcaagagtgctttagcgtcgacataccccgtgttctggcggaaactgttagacaaaaaacaaggcaggctgctgatgaggatgatgactttatgccattatcgaagaagcgtaacatggatgacagtcctccaaaagtcttgaagaagatagttacaaagcggaggaaacagaggcttaatgtgagatgtaatccccaagacgtattagtaagcatccagatattaaatgacagacagcgccaagctattgcacggagggggttctccagtattcttgatatgagagttgatgcactcggcagtagatctcatttagcttggctgatggaaaaacttgaccataatgacatgacaattcgagccggcccaaggaaggagctcaaaattacaaaggatgcggtgcaccttattttggggttaccaaatgctggtggaggaacggcattgggcattgatgaagctattgctgccaacaatttaagggctgaacttggtttatcgaaagaagattttggggttgcagctcttcaagatcgtctgaggaaagggtctgatgatgatctaagcattagatccttcttcctgatactgttcaataggttgttgttccctactgccagctggggaataaccaaccatgagctgtattatttggatcatcttcatgactcagcgacacctcagaataaacgtggaacaccacgcatcaaatattttgataggaatattattcaagcactgacaagagctgacaagggcaagcacacaattcacattgaactcccgctcatcagggatttgatatcaagcaagctgaatcagcttctatcccgccaccgcctgggtttcatagagaagttgtcacattatgatacggagttaattgatgaggtcctccgtgctgagtcgggggacaatgaagatggttatgatgtgcagaaaacaactacaaaatcagatgatattcttccccagacggcagaaagttgccccgatgaagctgatattcatccactggttcaaacaaatgtaacgaaacagatcaaaacacctacaaccccagtgggtaaacatggtgacggtggcaagaacatgccgatcaacacaaacgtcactcctaaagcaacaccacatacgaaatcttctgcgccgatatttgatgcgacgccgcaaataaagtctactggcggcgtccaacaagcggcagaaacagatctccccgacagtggtccatgctttgatcagactccatctgaacatgttcctgtcgaaaccgatccagctacaaacactcctcaggttgaacaggtttcacttgattcggagatgcaaactatgttagctctacgcgaatatttgtgtggtacacaatctgacaccagcaggaccattttagattatggtgaatattcttcgacatgttctgatatatatgaatcttttgccgatgggaagtgtctcaacaatgtgttcatgcagtgcttcatccagtgcgttgatcatgatgccaaaaatcagcaaccctccatgagttcgaacagattaattcttgatgttaatgttgggtcactactcaactttgaggaacaggaacgacacagtcggaaccctcaaccttttgatgaatctgtactgcacacacttctagacaatgcattgcccgagacagatgaaatggataaatgcaaagcgatcatggttcccatggtaagcagggggcactggacattgtatgttgtaaatacagtgaagaagtgcattcacattttagattccaatccatatggggcaacacttggtggtaccacatggaaggactatcattttgccggattagacttagggggcagaaatataccatgggctaaggttattatgagtagattaaacaaagccatacaacatgtacggctcaggacatgctttcccaaatttggcaacttcacagttggcttgtgcccaaattgtcctaacatgctagcaggatccaatgattgtaggttttatgttatgggatacattctcttttatgactgcgtcgaaggatctctgcggtcagacatagaagcatcatgcttcacagtctga

SEQ ID NO: 96639 - DNA, 1820 bp, Zea Mays
ccttgtcctcccaccccgccatttccgccaagctgtcgtcagcctgacgcggtaaccgtgtggactccgctcgggtgggggtggcggcccgaagcccaaaccgcatgggctcgcggccgagctgaccgagccggacccagacccactcgctcctccgcccccgccgcaatggaggagccggcggcggcctctgccctggaggcgcgcggcgacctgcgctcggcgcttcccttcctccccgtcgtcctccgcggcggcgcactcttctggccgccggcggcgcaggagtcgctccgggcgctcgcgctcggccccgacgtcagccgcgtcgcctcgggggacgttctcgccgacgcgctcaccgacctccgcctcgcgctcgccctgcccgcgctgcccccgcgcgctgccgacggcctggcgctcttcttcgacgacctcctttcacgcgcccaggcgcggggctggttctccgaggtcgtccccaacctcgcacgcctcctcctccgcctccccaccctgctcgaggaccactacgccaaggctggccacggcgcctccgggctccgcgtcatggcgtcgcaggacgcgggcgtcgtgctcctcagccaggagctcgtcgccgcgctgctcacctgcgcgctcttctgcctcttccccacggccggtagggcccaggcgtgccttcccaccatcaatttcgatggcctgttcgcgccgctgattcacaatgcgaggcaaagccaggagcagaaagtgaggtgccttgttcactatttcgagagggtgactgattctatgcctactggtttagtttcgtttgaacgcaaagttcttccccgccgagcgttctctgatggcgttccctatcctgacatccatgcgtgggtggcatctagtgcaccactctgccaattcacggtattttcatcaggtttcatagaagatgaagaacaagaagcccttcaagttgactttgcaaataaatatttggggggaggtgccctttcctggggttgtgtgcaggaagagatccgcttcatgataaaccccgaattgattgtgggtatgctattcttgtcttgtatggaagataacgaggctatagaaatctttggtgcagaacggttctcacagtatatgggttatggttcctcctttcgctttgtcggtgactatttagataccaaaccctttgattcgatgggcagacggagaactaggattgtggctatcgatgctttggactgtccagctaggttacactacgaatctggctgtctcctaagggaagtgaacaaggcattttgtggatttttcgatcaatcgaaacaccatctctatgcgaagcttttccaggatttgcacaacaaggatgacttttcaagcatcaattccagtgagtacgtaggagtttcaacaggaaactggggttgtggtgcttttggtggaaaccctgaaatcaagagcatgattcagtggattgctgcatcacaggctcttcgcccttttgttaattactacacttttgaggacgtgtctctgcaaagattagaggaggtgatccagtggatacgacttcatggctggacggtcggcgagttgtggcatatgctcatggagtactcatctcagaggctgggaggagaaacgcacaagggttttttggcctggttgcttcccagcgacaggcccaagaatcaagtgcattacatgtccgaatagcaatagacccggtttttgtgaggagtgtgtgcatgaacgaagttattgctgacaaaaaaaatgaaataaagataaaagcgtatgtatcagttgcc

SEQ ID NO: 96640 - DNA, 1663 bp, Zea Mays
ctccgctcgggtgggggtggcggcccgaagcccaaaccgcatgggctcgcggccgagctgaccgagccggacccagacccactcgctcctccgcccccgccgcaatggaggagccggcggcggcctctgccctggaggcgcgcggcgacctgcgctcgcgctcggccccgacgtcagccgcgtcgcctcgggggacgttctcgccgacgcgctcaccgacctccgcctcgcgctcgccctgcccgcgctgcccccgcgcgctgccgacggcctggcgctcttcttcgacgacctcctttcacgcgcccaggcgcggggctggttctccgaggtcgtccccaacctcgcacgcctcctcctccgcctccccaccctgctcgaggaccactacgccaaggctggccacggcgcctccgggctccgcgtcatggcgtcgcaggacgcgggcgtcgtgctcctcagccaggagctcgtcgccgcgctgctcacctgcgcgctcttctgcctcttccccacggccggtagggcccaggcgtgccttcccaccatcaatttcgatggcctgttcgcgccgctgattcacaatgcgaggcaaagccaggagcagaaagtgaggtgccttgttcactatttcgagagggtgactgattctatgcctactggtttagtttcgtttgaacgcaaagttcttccccgccgagcgttctctgatggcgttccctatcctgacatccatgcgtgggtggcatctagtgcaccactctgccaattcacgtaggtattttcatcaggtttcatagaagatgaagaacaagaagcccttcaagttgactttgcaaataaatatttggggggaggtgccctttcctggggttgtgtgcaggaagagatccgcttcatgataaaccccgaattgattgtgggtatgctattcttgtcttgtatggaagataacgaggctatagaaatctttggtgcagaacggttctcacagtatatgggttatggttcctcctttcgctttgtcggtgactatttagataccaaaccctttgattcgatgggcagacggagaactaggattgtggctatcgatgctttggactgtccagctaggttacactacgaatctggctgtctcctaagggaagtgaacaaggcattttgtggatttttcgatcaatcgaaacaccatctctatgcgaagcttttccaggatttgcacaacaaggatgacttttcaagcatcaattccagtgagtacgtaggagtttcaacaggaaactggggttgtggtgcttttggtggaaaccctgaaatcaagagcatgattcagtggattgctgcatcacaggctcttcgcccttttgttaattactacacttttgaggacgtgtctctgcaaagattagaggaggtgatccagtggatacgacttcatggctggacggtcggcgagttgtggcatatgctcatggagtactcatctcagaggctgggaggagaaacgcacaagggttttttggcctggttgcttcccagcgacaggcccaagaatcaagtgcattacatgtccgaatagcaatagacccggtttttgtgaggagtgtgtgcatgaacgaagttattgctgacaaaaaaaatgaaataaagataaaagcgt

SEQ ID NO: 96641 - DNA, 2158 bp, Zea Mays
ctactcactaccggaattgaagcagtcttgtacctttggttggtggcattggcgcgctgcaccaaactctgtgcgcacagaatcaatgcgaccgtaccctcgtcgtcgccgccattgctgcatggtccatatgagatggagtacgtacgtacagtacaccctgtacacggcacaccgtatatatatgctgctagtatagtatgtattgtattattcgttgccgtacaccgacaggtttagcagccagagctcgccatgcatgtagttcgttaccatcccatttctttttacagtttcttggtccaggagctccaggtccagctagctagctagctagctagtatataaggacaagataccacaccggtagcccgccgcacagagtggtaagcatggcgagcaccacagacaaccgcctcgacctcggcctcctcctcctcctcctcgtggccgccgccaccgtcgtcctcgccgtggccgcggccccggcgcatacaccgggaggcaatactgctacccctccgccgccgttccggacggtgtacgcgttcggcgactcgttcacggacacggggaacacgcggtcgacgacggggccctactcgttcggctacgtgtccagcccgccctacggcgccaccttcttccaccgctccaccaaccgctactccgacggccgcctggttgtcgacttcctggccgaggcgctggcgctgccgtcctacctcccgccctacctcgccgtgtccgtctccaacgccaacgccacggcggccggagccggcgtcaacttcgcggtggccggcgccacggccatcgagcacgacttcttcgcgcggaacaacctcagcatcgacgtcacgccgcagtccatcatgacgcagctgggctggttcgacgcgcacctgctccggtcctcctcctcctcctccgccgccgccgccgccgacgcgctcttctgggtgggcgagatcggcgccaacgactacgcctacacagtcgtcgcccgcgacaccatccctcccaagctcgtccgcaccatggccgtccagagggtcaccgccttcgtcgagggcctgctggagcgaggcgccaagtacgtgatcgtgcaggggctgccgctgacggggtgcttgccgctggccatgacgctggcgcgcgccgacgaccgcgacgccgtgggctgcgccgcctccgtcaaccgccagagctacgcgcacaaccgccgcctcctggcggccctccgcgcgctgcgccgccgccacccggccgccgtcctcgcgtacgccgactactacgccgcgcacctcgccgtgatgcggagccccgcgcgccacggcttcgccgagcccttccgcacctgctgcggctccggcggcggcgcctacaacttcgacctcttcgccacctgcggctcgccgcaggtcaccacggcctgcgcgcgccccgccgagtacgtcaactgggacggcgtccacatgacggaggccatgtacaaggtcgtcgccggcatgttcttcagtggcgacggctactgccgcccagcgttcaaggacctgctggccatgaaagcccgccaggggaagccgtgattttgagacaatcagaatgcacgttccaattacaataagtagagctgcatgcgtgacgaatccatgtcatcttcatcgtgaacccttaaccatttatcaggcatttataattggatccacatacgtatgatgatgatgagcacaaaggatttaacttctaatgatgacaacacatgaattgtactagaaagaaacgcaacaattccagactccaagaacaacagcacgactcgtttccaggctctaagttctatcgacttccaccgattttttgtctccagaaacagatacccatgcatggcaagactgcaggaccagcaggtgaaaacaattgaatcatagccaactcctgacaaggataaacataatgatgataccgcgaccagctgtagatcttagcagaagcccagattcgggaccaagaaaatgatgtgtgcctagccctgtaacccatctggctggcttctccgacgatatcatttgtcaatttgcccaccttaatatacctcgtatatacaactcaatcctgtacaatgttctcacgaccacctagaaatttgagagag

SEQ ID NO: 96642 - DNA, 1303 bp, Zea Mays
catggcgagcaccacagacaaccgcctcgacctcggcctcctcctcctcctcctcgtggccgccgccaccgtcgtcctcgccgtggccgcggccccggcgcatacaccgggaggcaatactgctacccctccgccgccgttccggacggtgtacgcgttcggcgactcgttcacggacacggggaacacgcggtcgacgacggggccctactcgttcggctacgtgtccagcccgccctacggcgccaccttcttccaccgctccaccaaccgctactccgacggccgcctggttgtcgacttcctggccgaggcgctggcgctgccgtcctacctcccgccctacctcgccgtgtccgtctccaacgccaacgccacggcggccggagccggcgtcaacttcgcggtggccggcgccacggccatcgagcacgacttcttcgcgcggaacaacctcagcatcgacgtcacgccgcagtccatcatgacgcagctgggctggttcgacgcgcacctgctccggtcctcctcctcctcctccgcccgcgacaccatccctcccaagctcgtccgcaccatggccgtccagagggtcaccgccttcgtcgagggcctgctggagcgaggcgccaagtacgtgatcgtgcaggggctgccgctgacggggtgcttgccgctggccatgacgctggcgcgcgccgacgaccgcgacgccgtgggctgcgccgcctccgtcaaccgccagagctacgcgcacaaccgccgcctcctggcggccctccgcgcgctgcgccgccgccacccggccgccgtcctcgcgtacgccgactactacgccgcgcacctcgccgtgatgcggagccccgcgcgccacggcttcgccgagcccttccgcacctgctgcggctccggcggcggcgcctacaacttcgacctcttcgccacctgcggctcgccgcaggtcaccacggcctgcgcgcgccccgccgagtacgtcaactgggacggcgtccacatgacggaggccatgtacaaggtcgtcgccggcatgttcttcagtggcgacggctactgccgcccagcgttcaaggacctgctggccatgaaagcccgccaggggaagccgtgattttgagacaatcagaatgcacgttccaattacaataagtagagctgcatgcgtgacgaatccatgtcatcttcatcgtgaacccttaaccatttatcaggcatttataattggatccacatacgtatgatgatgatgagcacaaaggatttaacttctaatgatgacaacaca

SEQ ID NO: 96643 - DNA, 807 bp, Zea Mays
atggcgcggttcagggaggatcccagagcacgcggcgaacagggagcgagctgcgccagggaaaatcgcgacgcacaggggaggagcttggggacgccggtcatggaaacaggggcagggcgagctccatggcaggtggccgagcagaaagtgtcagttgagggagatgaagacatggctgggggcaacaacttgatccatgcgctggggagaagaaggactcgacgaccagcgagctgggagaggcaccgagttgcaggagggagtagggagggcgcggcatggctggataggagctcggctgggaactgctcggcgcagtggagcaggggcggacgagcgcgccagggagagagcgccgcgagctgggcaacggcacaggtgagcagagagaggtgagattcggcgagcgcagtgtggatttggccctccacggccatgcgcgcgagcagagggaggtctgcaatctgggcagggagggagcgcgcggccgagcggaggtggacgccagagcgcggctggggagaacgccggcagagaggagcgccatggaacttcggctgggcgagctagaagaagaagctggggaggaactcgaccggcaccatggctagaactcagctgggaagaacaggaacgcgatttcgtgaattggagcaccggcagaggagatttgtaggagcccaagggcggtggcgcctgaaaaatctcagggaagggcggcgggataaggatcgatcagcgcacagaggaagaatgaagctagagcttgcggctgctgaaggaaaaaaaatcagccggcgactg

SEQ ID NO: 96644 - DNA, 576 bp, Zea Mays
gaaatggaggttctgggagtgagaagatgaggatcaactgctgcagcatctggcgcaacaaggcactgaggaggatgtgtttcagtgaaaggggtgctgtgagcagcacccagtgtgtgctcacatcagatgctggcccagacactcttgtcgtccgaacatcctttcagaggaattatgctgatcctaacgaagtcactgctgtcattttgggtggtgctggggaagacgaccggggaaggaaaagccagcaagagggacacaaagagcaccagcagcacaagttgaccctcccaactgtttcgaattataccattcacgatgccactgacggcaccgacaatggcaaacaggaaggatagcccatgtatgtattataactgtgatgtaggatagtcaatgtataaccgagtcaataacatataaggggaaagatgagtgtgatttcttttttattgcatcttcgcgatttttttgtgccattgatttagatcagtatgctttttttatacttattacacataacggtgctggtacttgttcatggcgttttttgtcgtcctactgatgttgcat

SEQ ID NO: 96645 - DNA, 85 bp, Zea Mays
caggtgtgcttcacctatgcagttcagcagtgtgcttcccctagagggaaactccggacgactacaacgatcgccctaggcacaa

SEQ ID NO: 96646 - DNA, 696 bp, Zea Mays
cataaacaacctggatatgttcactggaaagtagttacacatacgaatggacgattagctttagctgtgtgtttacatacaaatatcaaaccgaggaaagcgaccatgttaaataaataaataaaatatcgcagagattttgcaacccctgcacgaaacgaaaccagtctccgctcctcagaaggaggcgaaggctcccgcggcgacagcggcggcggcgcagacgcgcgccgcggcgctggcgagtgcgacgggcgcgttgctggcggcggcgccgcccgcggttgcttcggcgccgggcggggcggggacgtcgtccctgggctcagtcatggtggccccgttgggcgcgccgacaggggcggcgtcctcgtcgtcgtcgacggcgtcctcgtcagaggccggcttgtcgccgtcgaaggaccccagcggggtatgcgccacgggggtcaggatggtgggcatggcgttggcgtcgtcggcggatgcgacagaggccagcgcagcgacgagcgcggcggcgaggagcagcagcagcagcgcccggtgcgaggccatggcggcacggacggagatcacgctcggcgcctttgcgtgggaacgggatgggtcgcaaaataagcaggttatcgtacgtctttgttcttattaggtctatatatgtatatagaaagaagaagaagcgaagcagctgcg

SEQ ID NO: 96647 - DNA, 1916 bp, Zea Mays
ctgcccgtcccgtgccgccccacttgcagttggagtcgccactcgcttgctgtggtcgggtactcgggtcggcccaccgcctcctaccagcctccgaccaccgcctcgccacttgccccgcgtgcgtcccccgtctccaactccaatggcggcgccctcccacctccacctcccgggctgcccccaaaccctagccctgcccctgccctggccacggggcttctctgctccgcccggcctcctctcccgctcccgacgcctccgcccggtcgccgcgctcgggcccgccgacgccggcgacttgctcggccgagtcgaggcgttactctacaccgtcgcggacgctgctgtctccgcggagcccgtcgcggcggccgggaccaaggaggccgccgccggtgactggctctccagcatcaccaattccatggagaccgtgctcaaggttgagtctgcacttgcaatgaggtcactgcaacctcaagtgaagaccattcaagaacgatatgctggtgatcaggaaaggatacagctcgaaactgctcgcttatacaaattatctggtgttgacccacttgcagggacttctgactgaaggctttttttggataccttctttggccggtcctacaacaattgctgctcaacaaaatggccagggaatatcctggctttttccttttactgatggtcatccacctcttggctggtcagacactttggcatacctcgtgttaccagttcttcttgtcatttcacaatacatatcttctcaagtaatgcagccaccacagagcaatgatcctagccaacaaggtgctcaggctgtaacaaagttcttaccattgctaattggttattttgctctttccgtgccttctggactaggtttgtactggcttacaaataatatcctcagtactgcgcaacaagtgtggcttcaaaagcttggaggtgcaaaaaatcctgtcaaagaatatattgacaaactttcaagagaagaatccaccaatgttcagaagaatggatccactgttcagagcaaacctctgcccaaacttagtaaagcccagcccagccaagagctgaaaccaactggaccgcaacgtggggaaagatttaggaaactaaaggaggaagaatcaaggagaaaagaggttctggggcaagcagaacaatcagaacagtcaagttttgaatctagcgtcgtagatggagcacaaatttctgatgcgtcttctggagacaaaaatgatgaacaggagcctcatgaaattggaccgatcgtagctaatagcaacggtggagttaaccatagtagaaatgaaaagactgagaatttttcatcagaaaaggaagcagctgacgatcattcctcggtaagcaaacctatgttaccggatgcccacaaattaacggaccaagacaatggaaacgatgcagtatagagagtggatgttagcgtagctagtcgttctgctgctttgatgcgttcactgaaaatcagtggctcagacgtgtctgcttcatcacgctgaggtatagctgtgaggcatagtgagcaatagtttcacgaacatctatcaagaatcacacgaagatgcagcaggaggcaaatttgtttcaaactagaaaccacgctctaggtctaagccctttttcttttcccccacgaatttgtgctgtactgtaggttatgtgatgcatataagagtagtaggtgaaaggattctgagatatcaaagggattctgtccataacgtgtaatgttgttcagttgggggtgggatggatgcaaaggtggcaattcgacattttactacttgtcgtgacaataattttggaatggatgatgatgcctgtcttgagaagcacgtgcaacctcaaactttgacgttgctgatgtaaaaaaaaaa

SEQ ID NO: 96648 - DNA, 2139 bp, Zea Mays
ctgcccgtcccgtgccgccccacttgcagttggagtcgccactcgcttgctgtggtcgggtactcgggtcggcccaccgcctcctaccagcctccgaccaccgcctcgccacttgccccgcgtgcgtcccccgtctccaactccaatggcggcgccctcccacctccacctcccgggctgcccccaaaccctagccctgcccctgccctggccacggggcttctctgctccgcccggcctcctctcccgctcccgacgcctccgcccggtcgccgcgctcgggcccgccgacgccggcgacttgctcggccgagtcgaggcgttactctacaccgtcgcggacgctgctgtctccgcggagcccgtcgcggcggccgggaccaaggaggccgccgccggtgactggctctccagcatcaccaattccatggagaccgtgctcaaggttgagtctgcacttgcaatgaggtcactgcaacctcaagtgaagaccattcaagaacgatatgctggtgatcaggaaaggatacagctcgaaactgctcgcttatacaaattatctggtgttgacccacttgcagggacttctgactgaaggctttttttggataccttctttggccggtcctacaacaattgctgctcaacaaaatggccagggaatatcctggctttttccttttactgatggtcatccacctcttggctggtcagacactttggcatacctcgtgttaccagttcttcttgtcatttcacaatacatatcttctcaagtaatgcagccaccacagagcaatgatcctagccaacaaggtgctcaggctgtaacaaagttcttaccattgctaattggttattttgctctttccgtgccttctggactaggtttgtactggctccattgatacagttcctccaaataatcagaatatttatcagtattgcctttaacaagtcggaatatgggtttttttttccgagaagaagagaggttcaacatagaccagttacaagatgcaatcctctttacagagggcggaaacagagataataaaaagttccattaaaacaaatctaggctacaactaacctgaaaacagggagcaacatgaccaggcaggaggctatgactaagagccctcaacaggagcagtgaggaaggcttacaaataatatcctcagtactgcgcaacaagtgtggcttcaaaagcttggaggtgcaaaaaatcctgtcaaagaatatattgacaaactttcaagagaagaatccaccaatgttcagaagaatggatccactgttcagagcaaacctctgcccaaacttagtaaagcccagcccagccaagagctgaaaccaactggaccgcaacgtggggaaagatttaggaaactaaaggaggaagaatcaaggagaaaagaggttctggggcaagcagaacaatcagaacagtcaagttttgaatctagcgtcgtagatggagcacaaatttctgatgcgtcttctggagacaaaaatgatgaacaggagcctcatgaaattggaccgatcgtagctaatagcaacggtggagttaaccatagtagaaatgaaaagactgagaatttttcatcagaaaaggaagcagctgacgatcattcctcggtaagcaaacctatgttaccggatgcccacaaattaacggaccaagacaatggaaacgatgcagtatagagagtggatgttagcgtagctagtcgttctgctgctttgatgcgttcactgaaaatcagtggctcagacgtgtctgcttcatcacgctgaggtatagctgtgaggcatagtgagcaatagtttcacgaacatctatcaagaatcacacgaagatgcagcaggaggcaaatttgtttcaaactagaaaccacgctctaggtctaagccctttttcttttcccccacgaatttgtgctgtactgtaggttatgtgatgcatataagagtagtaggtgaaaggattctgagatatcaaagggattctgtccataacgtgtaatgttgttcagttgggggtgggatggatgcaaaggtggcaattcgacattttactacttgtcgtgacaataattttggaatggatgatgatgcctgtcttgagaagc

SEQ ID NO: 96649 - DNA, 2091 bp, Zea Mays
ctgcccgtcccgtgccgccccacttgcagttggagtcgccactcgcttgctgtggtcgggtactcgggtcggcccaccgcctcctaccagcctccgaccaccgcctcgccacttgccccgcgtgcgtcccccgtctccaactccaatggcggcgccctcccacctccacctcccgggctgcccccaaaccctagccctgcccctgccctggccacggggcttctctgctccgcccggcctcctctcccgctcccgacgcctccgcccggtcgccgcgctcgggcccgccgacgccggcgacttgctcggccgagtcgaggcgttactctacaccgtcgcggacgctgctgtctccgcggagcccgtcgcggcggccgggaccaaggaggccgccgccggtgactggctctccagcatcaccaattccatggagaccgtgctcaaggttgagtctgcacttgcaatgaggtcactgcaacctcaagtgaagaccattcaagaacgatatgctggtgatcaggaaaggatacagctcgaaactgctcgcttatacaaattatctggtgttgacccacttgcagggacttctgactgaaggctttttttggataccttctttggccggtcctacaacaattgctgctcaacaaaatggccagggaatatcctggctttttccttttactgatggtcatccacctcttggctggtcagacactttggcatacctcgtgttaccagttcttcttgtcatttcacaatacatatcttctcaagtaatgcagccaccacagagcaatgatcctagccaacaaggtgctcaggctgtaacaaagttcttaccattgctaattggttattttgctctttccgtgccttctggactaggtttgtactggctccattgatacagttcctccaaataatcagaatatttatcagtattgcctttaacaagtcggaatatgggtttttttttccgagaagaagagaggttcaacatagaccagttacaagatgcaatcctctttacagagggcggaaacagagataataaaaagttccattaaaacaaatctaggctacaactaacctgaaaacagggagcaacatgaccaggcaggaggctatgactaagagccctcaacaggagcagtgaggaaggcttacaaataatatcctcagtactgcgcaacaagtgtggcttcaaaagcttggaggtgcaaaaaatcctgtcaaagaatatattgacaaactttcaagagaagaatccaccaatgttcagaagaatggatccactgttcagagcaaacctctgcccaaacttagtaaagcccagcccagccaagagctgaaaccaactggaccgcaacgtggggaaagatttaggaaactaaaggaggaagaatcaaggagaaaagaggttctggggcaagcagaacaatcagaacagtcaagttttgaatctagcgtcgtagatggagcacaaatttctgatgcgtcttctggagacaaaaatgatgaacaggtattaaacaggagcctcatgaaattggaccgatcgtagctaatagcaacggtggagttaaccatagtagaaatgaaaagactgagaatttttcatcagaaaaggaagcagctgacgatcattcctcggtaagcaaacctatgttaccggatgcccacaaattaacggaccaagacaatggaaacgatgcagtatagagagtggatgttagcgtagctagtcgttctgctgctttgatgcgttcactgaaaatcagtggctcagacgtgtctgcttcatcacgctgaggtatagctgtgaggcatagtgagcaatagtttcacgaacatctatcaagaatcacacgaagatgcagcaggaggcaaatttgtttcaaactagaaaccacgctctaggtctaagccctttttcttttcccccacgaatttgtgctgtactgtaggttatgtgatgcatataagagtagtaggtgaaaggattctgagatatcaaagggattctgtccataacgtgtaatgttgttcagttgggggtgggatggatgcaaaggtggcaattcgaca

SEQ ID NO: 96650 - DNA, 2010 bp, Zea Mays
ctgcctccgcggctccgtgtgcccgactgcccgtcccgtgccgccccacttgcagttggagtcgccactcgcttgctgtggtcgggtactcgggtcggcccaccgcctcctaccagcctccgaccaccgcctcgccacttgccccgcgtgcgtcccccgtctccaactccaatggcggcgccctcccacctccacctcccgggctgcccccaaaccctagccctgcccctgccctggccacggggcttctctgctccgcccggcctcctctcccgctcccgacgcctccgcccggtcgccgcgctcgggcccgccgacgccggcgacttgctcggccgagtcgaggcgttactctacaccgtcgcggacgctgctgtctccgcggagcccgtcgcggcggccgggaccaaggaggccgccgccggtgactggctctccagcatcaccaattccatggagaccgtgctcaaggtgctgaaagatggtctattgtctctccatgttccttattcatatggctttgcaatcattctcctcaccgttcttgttaaggcagctacatttcctctaacaaagaagcaggttgagtctgcacttgcaatgaggtcactgcaacctcaagtgaagaccattcaagaacgatatgctggtgatcaggaaaggatacagctcgaaactgctcgcttatacaaattatctggtgttgacccacttgcaggatgcttgcctacccttgtgacaataccagtttggattggtctatacagagctctctcaaatgtagctaatgagggacttctgactgaaggctttttttggataccttctttggccggtcctacaacaattgctgctcaacaaaatggccagggaatatcctggctttttccttttactgatggtcatccacctcttggctggtcagacactttggcatacctcgtgttaccagttcttcttgtcatttcacaatacatatcttctcaagtaatgcagccaccacagagcaatgatcctagccaacaaggtgctcaggctgtaacaaagttcttaccattgctaattggttattttgctctttccgtgccttctggactaggtttgtactggcttacaaataatatcctcagtactgcgcaacaagtgtggcttcaaaagcttggaggtgcaaaaaatcctgtcaaagaatatattgacaaactttcaagagaagaatccaccaatgttcagaagaatggatccactgttcagagcaaacctctgcccaaacttagtaaagcccagcccagccaagagctgaaaccaactggaccgcaacgtggggaaagatttaggaaactaaaggaggaagaatcaaggagaaaagaggttctggggcaagcagaacaatcagaacagtcaagttttgaatctagcgtcgtagatggagcacaaatttctgatgcgtcttctggagacaaaaatgatgaacaggagcctcatgaaattggaccgatcgtagctaatagcaacggtggagttaaccatagtagaaatgaaaagactgagaatttttcatcagaaaaggaagcagctgacgatcattcctcggtaagcaaacctatgttaccggatgcccacaaattaacggaccaagacaatggaaacgatgcagtatagagagtggatgttagcgtagctagtcgttctgctgctttgatgcgttcactgaaaatcagtggctcagacgtgtctgcttcatcacgctgaggtatagctgtgaggcatagtgagcaatagtttcacgaacatctatcaagaatcacacgaagatgcagcaggaggcaaatttgtttcaaactagaaaccacgctctaggtctaagccctttttcttttcccccacgaatttgtgctgtactgtaggttatgtgatgcatataagagtagtaggtgaaaggattctgagatatcaaagggattctgtccataacgtgtaatgttgttcagttgggggtgggatggatgcaaa

SEQ ID NO: 96651 - DNA, 1899 bp, Zea Mays
ctgcctccgcggctccgtgtgcccgactgcccgtcccgtgccgccccacttgcagttggagtcgccactcgcttgctgtggtcgggtactcgggtcggcccaccgcctcctaccagcctccgaccaccgcctcgccacttgccccgcgtgcgtcccccgtctccaactccaatggcggcgccctcccacctccacctcccgggctgcccccaaaccctagccctgcccctgccctggccacggggcttctctgctccgcccggcctcctctcccgctcccgacgcctccgcccggtcgccgcgctcgggcccgccgacgccggcgacttgctcggccgagtcgaggcgttactctacaccgtcgcggacgctgctgtctccgcggagcccgtcgcggcggccgggaccaaggaggccgccgccggtgactggctctccagcatcaccaattccatggagaccgtgctcaaggttgagtctgcacttgcaatgaggtcactgcaacctcaagtgaagaccattcaagaacgatatgctggtgatcaggaaaggatacagctcgaaactgctcgcttatacaaattatctggtgttgacccacttgcaggatgcttgcctacccttgtgacaataccagtttggattggtctatacagagctctctcaaatgtagctaatgagggacttctgactgaaggctttttttggataccttctttggccggtcctacaacaattgctgctcaacaaaatggccagggaatatcctggctttttccttttactgatggtcatccacctcttggctggtcagacactttggcatacctcgtgttaccagttcttcttgtcatttcacaatacatatcttctcaagtaatgcagccaccacagagcaatgatcctagccaacaaggtgctcaggctgtaacaaagttcttaccattgctaattggttattttgctctttccgtgccttctggactaggtttgtactggcttacaaataatatcctcagtactgcgcaacaagtgtggcttcaaaagcttggaggtgcaaaaaatcctgtcaaagaatatattgacaaactttcaagagaagaatccaccaatgttcagaagaatggatccactgttcagagcaaacctctgcccaaacttagtaaagcccagcccagccaagagctgaaaccaactggaccgcaacgtggggaaagatttaggaaactaaaggaggaagaatcaaggagaaaagaggttctggggcaagcagaacaatcagaacagtcaagttttgaatctagcgtcgtagatggagcacaaatttctgatgcgtcttctggagacaaaaatgatgaacaggagcctcatgaaattggaccgatcgtagctaatagcaacggtggagttaaccatagtagaaatgaaaagactgagaatttttcatcagaaaaggaagcagctgacgatcattcctcggtaagcaaacctatgttaccggatgcccacaaattaacggaccaagacaatggaaacgatgcagtatagagagtggatgttagcgtagctagtcgttctgctgctttgatgcgttcactgaaaatcagtggctcagacgtgtctgcttcatcacgctgaggtatagctgtgaggcatagtgagcaatagtttcacgaacatctatcaagaatcacacgaagatgcagcaggaggcaaatttgtttcaaactagaaaccacgctctaggtctaagccctttttcttttcccccacgaatttgtgctgtactgtaggttatgtgatgcatataagagtagtaggtgaaaggattctgagatatcaaagggattctgtccataacgtgtaatgttgttcagttgggggtgggatggatgcaaa

SEQ ID NO: 96652 - DNA, 1112 bp, Zea Mays
gttttgaacttctaatggtcattaaatgaaaaaatgttgatagttcatttcttttaatctctctctctcttctttgcagaaaggcatgtcaccttattttggctgcatagttggccgtgtcgcgaataggatcaaggatgggaagtttacactaaacggacttgagtattcattacctgtcaacaatggacctaacagccttcatggtgggttgaagggatttgataaggtcgtgtgggatgtcgtggagcacaaagatggcgaatgcccttcaataacttttcagtatcacagcaaggacggggaagaaggctatccaggcgatgtaaccattcgagcaacatactctcttcctgaagctactactctaaggcttgacatggaagctacaccagagaacaaagcaactcctataagcctggcgcagcacacctactggaacctcgcaggtcacgcctgcggcgacatcttaaaccactcgctgcagatctggggcaagcacatcactccggtcgacgagaacacaattcccaccggcgagataatgcccgtcgatggcaccccttttgacttcacgacggagcgcaggattggcgagcgcatcgacggtgttcctggagggtatgatcataactacgtgctggactgtggcgacgagaaggacggcctgaagcgtgcggccaggctgaaagatccgtcgagcttgcggaccctggacctgtggactgacgcacccggcatgcagctgtacactgccaactacgtggatggcatcggtggcaaggcgggcgctgtctacgcgaagcatgctggagtgtgcttggaaacccaggggttcccgaatgccatcaaccagcctgagtttccctctgtggttgttcggcccggtgagaagtataagcatactatgctgtttgagttctcgggatgttgaatagtgactggacagcataaattgatgtaaaacatgttgaatgaataaacaagcagaaggataagctgtgataataatgcactagtttgcttcagattattgtagaggggtaatcttgtccagacctagccatccttttctgtgacattattgcaatgactgcgtgtttatgctcaac

SEQ ID NO: 96653 - DNA, 1254 bp, Zea Mays
acgctagtaaaggacccccgctagtaaatcgagctcggaggcgaatctctcgctaactgtcatcaatggcggccgagcccaagatcctagagctctccaacggcaagatcaccgcgaggatctccaactggggcgccaccatcacctccctcctcgtccccgacgcccaggggagtgtcgctgatgtggtgctcggattcgatggcttggatccgtacgtgaaaggcatgtcaccttattttggctgcatagttggccgtgtcgcgaataggatcaaggatgggaagtttacactaaacggacttgagtattcattacctgtcaacaatggacctaacagccttcatggtgggttgaagggatttgataaggtcgtgtgggatgtcgtggagcacaaagatggcgaatgcccttcaataacttttcagtatcacagcaaggacggggaagaaggctatccaggcgatgtaaccattcgagcaacatactctcttcctgaagctactactctaaggcttgacatggaagctacaccagagaacaaagcaactcctataagcctggcgcagcacacctactggaacctcgcaggtcacgcctgcggcgacatcttaaaccactcgctgcagatctggggcaagcacatcactccggtcgacgagaacacaattcccaccggcgagataatgcccgtcgatggcaccccttttgacttcacgacggagcgcaggattggcgagcgcatcgacggtgttcctggagggtatgatcataactacgtgctggactgtggcgacgagaaggacggcctgaagcgtgcggccaggctgaaagatccgtcgagcttgcggaccctggacctgtggactgacgcacccggcatgcagctgtacactgccaactacgtggatggcatcggtggcaaggcgggcgctgtctacgcgaagcatgctggagtgtgcttggaaacccaggggttcccgaatgccatcaaccagcctgagtttccctctgtggttgttcggcccggtgagaagtataagcatactatgctgtttgagttctcgggatgttgaatagtgactggacagcataaattgatgtaaaacatgttgaatgaataaacaagcagaaggataagctgtgataataatgcactagtttgcttcagattattgtagaggggtaatcttgtccagacctagccatccttttctgtgacattattgcaatgactgcgtgtttatgctcaac

SEQ ID NO: 96654 - DNA, 1204 bp, Zea Mays
acgctagtaaaggacccccgctagtaaatcgagctcggaggcgaatctctcgctaactgtcatcaatggcggccgagcccaagatcctagagctctccaacggcaagatcaccgcgaggatctccaactggggcgccaccatcacctccctcctcgtccccgacgcccaggaaaggcatgtcaccttattttggctgcatagttggccgtgtcgcgaataggatcaaggatgggaagtttacactaaacggacttgagtattcattacctgtcaacaatggacctaacagccttcatggtgggttgaagggatttgataaggtcgtgtgggatgtcgtggagcacaaagatggcgaatgcccttcaataacttttcagtatcacagcaaggacggggaagaaggctatccaggcgatgtaaccattcgagcaacatactctcttcctgaagctactactctaaggcttgacatggaagctacaccagagaacaaagcaactcctataagcctggcgcagcacacctactggaacctcgcaggtcacgcctgcggcgacatcttaaaccactcgctgcagatctggggcaagcacatcactccggtcgacgagaacacaattcccaccggcgagataatgcccgtcgatggcaccccttttgacttcacgacggagcgcaggattggcgagcgcatcgacggtgttcctggagggtatgatcataactacgtgctggactgtggcgacgagaaggacggcctgaagcgtgcggccaggctgaaagatccgtcgagcttgcggaccctggacctgtggactgacgcacccggcatgcagctgtacactgccaactacgtggatggcatcggtggcaaggcgggcgctgtctacgcgaagcatgctggagtgtgcttggaaacccaggggttcccgaatgccatcaaccagcctgagtttccctctgtggttgttcggcccggtgagaagtataagcatactatgctgtttgagttctcgggatgttgaatagtgactggacagcataaattgatgtaaaacatgttgaatgaataaacaagcagaaggataagctgtgataataatgcactagtttgcttcagattattgtagaggggtaatcttgtccagacctagccatccttttctgtgacattattgcaatgactgcgtgtttatgctcaac

SEQ ID NO: 96655 - DNA, 1264 bp, Zea Mays
acgctagtaaaggacccccgctagtaaatcgagctcggaggcgaatctctcgctaactgtcatcaatggcggccgagcccaagatcctagagctctccaacggcaagatcaccgcgaggatctccaactggggcgccaccatcacctccctcctcgtccccgacgcccaggggagtgtcgctgatgtggtgctcggattcgatggcttggatccgtacgtgaaaggcatgtcaccttattttggctgcatagttggccgtgtcgcgaataggatcaaggatgggaagtttacactaaacggacttgagtattcattacctgtcaacaatggacctaacagccttcatggtgggttgaagggatttgataaggtcgtgtgggatgtcgtggagcacaaagatggcgaatgcccttcaataacttttcagtatcacagcaaggacggggaagaagcatcccccaggctatccaggcgatgtaaccattcgagcaacatactctcttcctgaagctactactctaaggcttgacatggaagctacaccagagaacaaagcaactcctataagcctggcgcagcacacctactggaacctcgcaggtcacgcctgcggcgacatcttaaaccactcgctgcagatctggggcaagcacatcactccggtcgacgagaacacaattcccaccggcgagataatgcccgtcgatggcaccccttttgacttcacgacggagcgcaggattggcgagcgcatcgacggtgttcctggagggtatgatcataactacgtgctggactgtggcgacgagaaggacggcctgaagcgtgcggccaggctgaaagatccgtcgagcttgcggaccctggacctgtggactgacgcacccggcatgcagctgtacactgccaactacgtggatggcatcggtggcaaggcgggcgctgtctacgcgaagcatgctggagtgtgcttggaaacccaggggttcccgaatgccatcaaccagcctgagtttccctctgtggttgttcggcccggtgagaagtataagcatactatgctgtttgagttctcgggatgttgaatagtgactggacagcataaattgatgtaaaacatgttgaatgaataaacaagcagaaggataagctgtgataataatgcactagtttgcttcagattattgtagaggggtaatcttgtccagacctagccatccttttctgtgacattattgcaatgactgcgtgtttatgctcaac

SEQ ID NO: 96656 - DNA, 1267 bp, Zea Mays
acgctagtaaaggacccccgctagtaaatcgagctcggaggcgaatctctcgctaactgtcatcaatggcggccgagcccaagatcctagagctctccaacggcaagatcaccgcgaggatctccaactggggcgccaccatcacctccctcctcgtccccgacgcccaggggagtgtcgctgatgtggtgctcggattcgatggcttggatccgtacgtgaaaggcatgtcaccttattttggctgcatagttggccgtgtcgcgaataggatcaaggatgggaagtttacactaaacggacttgagtattcattacctgtcaacaatggacctaacagccttcatggtgggttgaagggatttgataaggtcgtgtgggatgtcgtggagcacaaagatggcgaatgcccttcaataacttttcagtatcacagcaaggacggggaagaaggtacacattgctagcattcttgttctgatgtctgcatcttaaacaactcacccaattcagcatcccccaggctatccaggcgatgtaaccattcgagcaacatactctcttcctgaagctactactctaaggcttgacatggaagctacaccagagaacaaagcaactcctataagcctggcgcagcacacctactggaacctcgcaggtcacgcctgcggcgacatcttaaaccactcgctgcagatctggggcaagcacatcactccggtcgacgagaacacaattcccaccggcgagataatgcccgtcgatggcaccccttttgacttcacgacggagcgcaggattggcgagcgcatcgacggtgttcctggagggtatgatcataactacgtgctggactgtggcgacgagaaggacggcctgaagcgtgcggccaggctgaaagatccgtcgagcttgcggaccctggacctgtggactgacgcacccggcatgcagctgtacactgccaactacgtggatggcatcggtggcaaggcgggcgctgtctacgcgaagcatgctggagtgtgcttggaaacccaggggttcccgaatgccatcaaccagcctgagtttccctctgtggttgttcggcccggtgagaagtataagcatactatgctgtttgagttctcgggatgttgaatagtgactggacagcataaattgatgtaaaacatgttgaatgaataaacaagcagaaggataagctgtgataataatgcactagtttgcttcagattattgtagaggggtaatcttgtcc

SEQ ID NO: 96657 - DNA, 606 bp, Zea Mays
gtactaaataatcttcatacctgttccatgcagactgtttttgcaaactcatcttttcctgttctctcaggttccgctaaacaatatgtttggatatgcaacagctattcgatcagcgactcaggggaaaggtgaatttacgatggagtacctggagcataatgttgtatcgcaggatgtgcagatgcaactagtgacctcgtaccaggcggccaagggcacagagtgattcttctttttacagaagaacaaattttgtttgcgaacttttagtggcatcgacttcccggtcctctggacacgtcacaaatagtaggcgataattcaaactgtggtttcttagtgaaaatacaactatgccgcaataattagcattcccacagtagaattgtacaaaacattatctagcaaatgcctgaagtttagtttgtaatgtcttggtaatgagaacatcttgtgcaatttctcctcaaaaagaaatatctaatgctacactgtgaaggcatggatgttttggttactggtaatatttctccttttcgtttttgggtttctgttcaaactgtttgtttttatattagacaaatggtggtaaagttaagctag

SEQ ID NO: 96658 - DNA, 2806 bp, Zea Mays
ggcctgttggagtcagccaaagtgctgctgcacttcaagagtcagccaaaagagctgcttcactctgggtgttgttctctagggttttctgtagccgacctaggccacgcaaagtccaaaacccagagccatcgctgccgcctcggtcgcgattcctaaaggcggcgatggccatgacgcggcgttctgcttcccatctcctatccgccttccggcccttctccctcctcctccagccgcacctcgtcgactcttcgccggcggccgcgtcggcgaggcgggcgatgtcgtcggcgtcggccctgcgtgcacgggacgagaaggatgtggcgcggtggcgggagtcgatgggccggatgcggaatatcggtatctccgcgcacatcgactccgggaagacgacgctcacagagcgagtcctctactacacgggtcggatccacgagattcacgaggtgcgcggccgtgacggcgtcggtgctaagatggactccatggacctagagcgcgaaaaggggatcaccattcagtctgctgccacctactgcacctggaaggattaccagattaatattattgatactccaggtcacgtggatttcaccattgaggttgaaagggcactccgtgttcttgatggagctatacttgtactatgtagtgttggtggagtacaaagtcagtcgataactgttgatcggcaaatgagaagatatgaaatcccaagggttgcttttattaacaagttggaccgtatgggagctgatccatggaaggttcttaaccaggcgcgatccaagctccgtcaccacaatgcagctgtacaagtacccataggattagaagaggagtttgagggccttgttgaccttgtagaaatgaaggcttataagttcgagggatctagtggccagaatgtaactgcttctgatgttccattgaatatggaggatttagtcactgagaagcgtcgtgaacttattgaagttgtttctgaagtagatgaccagcttgctgaagcttttctcaatgatgagccaataacagctaatcagcttaaggcggctattcgaagagctacagtggcacggaagttcataccagtatacatgggaagtgcattcaaaaataagggtgttcaaccacttcttgatggcgtgctggattatctaccgtgcccgttggaggtttataactacgcccttgatcaaaacaaatctgaagagaaggtattattagctggaactccagctgaaccacttgtggcattagcatttaagctagaggaaggtcgttttggtcagctgacctatctaagaatctatgacggcgttatacggaagggtgacttcatatacaatgtcaatacagggaagaaaatcaaagttcctcgcttggtaaggatgcactctaatgagatggaggatattcaagaagcatatgctggccaaattgttgctgtttttggtgttgattgtgcatcaggcgatacatttacggatggaacagtgaaatatactatgacttcaatgaatgtccctgaacctgtgatgtccttggcagtttcacctatatctaaagactctggaggacagttttcaaaagctctgaatcgcttccaaaaggaggatcctactttccgtgtgggtttggatgctgagagtggccagacaattatttccgggatgggtgagctgcatctggatatatacgttgaacgtattaagagagagtacaaggtggatgcaaaggtaggaaaacctcgtgttaacttcagggaaacaattacccagcgtgctgaatttgattatttgcacaaaaagcaatctggcggtcaaggtcagtatggacgagtttgtgggtacattgagcctctaccttcaggttctgatggtaaattcgaatttgataacatgattattggacaagcaattccttcaaactttataccagcaatagagaagggttttaaggaagcttgcaattcaggctcgttgattggtcatcctgttgaaaatttaagaattgtattgactgatggggcttcacatcaggtggattccagtgaacttgcttttaagctagctgctatctatgcttttcgacagtgctacacttctgccaaacctgtaatattagaacctgtgatgaaggtggaactcaaatttccaactgagtttcagggcacagtaactggtgatatgaacaagagaaaagggatcattgttggaaatgagcaggaaggtgacgacaccattgtagtttgccatgttccgctaaacaatatgtttggatatgcaacagctattcgatcagcgactcaggggaaaggtgaatttacgatggagtacctggagcataatgttgtatcgcaggatgtgcagatgcaactagtgacctcgtaccaggcggccaagggcacagagtgattcttctttttacagaagaacaaattttgtttgcgaacttttagtggcatcgacttcccggtcctctggacacgtcacaaatagtaggcgataattcaaactgtggtttcttagtgaaaatacaactatgccgcaataattagcattcccacagtagaattgtacaaaacattatctagcaaatgcctgaagtttagtttgtaatgtcttggtaatgagaacatcttgtgcaatttctcctcaaaaagaaatatctaatgctacactgtgaaggcatggatgttttggttactggtaatatttctccttttcgtttttgggtttctgttcaaactgtttgtttttatattagacaaatggtggtaaagttaagctag

SEQ ID NO: 96659 - DNA, 2691 bp, Zea Mays
ggcctgttggagtcagccaaagtgctgctgcacttcaagagtcagccaaaagagctgcttcactctgggtgttgttctctagggttttctgtagccgacctaggccacgcaaagtccaaaacccagagccatcgctgccgcctcggtcgcgattcctaaaggcggcgatggccatgacgcggcgttctgcttcccatctcctatccgccttccggcccttctccctcctcctccagccgcacctcgtcgactcttcgccggcggccgcgtcggcgaggcgggcgatgtcgtcggcgtcggccctgcgtgcacgggacgagaaggatgtggcgcggtggcgggagtcgatgggccggatgcggaatatcggtatctccgcgcacatcgactccgggaagacgacgctcacagagcgagtcctctactacacgggtcggatccacgagattcacgaggtgcgcggccgtgacggcgtcggtgctaagatggactccatggacctagagcgcgaaaaggggatcaccattcagtctgctgccacctactgcacctggaaggattaccagattaatattattgatactccaggtcacgtggatttcaccattgaggttgaaagggcactccgtgttcttgatggagctatacttgtactatgtagtgttggtggagtacaaagtcagtcgataactgttgatcggcaaatgagaagatatgaaatcccaagggttgcttttattaacaagttggaccgtatgggagctgatccatggaaggttcttaaccaggcgcgatccaagctccgtcaccacaatgcagctgtacaagtacccataggattagaagaggagtttgagggccttgttgaccttgtagaaatgaaggcttataagttcgagggatctagtggccagaatgtaactgcttctgatgttccattgaatatggaggatttagtcactgagaagcgtcgtgaacttattgaagttgtttctgaagtagatgaccagcttgctgaagcttttctcaatgatgagccaataacagctaatcagcttaaggcggctattcgaagagctacagtggcacggaagttcataccagtatacatgggaagtgcattcaaaaataagggtgttcaaccacttcttgatggcgtgctggattatctaccgtgcccgttggaggtttataactacgcccttgatcaaaacaaatctgaagagaaggtattattagctggaactccagctgaaccacttgtggcattagcatttaagctagaggaaggtcgttttggtcagctgacctatctaagaatctatgacggcgttatacggaagggtgacttcatatacaatgtcaatacagggaagaaaatcaaagttcctcgcttggtaaggatgcactctaatgagatggaggatattcaagaagcatatgctggccaaattgttgctgtttttggtgttgattgtgcatcaggcgatacatttacggatggaacagtgaaatatactatgacttcaatgaatgtccctgaacctgtgatgtccttggcagtttcacctatatctaaagactctggaggacagttttcaaaagctctgaatcgcttccaaaaggaggatcctactttccgtgtgggtttggatgctgagagtggccagacaattatttccgggatgggtgagctgcatctggatatatacgttgaacgtattaagagagagtacaaggtggatgcaaaggtaggaaaacctcgtgttaacttcagggaaacaattacccagcgtgctgaatttgattatttgcacaaaaagcaatctggcggtcaaggtcagtatggacgagtttgtgggtacattgagcctctaccttcaggttctgatggtaaattcgaatttgataacatgattattggacaagcaattccttcaaactttataccagcaatagagaagggttttaaggaagcttgcaattcaggctcgttgattggtcatcctgttgaaaatttaagaattgtattgactgatggggcttcacatcaggtggattccagtgaacttgcttttaagctagctgctatctatgcttttcgacagtgctacacttctgccaaacctgtaatattagaacctgtgatgaaggtggaactcaaatttccaactgagtttcagggcacagtaactggtgatatgaacaagagaaaagggatcattgttggaaatgagcaggaaggtgacgacaccattgtagtttgccatgttccgctaaacaatatgtttggatatgcaacagctattcgatcagcgactcaggggaaaggtgaatttacgatggagtacctggagcataatgttgtatcgcaggatgtgcagatgcaactagtgacctcgtaccaggcggccaagggcacagagtgattcttctttttacagaagaacaaattttgtttgcgaacttttagggcttgttcggttagctctcaatccatacacgtcacaaatagtaggcgataattcaaactgtggtttcttagtgaaaatacaactatgccgcaataattagcattcccacagtagaattgtacaaaacattatctagcaaatgcctgaagtttagtttgtaatgtcttggtaatgagaacatcttgtgcaatttctcctcaaaaagaaatatctaatg

SEQ ID NO: 96660 - DNA, 903 bp, Zea Mays
atggcgcacggcgccacggttccgctgggcaaatcgatgcggcgcgcgctgcggaccgccatcggcatacccaagaagaataagccgccgccgccgccgctgttgccaaacggcagcggcagggacccgggcgtgtccatggagctgagcagctcgtcgtcggtggcggcgaggaaggaggcggtggtgcgggtggtgatgcgcggcggggtggtggaggtgtacccgggcgtggtgctggcgtgcaccgtcatccggaaccacccgccggggctgtgcctggcgcacccggacgtgttccgcaacccgcacggcgccgtcgtccgcccgctcgagccgctcttccccggccagaagttcctgctgctccccgagaccaccgtggtccggctcaagcagaggatcccggagagctccatcggcgccttcgcggacgaggaggagtacggcgacgaggacgagacgtcgtcgtcctcctcctcctcggaggctgacgaggttggcgccatgacggcgtgcagcgccagggattacttcgtggccagggaccggtggtcggagtgccgcttcaggaggctcgtggagcaggggttcgccgtggagccgagcaaggacggcgacgacgacgacgacgagccggccgagagggagaaggacagggcaagggcgacgacgaagaaggggaacaggaagaggcggaaggggaggcggcggagagaccgtcgtagtagtccggtgccccagctgctgccggtggggctcaggggattcgcgacggcgaggaggacgtgggagcccagcctgccgtccgtggaggaggaggaggaggaggccgccgtctctcctcgccaccgtcctccgtcgggggccaacaaaaggtcatgcatgaaccgctatcagtaa

SEQ ID NO: 96661 - DNA, 1650 bp, Zea Mays
gacgggggagaatgttgccgagccacgtggcaatctatctcacagcctgaatcagaatcagcccgcgcctcccctcccacctccactcgtttcgctcctctgaatcccccccgggccccggcacggaattccccccggcacaccccccaaggccaccggacgccagcagccccgcccccgcccacacctacgtacgagcgcaatgctggcggcgtccctcaggccggggccttcgctcgcggccttccccggtaccgcccagaggagcccagttcctttcctccccttccctgcccgcctccaccaccggcccgtcctcctctccgcgaccgccgagggaaccggcgcccccgccggccagggagacgcctcggctgccccgctcgacgaggtgcgcctgccgcagttcgctgcggactgggaatccgcgcgcgcgtgcaaggaccaggggaggatcttctcgctgccggtgctgagggccaacagcggcgggctcatcgtcaggttcaactccctgcaggggttcgtgcccaaccctctcctcagccccgcgcactggtgtaaagctaagcttgcagaccccaaaaggcccatccaagatgttacgaaagacctagtaggaacgtccatttctgtcaaggtggctgaagtgaatgaggaggaaaagaaacttgtcttctctgagaaggatgctagttggtcaacatactcttcccgaataaagattggcgacatctatgatggaattgtgggctcagtgttccactatggtgcatttgttcacctgcgatttcctgatggattatatcatcttactggccttgtacatatctcggaggtgtcttgggatcttgtccaagacgtcaaggattttctaaacgaaggggatgctgtcaaggtcatagttgtgaacattgatatgacgaagtcaaggatagctttatctatcagacaactggaggaagatcctttattggaaacattggacaaagttatccctttggaagctgatcaatcacctaatcgaatgatgtctccttcggaagttgaacttctgccaggacttgatggtatatgcaatgaactattgcaagaggatggtataacagacgtacagtttgggcgccaggcattggagaaacgtgtcgtttcacaagatttagagctttggatttcgaatgttcaagctaaggacaacaggttcacacttcttgcacgagctgggaggcaggtccaggaagtgtatttgaccacttccctagaccaggagggcataaagaaagccgtgcaaagagtgctggggcgtgttccttgaacccgacacgcagcgtgtagaaaccgattttctaactaaagcattacaaggaatcaaaagtacgagcgaacagcctgaaacatttgccactgtcagtctgtcacaacacccggctaaatttttctctgttggatactacgacaaccaaaaatctgtaaatatttgcagtcctacacgagtaggttaggcaccttgggccctcccttcaaactaagacgttgctaagcagtggttctgtgtatttgctggggtctgtcttttgatgccatgtgcacttgtcatactgtgacttcagttcactgcttgcacttggctgaactcccgaggtaacttgt

SEQ ID NO: 96662 - DNA, 1638 bp, Zea Mays
gacgggggagaatgttgccgagccacgtggcaatctatctcacagcctgaatcagaatcagcccgcgcctcccctcccacctccactcgtttcgctcctctgaatcccccccgggccccggcacggaattccccccggcacaccccccaaggccaccggacgccagcagccccgcccccgcccacacctacgtacgagcgcaatgctggcggcgtccctcaggccggggccttcgctcgcggccttccccggtaccgcccagaggagcccagttcctttcctccccttccctgcccgcctccaccaccggcccgtcctcctctccgcgaccgccgagggaaccggcgcccccgccggccagggagacgcctcggctgccccgctcgacgaggtgcgcctgccgcagttcgctgcggactgggaatccgcgcgcgcgtgcaaggaccaggggaggatcttctcgctgccggtgctgagggccaacagcggcgggctcatcgtcaggttcaactccctgcaggggttcgtgcccaaccctctcctcagccccgcgcactggtgtaaagaccccaaaaggcccatccaagatgttacgaaagacctagtaggaacgtccatttctgtcaaggtggctgaagtgaatgaggaggaaaagaaacttgtcttctctgagaaggatgctagttggtcaacatactcttcccgaataaagattggcgacatctatgatggaattgtgggctcagtgttccactatggtgcatttgttcacctgcgatttcctgatggattatatcatcttactggccttgtacatatctcggaggtgtcttgggatcttgtccaagacgtcaaggattttctaaacgaaggggatgctgtcaaggtcatagttgtgaacattgatatgacgaagtcaaggatagctttatctatcagacaactggaggaagatcctttattggaaacattggacaaagttatccctttggaagctgatcaatcacctaatcgaatgatgtctccttcggaagttgaacttctgccaggacttgatggtatatgcaatgaactattgcaagaggatggtataacagacgtacagtttgggcgccaggcattggagaaacgtgtcgtttcacaagatttagagctttggatttcgaatgttcaagctaaggacaacaggttcacacttcttgcacgagctgggaggcaggtccaggaagtgtatttgaccacttccctagaccaggagggcataaagaaagccgtgcaaagagtgctggggcgtgttccttgaacccgacacgcagcgtgtagaaaccgattttctaactaaagcattacaaggaatcaaaagtacgagcgaacagcctgaaacatttgccactgtcagtctgtcacaacacccggctaaatttttctctgttggatactacgacaaccaaaaatctgtaaatatttgcagtcctacacgagtaggttaggcaccttgggccctcccttcaaactaagacgttgctaagcagtggttctgtgtatttgctggggtctgtcttttgatgccatgtgcacttgtcatactgtgacttcagttcactgcttgcacttggctgaactcccgaggtaacttgt

SEQ ID NO: 96663 - DNA, 1351 bp, Zea Mays
cacgagctgaggccgcgatgacgacgacgatgatgaggctgaggcagcacctgggcctggtctcctcccctagtatttatacctccgccatcgccaggttcggcaacaacacaccccatcgccgccgaacaactcggtctcggaccatgtcgtcgtccgcctccgacgccgcgccgttcgagaagcccagggccgtggtcaagaaggtcctcgcggagtcgcagcccgaggggcagggcgccaccgtccgcaggagcatcggcaggcatgagctccgcaacctggaccccttcctcctgctcgacgagttcacagtctacaagcccgccgggtttcccgaccacccccacagaggattcgagaccgtcacctacatgctcgagggggcattcacccaccaggacttcgctgggcacaagggcaccatcaagacaggggacgtgcagtggatgacggcggggcgaggcatcgtgcactcggagatgccggcgggggacggcgtgcacaagggcctgcagctctggatcaacctctcctccaaggacaagatgatcgagccgcggtaccaggagctggagagcaaggacatcagccgcggggagagcgaggacggcggcgtggaggcccgcgtcattgccggggaggccctcggcgcggcgtcccccgtgtacacgcgcacccccaccatgtacgtggacttcaccatgcgtcccgggtctcgcctgcaccagcccgtcccggagggctggaacgccttcgtctacgtcgtcgacggcgagggcgtgttcgggcgggagacggccacggcgcactactgcctcgtcctcggccccggcgacggcgtcagcgtgtggaacaggtccaccaggccgctgaggttcgtcctcgtcgccgggcagccgctcggcgagcccgtggtgcagcacgggcccttcgtcatgaactcgcgcgcccagattcagaaggccatggaggactactactatggcaagaacggcttcgagagggccggacagtggagctcctccgcctgatcggcgaggcggggagccgatggcgccaaattaatctcccgtgcaaactaaatatactttattaaatttgttagggtgctgagtttgactattttttagcaactacacttgtattggtagtatgtcatctagtatggcgaattggatattgtaataaacagtaaggaaaattgatagtctcaataaaccattgtatttgtagcatatggaaaattgtatatcaaggccatttgtgggtgattgctgttttccagtctaaagtatcagttatttatgcgtggagacatttgaccctgtttggaacttgggcaatcgtt

SEQ ID NO: 96664 - DNA, 1484 bp, Zea Mays
caccaaccaacacgagctgaggccgcgatgacgacgacgatgatgaggctgaggcagcacctgggcctggtctcctcccctagtatttatacctccgccatcgccaggttcggcaacaacacaccccatcgccgccgaacaagtacatcaactactactcatatcacccaaaagcagttcctgctcctcgtgatcctcctgctcctcctcctcctcctcctcttctccgtcgtcttcttgatccccaccgtctcgttgcccccagctcggtctcggaccatgtcgtcgtccgcctccgacgccgcgccgttcgagaagcccagggccgtggtcaagaaggtcctcgcggagtcgcagcccgaggggcagggcgccaccgtccgcaggagcatcggcaggcatgagctccgcaacctggaccccttcctcctgctcgacgagttcacagtctacaagcccgccgggtttcccgaccacccccacagaggattcgagaccgtcacctacatgctcgagggggcattcacccaccaggacttcgctgggcacaagggcaccatcaagacaggggacgtgcagtggatgacggcggggcgaggcatcgtgcactcggagatgccggcgggggacggcgtgcacaagggcctgcagctctggatcaacctctcctccaaggacaagatgatcgagccgcggtaccaggagctggagagcaaggacatcagccgcggggagagcgaggacggcggcgtggaggcccgcgtcattgccggggaggccctcggcgcggcgtcccccgtgtacacgcgcacccccaccatgtacgtggacttcaccatgcgtcccgggtctcgcctgcaccagcccgtcccggagggctggaacgccttcgtctacgtcgtcgacggcgagggcgtgttcgggcgggagacggccacggcgcactactgcctcgtcctcggccccggcgacggcgtcagcgtgtggaacaggtccaccaggccgctgaggttcgtcctcgtcgccgggcagccgctcggcgagcccgtggtgcagcacgggcccttcgtcatgaactcgcgcgcccagattcagaaggccatggaggactactactatggcaagaacggcttcgagagggccggacagtggagctcctccgcctgatcggcgaggcggggagccgatggcgccaaattaatctcccgtgcaaactaaatatactttattaaatttgttagggtgctgagtttgactattttttagcaactacacttgtattggtagtatgtcatctagtatggcgaattggatattgtaataaacagtaaggaaaattgatagtctcaataaaccattgtatttgtagcatatggaaaattgtatatcaaggccatttgtgggtgattgctgttttccagtctaaagtatcagttatttatgcgtggagacatttgaccctgtttggaacttgggcaatcgtt

SEQ ID NO: 96665 - DNA, 1583 bp, Zea Mays
caccaaccaacacgagctgaggccgcgatgacgacgacgatgatgaggctgaggcagcacctgggcctggtctcctcccctagtatttatacctccgccatcgccaggttcggcaacaacacaccccatcgccgccgaacaagtacatcaactactactcatatcacccaaaagcagttcctgctcctcgtgatcctcctgctcctcctcctcctcctcctcttctccgtcgtcttcttgatccccaccgtctcgttgcccccagctcggtctcggaccatgtcgtcgtccgcctccgacgccgcgccgttcgagaagcccagggccgtggtcaagaaggtcctcgcggagtcgcagcccgaggggcagggcgccaccgtccgcaggagcatcggcaggtacgctggcagatgatccgattccgtcatgctgcttctctcctcgaatatcaggaggcgttggctgacttgtccttgccgccttgcgcgtccgtgcaggcatgagctccgcaacctggaccccttcctcctgctcgacgagttcacagtctacaagcccgccgggtttcccgaccacccccacagaggattcgagaccgtcacctacatgctcgagggggcattcacccaccaggacttcgctgggcacaagggcaccatcaagacaggggacgtgcagtggatgacggcggggcgaggcatcgtgcactcggagatgccggcgggggacggcgtgcacaagggcctgcagctctggatcaacctctcctccaaggacaagatgatcgagccgcggtaccaggagctggagagcaaggacatcagccgcggggagagcgaggacggcggcgtggaggcccgcgtcattgccggggaggccctcggcgcggcgtcccccgtgtacacgcgcacccccaccatgtacgtggacttcaccatgcgtcccgggtctcgcctgcaccagcccgtcccggagggctggaacgccttcgtctacgtcgtcgacggcgagggcgtgttcgggcgggagacggccacggcgcactactgcctcgtcctcggccccggcgacggcgtcagcgtgtggaacaggtccaccaggccgctgaggttcgtcctcgtcgccgggcagccgctcggcgagcccgtggtgcagcacgggcccttcgtcatgaactcgcgcgcccagattcagaaggccatggaggactactactatggcaagaacggcttcgagagggccggacagtggagctcctccgcctgatcggcgaggcggggagccgatggcgccaaattaatctcccgtgcaaactaaatatactttattaaatttgttagggtgctgagtttgactattttttagcaactacacttgtattggtagtatgtcatctagtatggcgaattggatattgtaataaacagtaaggaaaattgatagtctcaataaaccattgtatttgtagcatatggaaaattgtatatcaaggccatttgtgggtgattgctgttttccagtctaaagtatcagttatttatgcgtggagacatttgaccctgtttggaacttgggcaatcgtt

SEQ ID NO: 96666 - DNA, 1554 bp, Zea Mays
caccaaccaacacgagctgaggccgcgatgacgacgacgatgatgaggctgaggcagcacctgggcctggtctcctcccctagtatttatacctccgccatcgccaggttcggcaacaacacaccccatcgccgccgaacaagtacatcaactactactcatatcacccaaaagcagttcctgctcctcgtgatcctcctgctcctcctcctcctcctcctcttctccgtcgtcttcttgatccccaccgtctcgttgcccccagctcggtctcggaccatgtcgtcgtccgcctccgacgccgcgccgttcgagaagcccagggccgtggtcaagaaggtcctcgcggagtcgcagcccgaggggcagggcgccaccgtccgcaggagcatcggcaggcatgagctccgcaacctggaccccttcctcctgctcgacgagttcacagtctacaagcccgccgggtttcccgaccacccccacagaggattcgagaccgtcacctacatgctcgaggttcgttgcgtctgctcaactcaatgcttcgctcctcttctcttctgttcaacgcacgcgagctgttcgctcaaacgtccccatccttgtggttccggttattggctgctgcagggggcattcacccaccaggacttcgctgggcacaagggcaccatcaagacaggggacgtgcagtggatgacggcggggcgaggcatcgtgcactcggagatgccggcgggggacggcgtgcacaagggcctgcagctctggatcaacctctcctccaaggacaagatgatcgagccgcggtaccaggagctggagagcaaggacatcagccgcggggagagcgaggacggcggcgtggaggcccgcgtcattgccggggaggccctcggcgcggcgtcccccgtgtacacgcgcacccccaccatgtacgtggacttcaccatgcgtcccgggtctcgcctgcaccagcccgtcccggagggctggaacgccttcgtctacgtcgtcgacggcgagggcgtgttcgggcgggagacggccacggcgcactactgcctcgtcctcggccccggcgacggcgtcagcgtgtggaacaggtccaccaggccgctgaggttcgtcctcgtcgccgggcagccgctcggcgagcccgtggtgcagcacgggcccttcgtcatgaactcgcgcgcccagattcagaaggccatggaggactactactatggcaagaacggcttcgagagggccggacagtggagctcctccgcctgatcggcgaggcggggagccgatggcgccaaattaatctcccgtgcaaactaaatatactttattaaatttgttagggtgctgagtttgactattttttagcaactacacttgtattggtagtatgtcatctagtatggcgaattggatattgtaataaacagtaaggaaaattgatagtctcaataaaccattgtatttgtagcatatggaaaattgtatatcaaggccatttgtgggtgattgctgttttccagtctaaagtatcagttattt

SEQ ID NO: 96667 - DNA, 1132 bp, Zea Mays
gatgacgacgacgatgatgaggctgaggcagcacctgggcctggtctcctcccctagtatttatacctccgccatcgccaggttcggcaacaacacaccccatcgccgccgaacaactcggtctcggaccatgtcgtcgtccgcctccgacgccgcgccgttcgagaagcccagggccgtggtcaagaaggtcctcgcggagtcgcagcccgaggggcagggcgccaccgtccgcaggagcatcggcaggcatgagctccgcaacctggaccccttcctcctgctcgacgagttcacagtctacaagcccgccgggtttcccgaccacccccacagaggattcgagaccgtcacctacatgctcgaggttcgttgcgtctgctcaactcaatgcttcgctcctcttctcttctgttcaacgcacgcgagctgttcgctcaaacgtccccatccttgtggttccggttattggctgctgcagggggcattcacccaccaggacttcgctgggcacaagggcaccatcaagacaggggacgtgcagtggatgacggcggggcgaggcatcgtgcactcggagatgccggcgggggacggcgtgcacaagggcctgcagctctggatcaacctctcctccaaggacaagatgatcgagccgcggtaccaggagctggagagcaaggacatcagccgcggggagagcgaggacggcggcgtggaggcccgcgtcattgccggggaggccctcggcgcggcgtcccccgtgtacacgcgcacccccaccatgtacgtggacttcaccatgcgtcccgggtctcgcctgcaccagcccgtcccggagggctggaacgccttcgtctacgtcgtcgacggcgagggcgtgttcgggcgggagacggccacggcgcactactgcctcgtcctcggccccggcgacggcgtcagcgtgtggaacaggtccaccaggccgctgaggttcgtcctcgtcgccgggcagccgctcggcgagcccgtggtgcagcacgggcccttcgtcatgaactcgcgcgcccagattcagaaggccatggaggactactactatggcaagaacggcttcgagagggccggacagtggagctcctccgcctga

SEQ ID NO: 96668 - DNA, 2267 bp, Zea Mays
atggagtcgaggtacggggtcgtggaacatggtatgctacactacttggaagagtttttttcacttcagatagaacatcaagtacgtaaaaagtgctcacctctactggagagtgctctgctgcctggtggaagtgattcgactctgcatgaatggaaggctgttccagatatttggaggacagcagcagaaaaatatgctgacctcgtagctgtggtagatccttaccatgaaccgccaacggaatggacgtatacacagcttgagcaagaaatattggatttttctcaaggtctaagggccattggtgttgctccggatgaaaagctagcactttttgctgataactcatgtcgttggctagttgcagatcaaggaatcatggcaaccggtgctataaatgttgttaggggaacaagatcatctgatgaagaattgtttcaaatatacactcattcagaaagtcctcaattctttaaccggcttgcagagtctttcatgtcaaggattaatacaagattcattgttcttctttggggtgacaaatcatgcatagatagccaagctattaaggatataccactttatggatacaaggatatcatcgaacttggtcgagaaagccgcaatgcactgtttctttccgacgagcaaggtcagcaagatgtctttgaatctattagtcctgaagatgtggccacactaatatatactagtggaacaagtggcacaccaaaaggcgtaatgcttacccaccgaaatctcttgcatcagataaataatctgtgggagattgtaccagcagaacctggtgataggttcctaagcatgcttccaacatggcatgcatatgagcgtgcttgtgagtacttcatcttctcgtatggtatccagcaagtttacactactgttaagtacctgaagattctagtatacaagaaaattcattcagcaatcgggatttcaaaggctggtattagtggcggtggaagtcttccgatgcatgttgataagttttttgaggccattggcattaaagtacaaaacggctatggccttactgagacttctcctgttgttgctgctagacgaccattctgtaatgttcttgggacagttggtcacccaataaagcatactgaaatcaagatttttgacattgagactggtgaggtccttccagatggttcaaaggggattgtgaaaattaaaggaccacaagtaatgaagggatactataagaacccatcggctacaaatgaagcttttgatcaagagggttggttcagcactggagatgtaggttggatagtacctcatcatgccatggggccaagtcgccagtgtggagggatgattgttcttgaagggcgtgcaaaggatacaatagtcctatctacaggtgaaaatgttgaacctgctgagatcgaggaagcagccagcaggagtaccttgattaatcagatagttgtgatcgggcaggatcaacggcgtcttggtgccataattgttcccaacaatgatgaagttctggcagaagcaaaaaggaagtccatccttggtgaggatggcgagctagcgaaagataaggtcatgaacatgctatatgatgaattgagaacctggaggaagtgcttaattattttgttcacgcgtttcaggacagcgcactgctccttccgtgtcgggccaattctggttgtcgacgaaccattcacgattgacaatggtctgatgacacccaccatgaaaataaggagggacaaagtgacagacaagtacaggagggagatcgaagccttgttcaagtgacacgcggagcgcgtgcgcacccatcagagttcccttttccgagtacaagacggcaaccgtacggcgtacatacagacacctgcaagctgcaatgcgtccatgtaccatgtatacgtacgtacttgcgtacggtcggaagatgactgggttggaactggaagagatgatatggcggagcggccggtgggagaacaccatgagacttgttactagactcgaatgttcgtaggttgcatgagcaaaatgacatgtgttccacaattgcatcattcaataagcgattcactgagccagataaggtcttgttcggttagttctcaatccatatatatggattgagtgagtttaaatcccaaacaagtcaaacttcttcttaatttttttcaatctcatccaatccatatgtaatgacaataaccgaacaaggcatgaatcaataaaattctcccaaacca

SEQ ID NO: 96669 - DNA, 1469 bp, Zea Mays
gaagatcgacgacagccgcggcctcttggcctcaatccctgaagtgcctgccaccacgccgcgccgcgccgcgcccgccatacaacgacttcctgcagtcctgcgctgcgcccctcctttccgcctccacgctgccgacgtccaccacacagcacggtcgactcacccgatccctccatggcggcggcggtggcggcggtcgcggctgccacgacggcggaggacgaggcgcgcctgctgcgtctggaggagcaggcggagcacggcggcggcggcgcctgggactacctctgcctcgcccgccggctccgcgcccgccgccccgcccacgtcctccgcgtcggcctcgctctcctcaacaacgcctccgctcgctccggtctcgcctcagaacagtggacgctctacgagcaggtggccacggcggccatggattgccagcgtctcgatgtggcaaaggactgtattggagtcctttcaaagcaatttcctggcagcacccgggttgcccggctagaagctcttctgtttgaagcgaaaagtgaatgggctgaagctgaaagagcttacacgcaaatcctggaaatcaatccatttgaccagattgtccacaagaggaaaattgctattgcaaaagcacaaggcaatatgtcgctagcaattggttatctcaataagtatctggaattatttatggcagatcatgatgcctggagagaacttgctgaaacatatgtttccttacaaatgtacaagcaagctgccttttgttatgaggagctaatattatcccaaccaactattccactctatcatatagcctatgctgaggttctgtacactatgggtggcttggaaaatcttcagacagctaagaagtactatgcatcaacaatccagttgactggaggcaagaatacaagagccctctttggtgtatgtctgtgtacttcggcaatcaatcagttgaccaaaggaaggaataaagaggaagagggctcggagctgcagagattggctgcagaagtactgctgaataattacaagcagcaggctccatcaaaggcgccccttatcagcagcttgttgaagaacatgaaactcagctgataccaactagctctacacattcagaatgtcctgattcgatagatagttaagttaaattgatgtggcataatgcttgtttttttttgtggcactggcaccaacattgtgcaatggttaaaaagtaggtgctcccaaggccatgggttgtgtacactacacctgtttgcttgccgagaaatatgcatgacttctttttcattggatgttctattatagatcacaataaaccccggccattgtacttcagcacaaacaaaactttgaatcagtcgctggtgaagttgtacctgttgattttgattggtatctgactgttgtagccttgtagatgaatccctgactcggagcatttttttctt

SEQ ID NO: 96670 - DNA, 558 bp, Zea Mays
aaatgtttcaattggtgagttcttgcacttacaatttcattagtttctacattagaagccataaaaacattcccacaggttccatcacctatcttccgtatcaatttgtacctgtaagaaataggaagtaaaggtcaaattaaccttccagaccatctaaagtaaaaagtgaaaagagcacttactacttacctttccatgattcttaatctaaccaaagagtgtttgccaaaaatcactgagaacaaatagaaccccgcagcaaagatccctcgccaccttcaaaactcagcgcatccacctcaaaactaggtccacctatacatggttgcatcagaagaaggaagttccactggagggtttcgcaacatgaatgattaagcatcattatgtgcacaaccgtcatgctttattgcagcttgagcaagcttcagcggaagatcttcatcactggtatgcgttggctgaaaccgggtctcctctgcccgtcgacgaggtggagcgggggagccagtcggcgaggtgggggatcgcggggcgatatttgggacggaacga

SEQ ID NO: 96671 - DNA, 2378 bp, Zea Mays
agctcaaatccatccaactactgtaataaatgaagaagaatctcaagtcttttccctctccctcctctctctaatgtacatctttggtattaaaaatgttattacacctcaacagatcaaaattgtgcagcgataacacctaaccaactccattacagatcccagcctcctggcagccaacactgtttgttcgactttccacgcagcacgcccacggcaaagggagtggtgcatgaagctatctatctatgccacacaagctacttgtaaaagctggcaacacatcccagccacacaaagttgctgttgttcattgatgtctcagcttcacaggtgattgtcactcagctaaaagggtatcacgtatggcagagcaatgacatcagcatggtcaattttcagagcctgagcccacacttgggggactccatcagcctcaggcgctgaactggccggcttccttggctgggtgccgcctttgtcgaacagccagtcctcaccttcctgcccaggcaattccatcatttgaggtgcttcaggaatgctgtatatctggctaagatacttgcagtcggggtgaggtggcttcctagagcttgtgccattctcataagcagccaccggatcgactggacctcgctgctgaccctgttggttgccattgaccttctcttccttgtggagcctttcagccttttcaatatttatggcttcctgcttcacagaagagagtggcgcggctacatgagatgctgtaccattctccacacgattgctggggagtgctggtctcggcaactttgtaggccgcatatcaaggttgtctgtacagcagcatcagaagtcttataatataaagcaccataaaaaaggataatggtgtcatacaagactcgcatgctgttaagtgcaaaagaaaaaaagaaaagctaggaactcactttgtaagtaaccattcgtttcatggttctttcgcttcttcaggttctcatcaggcacaacagattttccatcatcaactggtggggctaaaggagggaccgagtgcttcaagttaagactatctatgggataacttatactgttttctcttgttttattatgctctttgtggttatgttcccttttctccttctttgcctctttctcctttttcttctctttgtgtttatctttctctttccttttctttttctcatgccgatcactctttttgtcctctttcttggcaatatctggtgccccatctctgaccttctccatcctttcagctctcccatctgcagctttctccacagctggaggctttgacataaccagtttctgatcagttgaaatattagcctgcagcaaccttccaccttgttccttttccttgcccatagcaggtgaaaggcctcctgcatcaggtttcttagcagagacagaaagattttcagctggtcgtaccatgccattcggtctccgtattgtaatgctcgggcttgggatggatgacctaggtgctcctctatccatcccccatgttgcacttgatgttgatgggctgccaaatctctgcatggatccttgtgtgttgtccattggcctaccaaccttgccatttcccttatgcatagcattagcaggatttggaggcaatggagaggaggtgccaacttctttcttcgcgacatctttgtttgtgttctcagttctcttttgaagcgatatgctaatgttactgattcgctgtccaaccccctcttttctgggtgcagcttcattactggatgaaagccttgcagctttgaatttatcctccgttgtaggtgctggtggaaagccaccagcagttcttcgagcagaagtggtgaagctttcagaatgttgtactgatgtcccattcttttgtcgattggcattgatgctctgttgtataaatccctcagttttccttgaagcattaccagactgaatatgcactttattatgcgcggacctttcagtctccattgcaggtgaagcaatgaagcctttgcgatttcgatcatttgaaacagcataattttcaatagtttgactcgctgcccctttctcatcctgtactcctctgaccaactcctccctgaatttaagatccttaatttcttcagaccccctgctgctctctccaaccttctgaccatggagagcctcgtcatttctttgaattccttcgcctgactccctgtttttatctttgctcttgtcttttttctcgtctttgtgtttttctttacgatctttcttatctttgtgcttatccctactcctgtctttatccttcttttctttaccttcctttctatctttgtccttcttgtccttcttatgtttcttctctttgtgtttctcct

SEQ ID NO: 96672 - DNA, 656 bp, Zea Mays
gtgtcacatatgtagcctagacacatgattcagttggaataaatgcagtgtcgtgtgatcgtgtctcgagtactcagctctggctgttgcaattgtgcgtgtccgttgccggtttcgttcgaggccatgagcatatattgatcctatgttatgagagcatgcatatagtgtaacgtgggctccaaataacagaactgcttttatgctcgcggtgtgcattctgttgtgccttgctttcatgattttcctgttctctggtgaattggtggtagcctgaacatcaggttatcttctcttatatatgggcatatttctgacctggattttttttcaagcacatgttaatcaaaatgtttggtgcagaatgaaccccgtcagtgtatatgtagcagaaatgttgttcagctgttcttatagtctcttttgattctgaatgttgcagagtcgtcaatccaatagatggcgttattgtttccaaaaagcagatgccaccaagaaagacatggaagatgaacgaaagcttgttcccatgtgaactttcaaaagaaaacttatcatccgtcaaggatacagttgaaatggttgtcaaagaatggggagagaaatcattaactgaattggaagcagaagagcggctgtcctattcatgtgagaag

SEQ ID NO: 96673 - DNA, 2370 bp, Zea Mays
tcgggtccccttcccctccgtccagctcgccgtctgagggaagcagggcgcagcagtcaccagtgaccagtcatggctcgctgcgttgccggcagctgccctcccgtcaccttcgcgtgttgcccccgccggactggacgaagtgctgttgttcagtgtggcactgcatcgagcacaccagcaatatctggaactggaccttcatcatctggatcctcggggcttgttcaagattgtactgcccctctggtctgtgcactgcaattaactgccagacaagatgtttcctgctttcacttcccaggacacaacagaggaaaagctgctccatcttccttgtcgaaactcattggctcaggggcatttctgcatgacttgcccgagctacccgagctcgatgatctcttctccccaaaaggtgtgattctagatgcccagaggcgagcagctcaactgtttgggtcatctaaaacttggttccttgtcaacggaacgacctgtggaatccaggcctcagtgatggctacctgttctcctggcgactacctcattgtgccacggaactgccacctttcagtgatctctgcgctggtcttgtctggtgtggtgcctaaatacataataccagaatataattctgggtgggacattgctggtggtatcaccccgctgcagctggatgaagcagtaaaagagctggaggaggatgggaagagggtaggcgctgttcttgttacttcacccacctaccatggtgtatgcagcaatgtgcaaggtattgtcagtgtttgtcatccacgaggcattccggttatagttgatgaagcgcatggtgcacatttcaggttccatgacagtttgccaagcactgcaattgagcaaggtgctgacctagctgtgcaatccacacacaaggtcctgtgctcccttacacagtcttcaatgcttcacatgtctggagatcttgtcgatgtagataaagtaagccagtgccttcagctcctccagagctcgagcccgagttaccttctactgtcatctttagatgccgcgagagatcagctgagccagaacacaaatatatttgatgagccattagctatagcatcggaaacaaaagacctgctggcgagaatccctgggatatctgttctagacttaccatgctttgcttctgatttccctgccattgatccgttgcgcatcacactcagtgcctcagatctgcaattatcgggatacgaagccgatgacattttatatgaaggccatcaaatcgtatctgagcttgttggcacaagggccgtgacatttgcagtcaacttaggaaccagagtgcaggacgctgagaagcttgtgcagtctgcaaagcatctatcagaaaaacatttctttgcaaatagcctgaaacccgtgaaggagaatcgtgtgcatggcccattagagaatatctctgtgcatctgagtccaagagaggccttctttacagagaagaggagagtgaaaatcgaggacagccttggtgaaatctgtggtgagctaatatgcccgtatccacctggtatcccagttctgattccaggcgaggtagtaacccatgattcactgtcctacttgatgagcgttagacaccaaggcatcacgatcagtggagcggctgatgctgagctaaattccattctggtgtgcgacttatgatgattgccctattgtttgtcacaagactgtgttgtcgcagagataccgtgggtgggagagatcaagtatggtttatgccaagtcaagagcacaatgtattgtccgcttgatggatgtaaaccaacggctggcggtttgtagccaccggccacttggccaaataatttagtctgtgttgtgttgtgtctcggtctcgtgagccgaaagagttgccaagctgcgacatatgatgccaaagcatgaataagggtctatagcatgtgatctcctgtgttgttgtttgaagtatgagttgctagggagggagggctacctttctatctgaagtgccgtgcaatgtttcctctttgcttctcttctgaactgggaggtccggtctgaactggcagtaaagctgaagcatcatatgcaggtctgcacacctccacggttgtgctacctccggctgcatgttttgcagggcttctgaaacaagtactatctaccttctcttctaagtttatccatcaactcatgaattcacgaacattccacaactcgtacacacacacacaaaaaaggaaacataggaatggaccgcatcattgtaatcacaattttttttcttcatttcgtagaatggcactcttgctctatagtataagaaatgaagggcgcttatatatatacaaa

SEQ ID NO: 96674 - DNA, 2352 bp, Zea Mays
ccctccgtccagctcgccgtctgagggaagcagggcgcagcagtcaccagtgaccagtcatggctcgctgcgttgccggcagctgccctcccgtcaccttcgcgtgttgcccccgccggactggacgaagtgctgttgttcagtgtggcactgcatcgagcacaccagcaatatctggaactggaccttcatcatctggatcctcggggcttgttcaagattgtactgcccctctggtctgtgcactgcaattaactgccagacaagatgtttcctgctttcacttcccaggacacaacagaggaaaagctgctccatcttccttgtcgaaactcattggctcaggggcatttctgcatgacttgcccgagctacccgagctcgatgatctcttctccccaaaaggtgtgattctagatgcccagaggcgagcagctcaactgtttgggtcatctaaaacttggttccttgtcaacggaacgacctgtggaatccaggcctcagtgatggctacctgttctcctggcgactacctcattgtgccacggaactgccacctttcagtgatctctgcgctggtcttgtctggtgtggtgcctaaatacataataccagaatataattctgggtgggacattgctggtggtatcaccccgctgcagctggatgaagcagtaaaagagctggaggaggatgggaagagggtaggcgctgttcttgttacttcacccacctaccatggtgtatgcagcaatgtgcaaggtattgtcagtgtttgtcatccacgaggcattccggttatagttgatgaagcgcatggtgcacatttcaggttccatgacagtttgccaagcactgcaattgagcaaggtgctgacctagctgtgcaatccacacacaaggtcctgtgctcccttacacagtcttcaatgcttcacatgtctggagatcttgtcgatgtagataaagtaagccagtgccttcagctcctccagagctcgagcccgagttaccttctactgtcatctttagatgccgcgagagatcagctgagccagaacacaaatatatttgatgagccattagctatagcatcggaaacaaaagacctgctggcgagaatccctgggatatctgttctagacttaccatgctttgcttctgatttccctgccattgatccgttgcgcatcacactcagtgcctcagatctgcaattatcgggatacgaagccgatgacattttatatgaaggccatcaaatcgtatctgagcttgttggcacaagggccgtgacatttgcagtcaacttaggaaccagagtgcaggacgctgagaagcttgtgcagtctgcaaagcatctatcagaaaaacatttctttgcaaatagcctgaaacccgtgaaggagaatcgtgtgcatggcccattagagaatatctctgtgcatctgagtccaagagaggccttctttacagagaagaggagagtgaaaatcgaggacagccttggtgaaatctgtggtgagctaatatgcccgtatccacctggtatcccagttctgattccaggcgaggtagtaacccatgattcactgtcctacttgatgagcgttagacaccaaggcatcacgatcagtggagcggctgatgctgagctaaattccattctggtgtgcgacttatgatgattgccctattgtttgtcacaagactgtgttgtcgcagagataccgtgggtgggagagatcaagtatggtttatgccaagtcaagagcacaatgtattgtccgcttgatggatgtaaaccaacggctggcggtttgtagccaccggccacttggccaaataatttagtctgtgttgtgttgtgtctcggtctcgtgagccgaaagagttgccaagctgcgacatatgatgccaaagcatgaataagggtctatagcatgtgatctcctgtgttgttgtttgaagtatgagttgctagggagggagggctacctttctatctgaagtgccgtgcaatgtaatggtttcctctttgcttctcttctgaactgggaggtccggtctgaactggcagtaaagctgaagcatcatatgcaggtctgcacacctccacggttgtgctacctccggctgcatgttttgcagggcttctgaaacaagtactatctaccttctcttctaagtttatccatcaactcatgaattcacgaacattccacaactcgtacacacacacacaaaaaaggaaacataggaatggaccgcatcattgtaatcacaattttttttcttcatttcgtagaatggcactcttgctctatagtataagaaatgaagggcgcttat

SEQ ID NO: 96675 - DNA, 80 bp, Zea Mays
gtgaggagctgatcctcctgattttcctagagaatcagaatcattttaaaaaccgtttggcaagtaaactgattcttgtc

SEQ ID NO: 96676 - DNA, 2222 bp, Zea Mays
caggtactgtacgcgtagcctaggcaactgttcgccacgtagcaccacattgaccgtctggcccgcaactccccaccctttcccggccgctcgccttttctcctcttctccgatctctctccccctcttgaccgcccttgggatttggggggccctgggcaaattgcggtggccggggcccgccgccgcgacagctccgtccgtcctcggttccgctcttccgtccgatccatacgtttccgttccctataaattctttaaattcccgcaagtcccgtaccgctcagccaacccaacacgacggcgagtcgacggcgagtgggagggaacaccgcagcagcgatgcgtcggggctcgctttcgctgctgctgcttgcggcggtggcggcggtagcggccaccgcggttcccgccgagccggcgtcgacgctgtccgggccgtcgcggccggtgacggtggcgatcggagacaggggccacgcggtggacctgccggacacggacccgcgggtgcagcgccgcgtcacgggctgggcgcccgagcagatcgccgtcgcgctctccgcctcgcccacctccgcctgggtctcctggatcacaggggactaccagatgggcggcgccgtggagccgctggaccccggcgcggtgggcagcgtcgtgcggtacggcctcgccgccgacgccctcgaccacgaggccaccggggagtcgctcgtgtacagccagctgtacccgttcgagggcctccagaactacacctccggcatcatccaccacgtccgcctccagggcctggagcctgggaccaggtacttgtaccggtgcggcgacccggccatcccggacgccatgagcgacgtgcacgcgttccgcacgatgccggccgtcgggccggggagctacccggggcggatcgccgtggtcggggacctcgggctcacctacaacaccacctcgacggtggaccacttggtgcgcaaccgccccgacctggtgctcctcctcggcgacgtctgctacgccaacctgtacctgaccaacggcaccggggcggactgctactcctgcgccttcgccaagtccacgcccatccacgagacgtaccagccgcgctgggattactggggaaggtacatggagcccgtgacgtcgagcatcccgatgatggtggtggagggcaaccatgagatcgagcagcagatccacaacaggacgttcgcggcctacagctcgcggttcgcgttcccgtcggaggagagcgggtcctcctcgccgttctactactcgttcgacgccggcggcatccacttcgtcatgcttgcgtcctacgccgactacagcagatcaggtgcgcagtacaagtggctggaggcggacctggagaaggtggacaggtcggtgacgccatggctgatcgcgggctggcacgcgccctggtacaccacctacaaggctcactacagggaagccgagtgcatgagggtggagatggaggagctcctctacgcctacggtgtcgacgtcgtcttcaccggccacgtgcacgcgtacgagcggtcgaaccgggtgttcaactacacgctggacgcgtgcggccccgtgcacatctcggtgggcgacggcggcaaccgcgagaagatggcgacggcgcacgcggacgaggccggccactgcccggacccggcgtcgacgccggaccccttcatggggggccgcctctgcgccgccaacttcacgtcgggccccgccgcgggccgcttctgctgggaccgccagccggagtacagcgcgtacagggagagcagcttcgggcacggcgtcctggaggtcaggaacgacacgcacgcgctctggcggtggcaccgcaaccaggacctccatgccgccgccgccgccaacgtcgccgccgacgaggtctacatcgtcagggagcccgacaagtgcctcgccaagacggccagattgttggcctattgattgatccatcactcctagctactcctactctggtcgctgcctattgattgatccatcaatcctgttaattttcagaagagtttcagaagagtcttaatactcctagtcttaatagtcctagctatgcaaatatgcagtgttaatttgcggcagtaccagattaagcttccatccagattggcagcggtcaattcttgtccttggcacactactcgagatgaaataagctttaccttaaaacc

SEQ ID NO: 96677 - DNA, 1977 bp, Zea Mays
cctcttgaccgcccttgggatttggggggccctgggcaaattgcggtggccggggcccgccgccgcgacagctccgtccgtcctcggttccgctcttccgtccgatccatacgtttccgttccctataaattctttaaattcccgcaagtcccgtaccgctcagccaacccaacacgacggcgagtcgacggcgagtgggagggaacaccgcagcagcgatgcgtcggggctcgctttcgctgctgctgcttgcggcggtggcggcggtagcggccaccgcggttcccgccgagccggcgtcgacgctgtccgggccgtcgcggccggtgacggtggcgatcggagacaggggccacgcggtggacctgccggacacggacccgcgggtgcagcgccgcgtcacgggctgggcgcccgagcagatcgccgtcgcgctctccgcctcgcccacctccgcctgggtctcctggatcacaggggactaccagatgggcggcgccgtggagccgctggaccccggcgcggtgggcagcgtcgtgcggtacggcctccagaactacacctccggcatcatccaccacgtccgcctccagggcctggagcctgggaccaggtacttgtaccggtgcggcgacccggccatcccggacgccatgagcgacgtgcacgcgttccgcacgatgccggccgtcgggccggggagctacccggggcggatcgccgtggtcggggacctcgggctcacctacaacaccacctcgacggtggaccacttggtgcgcaaccgccccgacctggtgctcctcctcggcgacgtctgctacgccaacctgtacctgaccaacggcaccggggcggactgctactcctgcgccttcgccaagtccacgcccatccacgagacgtaccagccgcgctgggattactggggaaggtacatggagcccgtgacgtcgagcatcccgatgatggtggtggagggcaaccatgagatcgagcagcagatccacaacaggacgttcgcggcctacagctcgcggttcgcgttcccgtcggaggagagcgggtcctcctcgccgttctactactcgttcgacgccggcggcatccacttcgtcatgcttgcgtcctacgccgactacagcagatcaggtgcgcagtacaagtggctggaggcggacctggagaaggtggacaggtcggtgacgccatggctgatcgcgggctggcacgcgccctggtacaccacctacaaggctcactacagggaagccgagtgcatgagggtggagatggaggagctcctctacgcctacggtgtcgacgtcgtcttcaccggccacgtgcacgcgtacgagcggtcgaaccgggtgttcaactacacgctggacgcgtgcggccccgtgcacatctcggtgggcgacggcggcaaccgcgagaagatggcgacggcgcacgcggacgaggccggccactgcccggacccggcgtcgacgccggaccccttcatggggggccgcctctgcgccgccaacttcacgtcgggccccgccgcgggccgcttctgctgggaccgccagccggagtacagcgcgtacagggagagcagcttcgggcacggcgtcctggaggtcaggaacgacacgcacgcgctctggcggtggcaccgcaaccaggacctccatgccgccgccgccgccaacgtcgccgccgacgaggtctacatcgtcagggagcccgacaagtgcctcgccaagacggccagattgttggcctattgattgatccatcactcctagctactcctactctggtcgctgcctattgattgatccatcaatcctgttaattttcagaagagtttcagaagagtcttaatactcctagtcttaatagtcctagctatgcaaatatgcagtgttaatttgcggcagtaccagattaagcttccatccagattggcagcggtcaattct

SEQ ID NO: 96678 - DNA, 1365 bp, Zea Mays
ttggtctaacgcttcgcctttcgacccccctttcctccgacttctttcagcagcatcccctagtcctcgcctggactccgcggagtctttggttgctccgagttcctcgcctggttttcggcaaggccaaggaaaggtggtcacttcacttctgtttttttttttttactgccgccgcaaacctccgctcctgtgccataccgccattccattcttaatctgggcgccgaagaagagaggacgggagcgaggtccggtcgaagaatcgtagcggattgggggaggggggagcggcggcggcggcggcggaggccggtcggtatgattcaactgctgttcctcgtgctgttcgcggagggcgcggtggcgctgctcctcatggtgaaggtcgggccgctgcgggagcttgcgatgcgcggcgtggaccaggtgaagacgggcaagggcccggccacggtcaagacgctggcgtgcacgctctccgtcatcctcatgtccagcgtcgccagcatcctcaagatccagaacagggggctcaagctcggcaccgtcagccccatggaccaggtgctctggaggacgcacctcctcgaggcatccctcatcggatacacgctattccttgcatttgtaatcgaccggctgcaccactacctgcgaaagctgatgacactgaggaaaacatccagcacatccagagaggaggtggagaaacttcagatggagaaccggtcgctccgcgaaaaggaggagaagtcctccagtgagacgaagaggcttcagcgagagattgcgaggctgaatgagggcatgaagaagctgaaatctgagaccgaagagcacgagaggaaggcgtcggtggcagaggcccatgtcgacgcgctgcagaagcagtcggaggagctgctcctggagtacgaccggttgctggaagacaaccagattctgcagactcagctacttagcagaggctaagctaaggagcttggtttgttagcaagactcctttaccaggtagtgtcgtagagccaaggacttgcccgattctgaatgcttacatgccgcggttctaaatttcggcatgtccattgtggttcttggcgtccatgctgttcctaacttgtgatcttgttgatgtatggatgcagcgtgtatttttagagttcatgtttcttccatttccgatagatggaggtacatgatgtaaggtccaggaacgacgggacgtccttgaggaattcggtagtcaaggctctcagaatgtgcttgaaaaaaatcggagtggcatgttacgcagattctgattcgtcctgaacttgaagcctgcatgaatgaaccaaagttgcctgaaaaaaaaggctgaac

SEQ ID NO: 96679 - DNA, 2489 bp, Zea Mays
cccctgcggccctgcctgaccctgctctagatctccatcgcgcgcgcgcagatctcagtcctaagtctagacctctatggcggacctcgtcatggcccctccgccggccatggacctcttcggggagccgatcgaggcgcaccctccctggttcaagcccgacgccttcctccgcgcgggcttcgacgcggacgcctacgtcgccgagctccgctcctacgtcccgctcgacagcctcgccgccgagctccgcgcccacctcgccgcgctccgcgccgagctcgtcggcctcatcaaccgcgactacgccgacttcgtcggcctcagcgcgcacctcaagggcgtcgacgccgccgcggcccggatgcgcgccccgctcgccgacctcagggacaaggtcgccgccttccgcgccggggcatccgccgcgctcgccgcgctcagggaggggctccagcagcgggccgccgccaccgccgcgcgcgagctgctcgagctcctgctcgacacctcccacgtcgtctccaaggttgagaaattgatcaaggaactaccaactgcaccgtcagattcatctaatgctgaaattcctatcaatgacactggaacaccaaatgggaaggctgggacaggtgtcagagaaacacagagcattctcctagaaagaattgccagcgagatgaaccgtcttaaattctacattagtcatgcagagaacctcccttttattgagaacatggagaagaggatccaaggtgctacaaaactgctggatggtagtttggagcgctgctttgtggatggtctggaacaccgtgatgctaaagttatatacaactgtttgcgtgcttatgctgcaattgacaatacatcatcagccgaagagctttttcgtacaacagtggtgtctccattgatccagaaaatagttcctcaaaactatgcaagagctgttgctggggcatcatctgatgagctagaagaggattatcaacagataaaggcatgcgtagaaaaagattgcaaatttatattggaaatatcttcgtcagaaaactctggattgcatgtttttgattttctgggtaattcaatactcaaagaagtcctttctgcaatccagaaaggcaagcctggggccttttctcctggaaagcctaaagaattcttgaggaactacaaagtgagcttaggatttcttgattttcttgaaggctactgcttctccaagtctgctgtaacgaagttacgctatgagcctgcttacacagatttcatgcgacagtggaatgttggtgtctacttttcgttgcgatttcaggaaattgcgggtggccttgattctactcttacaaatacctttagtcctactggattgaatgaggctcaacagaaaccgttgctcttgaaacaaagtattaagctcttagaaagtttggattcatgttggagtgatgaggttcttgtattctctcactgcgataaattcctccgtctgtccttgcagcttatttcaaggtatacaacatggctttcatgtggtttatcagcacgtaaagcttctgacaggagcccaaattcacctgcagatgctgaatgggcactgtctattcctatagaagatttcatatatataatgcatgatgtgcatgctgtaattggtgagctttcagaatcaggcagctttattggacatgtgaatcagtcactagggtcatgccccattgaagtatttaatcttgtgaaaggaagtatattgcaagctgctgaacctttaaaggagctgttgcctgcaataatggatgtcatgattggaatcatagttaagaagtctaatgaggacctgaagcacctgaaaggaataacagcgacatataggatgacgagtaaacttccagtcaggcattctccatatgtatcagggattttacatccactgaaggtgtttcttgaaggggaccgtatgcactatctatcagaagatgataaaactaagttgtgtcgtgggtctgcaaataagattactgcaacctactatgacttggtctctgaagttgtcactgtggcaaggaaaaccgagtcttcattgcagagactgcgccaaggtgcacaaaggcgagtaggagctagtacagatgcctcagatagcatcatatctgatacagacaagatctgtatgcagctatttcttgatattcaggagtacgcacggaaccttcgtgcgataggaatagacgcgagagagattgattcctacagagctctatggcagtgtgttgccccaaaggacaggcacgagaacatccagttttgatgtaaagaacgctgtcagtatatataaaataaaattgtcaacccgtagatatctcagtatgtgaaaatgatacggttggcactggttcatccagtcttcaacgacatgacaccctgtcagtttgtgaaacaaggacgtgtttggtttgatgaatgaggtggtacatttctctctt

SEQ ID NO: 96680 - DNA, 1072 bp, Zea Mays
tcgattcaagctgacgttctattcccacaatcccactccagaagctgccgagaccgagagagcctgcggattacacgcatctcgccgacccccgccccccatggccgatctccgcccgccggagccgggcacgaacggctccagcgccggcgtggtcgccgcgctgccggccgtggaggccgtagcggccgcagagaccgccatggccgccacgggcggaccacagccgcccgcgccgccctactccaagcgacgccgccgccccagcgtccgcctcggggacatcgacgctccgcccccgcgccgcaaccacaagccgccgtcctcgtcgcacccgcgcccgccgcgccgcgcgcacccggacgacctcgacccgcacgcgcacagccgccgggggtccaagccgccggcgcagcgccgcccgcggaccgcctggattcccgccgcgcccgcttcggcggggcccgccgagggctacgacgacgacgaggagcgctactacgacgacgaggaccagtccgactccgcggccgccgccgccgcgagggctagggtttcgggcagccgcgacgccagcggcgacgagtcggacggggtggcggactggggcctccccaacggtcgccttccctccgcgacggggtatggcggcgtcaaggcctggctcgatgggttggggctttctcggtacgcgcccgtctttgagatccatgaggtggacgacgaggtgctccccatgctcacgctggaggacctcaaggacatgggcattggggctgttggctccaggaggaagatgtacgccgccatcctcaagctccggagcgacaacgcgtcctgagttgcaactggttaaggcgtgctgtgggcagagagctgcacggaaggtgcaaggaaacgataagctgatgaggcattgatacccaaagagtagcagatggatcatgagagatcatagtttttggtctttttgaaatgtcatctccaaaaaaaatgtgatggttgtcgaacacgatagtccggtacattttttgccataagtataagcatgctagaggatcattgagctgga

SEQ ID NO: 96681 - DNA, 211 bp, Zea Mays
gacgagcgcgggggaaggaggaggtggccccgcacgcggccccgcccagggcgttcccgccgccgctggcgcggcgcaggtggagcccaccaccatggagatctccaccacacatggatttctccggcggcggcggcggccgcagccgcgccgagccggcccggtggctcgagatcgcccggaagctactcgtcgcgcgagacctggtcgg

SEQ ID NO: 96682 - DNA, 1862 bp, Zea Mays
ctgagaccgagagcctccagaaacccacgcgacgcgaccgaccaccatggccgcctccgcgctcctcctctcgccgcggctcgtgtctttcccgcctcacccgagcctcgccccactcttcaccaagagaccaccgccctaccccctcggcggcgccggcgcgaggctccgggccgtcggggacgggcccggcgcggggctgccacccgagcaggccacggtctacgacggcgcctacggtccctggaccctggaggactccgacgtgcgcgaggtcctgctgtaccggtcggggctggtgacggctgcggcgtccttcgtggcggcgtcctccgcggcgttcctgccggaagggaaccccgccgcctccgccgtcaccggcgccgccgacctcctgtacgccgccggcgccgcggggctggggctgtcgctggtcctcatccacatctacgtcaccccgataaagcgcttcctccaggcgctgtgggcggccggggcgctcggctccgtcgggacctacctcgtcgccgcccgcccgctggatgagggcctcgtgcagtacgtgctggaccaccccgccgcgctgtggttcgtcggccccacgttcgccgcgctcactggcctcgtcttcaaggaaggtctctgctatgggaaactggaagctggcatcttgacgtttcttatccctgggcttcttcttgggcatttgtctggtttaatggataacagcacaaaggcaggtcttttaggactgtggatgcttcttttcacaatcttcgccgctagaaaattccagcagcccatcaaggatgacgtcggagacaaatctgttttcatgttcaacgctctccctgaagaggaaaagaaggcttggatccagaaactcgagaggcaaaaggggcaagagttgtttgagtagaaaagagtagcttgtcttggtgcagccaatagttcgtccgtgaatgtttgtagctcatgtatatgattatggctccagaaatttgacaaatacacccaaagacatgaagacgagaacacgttccaatagagatgtaattacaaatctgttagatcacaggtaagatgtaactaaataaagcagttttgttgttatagtcgttgacaatattttagtttgttgctcccatgccttaatcaagtaaatacaaaattcactacttgattggaaggtggaggaaacagaaaaagttatctatgaacgtacatatgatgagcaaacagataatggtaacagaaacagaagaccacattcgcttgcatgataatggaccatccaccgagttcagtctaaaactaccaaacttaatcaccacaatacaactcaatagttctcacatacaatacaactcagatacatataagccttggaatgccttaaacatgtggcagatccccaagacattggctactacttggtagcacccaatcgcaaggtataccatgcagactgttctggtaataagctcttaaaacatcaagaaaatttgcaccaacatgactgatgccctaaataaatagctatgaatcaccaccattcaacctaccaatggtacacaaattttgaagaaatcagttgcagagtcgactagtttccatagacagcgccatttgagttcagagaggctccgttctggggaacgtcagctccctctacctccgacaagaagccattctcaaagaacgctgaatggagggcttgtacgcactgttttgcctcactgtcattgactaccaaggaaatgttcaccttggacgccccttgtgagatcatctggacattaacaccatttcttcgcagaacgttgaatgcctggcatgcagcaaaacagggtcagccattc

SEQ ID NO: 96683 - DNA, 1947 bp, Zea Mays
tgactctgagaccgagagcctccagaaacccacgcgacgcgaccgaccaccatggccgcctccgcgctcctcctctcgccgcggctcgtgtctttcccgcctcacccgagcctcgccccactcttcaccaagagaccaccgccctaccccctcggcggcgccggcgcgaggctccgggccgtcggggacgggcccggcgcggggctgccacccgagcaggccacggtctacgacggcgcctacggtccctggaccctggaggactccgacgtgcgcgaggtcctgctgtaccggtcggggctggtgacggctgcggcgtccttcgtggcggcgtcctccgcggcgttcctgccggaagggaaccccgccgcctccgccgtcaccggcgccgccgacctcctgtacgccgccggcgccgcggggctggggctgtcgctggtcctcatccacatctacgtcaccccgataaagcgcttcctccaggcgctgtgggcggccggggcgctcggctccgtcgggacctacctcgtcgccgcccgcccgctggatgagggcctcgtgcagtacgtgctggaccaccccgccgcgctgtggttcgtcggccccacgttcgccgcgctcactggcctcgtcttcaaggaaggtctctgctatgggaaactggaagctggcatcttgacgtttcttatccctgggcttcttcttgggcatttggtaactcagaaaccaaccactagcatttatctcctcaaactgttggtatctgcttctgttgtcttacaatctttgtgcagtctggtttaatggataacagcacaaaggcaggtcttttaggactgtggatgcttcttttcacaatcttcgccgctagaaaattccagcagcccatcaaggatgacgtcggagacaaatctgttttcatgttcaacgctctccctgaagaggaaaagaaggcttggatccagaaactcgagaggcaaaaggggcaagagttgtttgagtagaaaagagtagcttgtcttggtgcagccaatagttcgtccgtgaatgtttgtagctcatgtatatgattatggctccagaaatttgacaaatacacccaaagacatgaagacgagaacacgttccaatagagatgtaattacaaatctgttagatcacaggtaagatgtaactaaataaagcagttttgttgttatagtcgttgacaatattttagtttgttgctcccatgccttaatcaagtaaatacaaaattcactacttgattggaaggtggaggaaacagaaaaagttatctatgaacgtacatatgatgagcaaacagataatggtaacagaaacagaagaccacattcgcttgcatgataatggaccatccaccgagttcagtctaaaactaccaaacttaatcaccacaatacaactcaatagttctcacatacaatacaactcagatacatataagccttggaatgccttaaacatgtggcagatccccaagacattggctactacttggtagcacccaatcgcaaggtataccatgcagactgttctggtaataagctcttaaaacatcaagaaaatttgcaccaacatgactgatgccctaaataaatagctatgaatcaccaccattcaacctaccaatggtacacaaattttgaagaaatcagttgcagagtcgactagtttccatagacagcgccatttgagttcagagaggctccgttctggggaacgtcagctccctctacctccgacaagaagccattctcaaagaacgctgaatggagggcttgtacgcactgttttgcctcactgtcattgactaccaaggaaatgttcaccttggacgccccttgtgagatcatctggacattaacaccatttcttcgcagaacgttgaatgcctggcatgcagcaaaacagggtcagccattc

SEQ ID NO: 96684 - DNA, 1315 bp, Zea Mays
ctgagaccgagagcctccagaaacccacgcgacgcgaccgaccaccatggccgcctccgcgctcctcctctcgccgcggctcgtgtctttcccgcctcacccgagcctcgccccactcttcaccaagagaccaccgccctaccccctcggcggcgccggcgcgaggctccgggccgtcggggacgggcccggcgcggggctgccacccgagcaggccacggtctacgacggcgcctacggtccctggaccctggaggactccgacgtgcgcgaggtcctgctgtaccggtcggggctggtgacggctgcggcgtccttcgtggcggcgtcctccgcggcgttcctgccggaagggaaccccgccgcctccgccgtcaccggcgccgccgacctcctgtacgccgccggcgccgcggggctggggctgtcgctggtcctcatccacatctacgtcaccccgataaagcgcttcctccaggcgctgtgggcggccggggcgctcggctccgtcgggacctacctcgtcgccgcccgcccgctggatgagggcctcgtgcagtacgtgctggaccaccccgccgcgctgtggttcgtcggccccacgttcgccgcgctcactggcctcgtcttcaaggaaggtctctgctatgggaaactggaagctggcatcttgacgtttcttatccctgggcttcttcttgggcatttggtaactcagaaaccaaccactagcatttatctcctcaaactgttggtatctgcttctgttgtcttacaatctttgtgcagtctggtttaatggataacagcacaaaggcaggtcttttaggactgtggatgcttcttttcacaatcttcgccgctagaaaattccagcagcccatcaaggtaaacaatctctgccagtgacagcttcctgattcgaacctgacctgacaatgtcaccaatcaggatgacgtcggagacaaatctgttttcatgttcaacgctctccctgaagaggaaaagaaggcttggatccagaaactcgagaggcaaaaggggcaagagttgtttgagtagaaaagagtagcttgtcttggtgcagccaatagttcgtccgtgaatgtttgtagctcatgtatatgattatggctccagaaatttgacaaatacacccaaagacatgaagacgagaacacgttccaatagagatgtaattacaaatctgttagatcacaggtaagatgtaactaaataaagcagttttgttgttatagtcgttgacaatattttagtttgttgctcccatgccttaatcaagtaaatacaaaa

SEQ ID NO: 96685 - DNA, 1013 bp, Zea Mays
gctgttcctatctcctccgcggtgccagtcactcagtcagcctctgcgagcatccaacgccgaccaaccaccaccacaagttcaccgctaccaccactgcacggagtcacggcgatgacgccgcctcaccaccccgtaaacttcgccgtccttctcctcttcctatgcctcccggcagtcccacccgccgccgccgcggccgacccgaccccgaccccatggcccccgcagttccacgcgacgctggtgatggactaccacggcaacatgtccgtggccgacctctggtacgactggccgggcggccgcaacctgcacgtcatccgctaccagctcgccgccgacgcgccatactacgacaacgagtggaacaacggcacctccttcttctacacgccggcgctccgcacctgccgctccgccgccgtcggggtcggcatcctccgcccggactggctccgccccggggccgtctacctcggccgccgcgacgccggcggattcgactgccacgtctgggccaaggccgacttcatcacctactacgaggacgtcaacaccaagcgacccgtcaagtgggtcttctacacaggtaggaccgcctacgttatgagctttgaggtgggagcggtgctggaggacgcggcgtggcaggccccggagtactgcttcaccaacaacggtgggcttgggctggccgacgagaccaccaccaccatcgctggcggcagcagcttcgtccccaggagcgtgctgtgaggtccccacgagcggcagcagcttcagtatttggagaaatacgatcgatatgtgcacagcgtacgcgcagtaatgtatgtaatcttttgcctgtctgttgtttatctctgagcgaaacgtgtggcttttgtggtgtccacgagctctgcggactgcgtgacactattgaggaagagacggaaacaaaagcaaaaaaagaaagacatcggcatgcacaaatagcatgacgagacgactgtacgaaaaccacaaaa

SEQ ID NO: 96686 - DNA, 1093 bp, Zea Mays
atttgatggtacatggttgcgtgatcaccaaacaaattatacagttctcttaatcctgatcctctgtatgttcctcaatttctgggtgtccaatatcgaaactgaacgatctcgaatgttgacaccctgtcgtttcctaccgtttcaggtggtgtgcaaacctggtagtctgaagacatgcaaaaagttcgaggcggaaatatatgtcctgacaaaggatgaaggtggccggcacactgcctttgtcacaaattacagcccccaattctacttcaggacagctgatgtcactggaagggttgagctgcttggggagatgaagatggttttgcccggtgacaatgtaactgcgaattttgagttgatatcacctgttcctcttgaacctgggcaaagatttgcgattagggaaggaggaagaacggtcggtgctggagtcgtctccaaagttcttagctgatcagtttccactttcttctccgtagcaattcagtgaacaaacgagtgttgatatgtccgaccgggttagaaacgagcgcaaagcaccgggttttcttttgcatttttcttggaatgcctgagcaaaggcagagctggcctggccagtggccaccattttattgttgaggcgtggtgctgtgtaacaccacggttagtttggttgacacgcaagttgggcataactttgattgaataatactagtctcatcataaacatattttctagcaattttgtcatgtcggtcttggaggcgctttgtcaagtccgcagaaaaaaaatgctggttggactatatatgtgtatgtatttgtgatgtttaccgtcgctagcttctgatctggtgatgcgaaattttaatggcatggatattatctatttgttttcgaatttgattcgactacaaggactaaacccgatccgtatctgagtccatgttctttagtatctgatatgtatttgatatttatccgtattcataaagtcataaagttggatatgtattatgttgatactgttttaaatattagctgacataatttaataacatttgtattcgatgtgaatcgaaaagaaaaaaatgtaaaaataaac

SEQ ID NO: 96687 - DNA, 2349 bp, Zea Mays
aaacttaaagccctaaacccatcttgctcccccctcgtctccactgctctgctgctcctcgcgccgccgcagcgacgtaatggcttccgccgcggtgctccggaacgccggctcccggcgcctcttctcctaccctactctccgcgccgctgcgatatatgtaccttctgcgctacccgatgcgcccgcggcggcggcagcgccggcccagccgccaccgacggccgggaccctctgggcgaggtctatggccaccttcacgcgcacgaagccccatgtgaacgtcggcaccattgggcacgtcgatcacggcaaaaccactctcactgctgccattaccaaggtcctggccgaggcagggaaggccaaagccgttgctttcgacgagatcgacaaggctccggaggagaaagccagaggaatcaccattgcgacagttgggtcctagcacgtctcctatagttgtgccagaccgatagagcaattctctttatattttttattcttcatttactgcccagtgtttaaccatttggattgtttttaggctcacgtcgagtatgagacggctaaaaggcattatgctcacgttgattgtccaggtcacgcagattatgtcaaggtttatacgaatcaagatttttttctttctcaaatgcattattattattttagtaatgaaggttgtttgcacgtcaaattgtgaaaaatctattgaaagccaccatctagagccattacattcctttgtttatggtccaagtctttttgtttttgtgaaaatggtagaacatgatcactggagctgctcaaatggatggtggtattcttgtcgtgtcagctcctgatggcccgatgccacaaactaaggagcatattcttcttgcccgtcaggttggtgtaccttcccttgtgtgcttcttaaacaaagttgatgctgttgatgatccagagcttctggaacttgtagagatggagcttcgggagctcctcagtttctacaagttccccggtgatgagattccgatcatccgtgggtctgcgttgtctgctttgcaagggaacaatgatgagataggaaagaatgcaattttgaaattaatggacgcagttgatgagtacatccctgatcctgtgaggcagcttgataagcctttcttgatgccgatagaagatgtgttttctattcagggtcgtggaactgttgttactgggcgtgttgaacagggaacaatcaaaactggtgaagatgttgagatcttgggtttggcacagactggtcccttgaagactacagttactggtgttgagatgttcaaaaagatactggaccatggagaggctggtgacaacgttggccttcttctccgtggtcttaagcgtggtgatgttgagcgtggccaggtggtgtgcaaacctggtagtctgaagacatgcaaaaagttcgaggcggaaatatatgtcctgacaaaggatgaaggtggccggcacactgcctttgtcacaaattacagcccccaattctacttcaggacagctgatgtcactggaagggttgagctgcttggggagatgaagatggttttgcccggtgacaatgtaactgcgaattttgagttgatatcacctgttcctcttgaacctgggcaaagatttgcgattagggaaggaggaagaacggtcggtgctggagtcgtctccaaagttcttagctgatcagtttccactttcttctccgtagcaattcagtgaacaaacgagtgttgatatgtccgaccgggttagaaacgagcgcaaagcaccgggttttcttttgcatttttcttggaatgcctgagcaaaggcagagctggcctggccagtggccaccattttattgttgaggcgtggtgctgtgtaacaccacggttagtttggttgacacgcaagttgggcataactttgattgaataatactagtctcatcataaacatattttctagcaattttgtcatgtcggtcttggaggcgctttgtcaagtccgcagaaaaaaaatgctggttggactatatatgtgtatgtatttgtgatgtttaccgtcgctagcttctgatctggtgatgcgaaattttaatggcatggatattatctatttgttttcgaatttgattcgactacaaggactaaacccgatccgtatctgagtccatgttctttagtatctgatatgtatttgatatttatccgtattcataaagtcataaagttggatatgtattatgttgatactgttttaaatattagctgacataatttaataacatttgtattcgatgtgaatcgaaaagaaaaaaatgtaaaaataaac

SEQ ID NO: 96688 - DNA, 2112 bp, Zea Mays
gccgcacggtatgcgtctgccggccgttctcattcccctccaaacttaaagccctaaacccatcttgctcccccctcgtctccactgctctgctgctcctcgcgccgccgcagcgacgtaatggcttccgccgcggtgctccggaacgccggctcccggcgcctcttctcctaccctactctccgcgccgctgcgatatatgtaccttctgcgctacccgatgcgcccgcggcggcggcagcgccggcccagccgccaccgacggccgggaccctctgggcgaggtctatggccaccttcacgcgcacgaagccccatgtgaacgtcggcaccattgggcacgtcgatcacggcaaaaccactctcactgctgccattaccaaggtcctggccgaggcagggaaggccaaagccgttgctttcgacgagatcgacaaggctccggaggagaaagccagaggaatcaccattgcgacagctcacgtcgagtatgagacggctaaaaggcattatgctcacgttgattgtccaggtcacgcagattatgtcaagaacatgatcactggagctgctcaaatggatggtggtattcttgtcgtgtcagctcctgatggcccgatgccacaaactaaggagcatattcttcttgcccgtcaggttggtgtaccttcccttgtgtgcttcttaaacaaagttgatgctgttgatgatccagagcttctggaacttgtagagatggagcttcgggagctcctcagtttctacaagttccccggtgatgagattccgatcatccgtgggtctgcgttgtctgctttgcaagggaacaatgatgagataggaaagaatgcaattttgaaattaatggacgcagttgatgagtacatccctgatcctgtgaggcagcttgataagcctttcttgatgccgatagaagatgtgttttctattcagggtcgtggaactgttgttactgggcgtgttgaacagggaacaatcaaaactggtgaagatgttgagatcttgggtttggcacagactggtcccttgaagactacagttactggtgttgagatgttcaaaaagatactggaccatggagaggctggtgacaacgttggccttcttctccgtggtcttaagcgtggtgatgttgagcgtggccaggtggtgtgcaaacctggtagtctgaagacatgcaaaaagttcgaggcggaaatatatgtcctgacaaaggatgaaggtggccggcacactgcctttgtcacaaattacagcccccaattctacttcaggacagctgatgtcactggaagggttgagctgcttggggagatgaagatggttttgcccggtgacaatgtaactgcgaattttgagttgatatcacctgttcctcttgaacctgggcaaagatttgcgattagggaaggaggaagaacggtcggtgctggagtcgtctccaaagttcttagctgatcagtttccactttcttctccgtagcaattcagtgaacaaacgagtgttgatatgtccgaccgggttagaaacgagcgcaaagcaccgggttttcttttgcatttttcttggaatgcctgagcaaaggcagagctggcctggccagtggccaccattttattgttgaggcgtggtgctgtgtaacaccacggttagtttggttgacacgcaagttgggcataactttgattgaataatactagtctcatcataaacatattttctagcaattttgtcatgtcggtcttggaggcgctttgtcaagtccgcagaaaaaaaatgctggttggactatatatgtgtatgtatttgtgatgtttaccgtcgctagcttctgatctggtgatgcgaaattttaatggcatggatattatctatttgttttcgaatttgattcgactacaaggactaaacccgatccgtatctgagtccatgttctttagtatctgatatgtatttgatatttatccgtattcataaagtcataaagttggatatgtattatgttgatactgttttaaatattagctgacataatttaataacatttgtattcgatgtgaatcgaaaagaaaaaaatgtaaaaataaac

SEQ ID NO: 96689 - DNA, 1602 bp, Zea Mays
ctcgtctccactgctctgctgctcctcgcgccgccgcagcgacgtaatggcttccgccgcggtgctccggaacgccggctcccggcgcctcttctcctaccctactctccgcgccgctgcgatatatgtaccttctgcgctacccgatgcgcccgcggcggcggcagcgccggcccagccgccaccgacggccgggaccctctgggcgaggtctatggccaccttcacgcgcacgaagccccatgtgaacgtcggcaccattgggcacgtcgatcacggcaaaaccactctcactgctgccattaccaaggtcctggccgaggcagggaaggccaaagccgttgctttcgacgagatcgacaaggctccggaggagaaagccagaggaatcaccattgcgacagctcacgtcgagtatgagacggctaaaaggcattatgctcacgttgattgtccaggtcacgcagattatgtcaagaacatgatcactggagctgctcaaatggatggtggtattcttgtcgtgtcagctcctgatggcccgatgccacaaactaaggagcatattcttcttgcccgtcagagatggagcttcgggagctcctcagtttctacaagttccccggtgatgagattccgatcatccgtgggtctgcgttgtctgctttgcaagggaacaatgatgagataggaaagaatgcaattttgaaattaatggacgcagttgatgagtacatccctgatcctgtgaggcagcttgataagcctttcttgatgccgatagaagatgtgttttctattcagggtcgtggaactgttgttactgggcgtgttgaacagggaacaatcaaaactggtgaagatgttgagatcttgggtttggcacagactggtcccttgaagactacagttactggtgttgagatgttcaaaaagatactggaccatggagaggctggtgacaacgttggccttcttctccgtggtcttaagcgtggtgatgttgagcgtggccaggtggtgtgcaaacctggtagtctgaagacatgcaaaaagttcgaggcggaaatatatgtcctgacaaaggatgaaggtggccggcacactgcctttgtcacaaattacagcccccaattctacttcaggacagctgatgtcactggaagggttgagctgcttggggagatgaagatggttttgcccggtgacaatgtaactgcgaattttgagttgatatcacctgttcctcttgaacctgggcaaagatttgcgattagggaaggaggaagaacggtcggtgctggagtcgtctccaaagttcttagctgatcagtttccactttcttctccgtagcaattcagtgaacaaacgagtgttgatatgtccgaccgggttagaaacgagcgcaaagcaccgggttttcttttgcatttttcttggaatgcctgagcaaaggcagagctggcctggccagtggccaccattttattgttgaggcgtggtgctgtgtaacaccacggttagtttggttgacacgcaagttgggcataactttgattgaataatactagtctcatcataaacatattttctagcaattt

SEQ ID NO: 96690 - DNA, 1817 bp, Zea Mays
aaacttaaagccctaaacccatcttgctcccccctcgtctccactgctctgctgctcctcgcgccgccgcagcgacgtaatggcttccgccgcggtgctccggaacgccggctcccggcgcctcttctcctaccctactctccgcgccgctgcgatatatgtaccttctgcgctacccgatgcgcccgcggcggcggcagcgccggcccagccgccaccgacggccgggaccctctgggcgaggtctatggccaccttcacgcgcacgaagccccatgtgaacgtcggcaccattgggcacgtcgatcacggcaaaaccactctcactgctgccattaccaaggtcctggccgaggcagggaaggccaaagccgttgctttcgacgagatcgacaaggctccggaggagaaagccagaggaatcaccattgcgacagctcacgtcgagtatgagacggctaaaaggcattatgctcacgttgattgtccaggtcacgcagattatgtcaagaacatgatcactggagctgctcaaatggatggtggtattcttgtcgtgtcagctcctgatggcccgatgccacaaactaaggagcatattcttcttgcccgtcaggttggtgtaccttcccttgtgtgcttcttaaacaaagttgatgctgttgatgatccagagcttctggaacttgtagagatggagcttcgggagctcctcagtttctacaagttccccggtgatgagattccgatcatccgtgggtctgcgttgtctgctttgcaagggaacaatgatgagataggaaagaatgcaattttgaaattaatggacgcagttgatgagtacatccctgatcctgtgaggcagcttgataagcctttcttgatgccgatagaagatgtgttttctattcagggtcgtggaactgttgttactgggcgtgttgaacagggaacaatcaaaactggtgaagatgttgagatcttgggtttggcacagactggtcccttgaagactacagttactggtgttgagatgttcaaaaagatactggaccatggagaggctggtgacaacgttggccttcttctccgtggtcttaagcgtggtgatgttgagcgtggccaggtggtgtgcaaacctggtagtctgaagacatgcaaaaagttcgaggcggaaatatatgtcctgacaaaggatgaaggtggccggcacactgcctttgtcacaaattacagcccccaattctacttcaggacagctgatgtcactggaagggttgagctgcttggggagatgaagatggttttgcccggtgacaatgtaactgcgaattttgagttgatatcacctgttcctcttgaacctggtaacgattacattctcaatttctttcgacagtatagaactatagaccaggtcttctgacaacatgctgttcttcgtgatgccattgcacgctccaagctacttcttttcattgaatactaaagaaattcatattggatcgtcaactcgtgcctttgatgcagggcaaagatttgcgattagggaaggaggaagaacggtcggtgctggagtcgtctccaaagttcttagctgatcagtttccactttcttctccgtagcaattcagtgaacaaacgagtgttgatatgtccgaccgggttagaaacgagcgcaaagcaccgggttttcttttgcatttttcttggaatgcctgagcaaaggcagagctggcctggccagtggccaccattttattgttgaggcgtggtgctgtgtaacaccacggttagtttggttgacacgcaagttg

SEQ ID NO: 96691 - DNA, 309 bp, Zea Mays
atgctaacatttggtaatcagagctgagcgggatccaccaccgcacgaccaccttaccaaatttcaagtgaacgctgggccatggcgccgcaatggaacgaagagcaagtggcacatttgttggcgaggattgaagagggaaatcaagagaagtggcggatgatggagacgatgcaggcgatgatcgagaacatggagtcctcggtgaaaagtgtgttgtctgaacaaggcgatctgcagaagtggcgctcggaagaggaggcgaacatctctaaagtcgtggaggtggtgaaggcgatacagagcaag

SEQ ID NO: 96692 - DNA, 103 bp, Zea Mays
ctggcatgaaaccaatgcttattttctattcgtgcatgtgcaggtgttgtactgtttcttagaattttccagcaacttcgattgggaggaattttgtttgagc

SEQ ID NO: 96693 - DNA, 94 bp, Zea Mays
gcgaaaaacaacttctctggtaatcttccgtactccatatccaatttggtctcgcttgagtacctgaaattggagaactgtttggaagcctcag

SEQ ID NO: 96694 - DNA, 1963 bp, Zea Mays
ggctgtcgtcatccaccggccggcacattgtgcatgcacttgcgcatcggatcgcatcagctgctgcttttgtccaccaagcaactattccctttccttccgccgcccaaatgccctcgtgcccggcaccggcaccggcagtggccaccttcctcctcgtcgcgcttctctcgtgcggcacacgggccatccggacgcacggcggctatgtctccgcggtcggggaccccggcatgcggcgcgacggcctccgcgtggcatgggaggcgtggaacttctgcaacgaggtcggccaggaggcccccggcatgggcagcccccgcggtgccgattgcttcgatcttctcgagacgagctccgacgaggaggggcggccggtgtactcggtggcgcacctggtgagcgacgccgacaaccgcctgggcgcgggcgacccgttcccggggtccccgccgggcgcggcccgcgtcacggacgccgacctctacgcgccggccaaggagctgtacctcggcgaccgctgccaggtggccgacaccccggcgccgtggcagttctggatggtcatgctcaagaacggcaacctcgacaccaccgccgccgcctgcccggagaacggccgccccgcgcgcccgttcccgcagacgtcccgcttcccgtgccccgccggcgccgggtgcatgaaccagccgctgctgttccacaaccgcaccgcgctggacgacgccggccgccggctccgcggcggcctgttcgggacctacgacctcgacgccgccgcgggtctcggcgccggcgacgtctccttctactccgtgacgtgggagaaggatgtggcggcgagcggtcgcggcggcgggtgggcattccaccacaagctgtgcacgtccaccaagtacccgtggctgatgctgtacctacggtccgacgccaccaggggcttctccggcgggtaccactacgacaccagaggcatgaccaagacagtaagctccggccacttcctctgattctgattcatcattcctttatatgctgcgtgcgatgcgagtctcgcacgtggtaaagtaacacggagcagagaacatgtgactgacgagtgagaggccacctcgccggccgggagcaggtgccggagtctccggacttcaaggtgcggctgaccctggacgtgaagcagggcggcgggcgcaacagccagttctacctgatggacatgggcagctgctggaagaacgacgggcgcgcctgcgacggcgacacggcgacggacgtgacgcggtacagcgagatgatcatcaacccggccacgccggcgtggtgctcgccgtcgcggatcgaccagtgcccgccatggcacaccttccggaacggcagccgcgtgcaccgccgcgacggagcccgcttcccctacggcgcctaccacgtgtactgctcccccgggaacgcggcgcgcgcggagcagcccaccacctactgcgacgcctacagcaacccgcaggcgcaggagatcctgcagctgctgccgcaccccgtgtggggagagttcggctacccgacggccaggggacaggggtgggtcggcgaccccagggcgtgggacctcgacgtcggcgccatgtcccaggcgctctacttctaccaggaccccggcacgccgccggccaggaggcggtggacgtcgctcgacgtcggcacggagatatacgtcagcgacagggccgaggaggcggagtggacgctcagtggcttcgacatccttgtgccggacaagtgtatcaagtcacagcaacgggccagcaacagctgctggtagacagacactttaatgtcactgtacgttacgctgagtagcatagcaggccaaagtgttcttcgtactagaagaggtggtgtaggatgactatattactcatgttagtactaactaactataaaaaataaaatgatgattaatcaactt

SEQ ID NO: 96695 - DNA, 1584 bp, Zea Mays
ggctgtcgtcatccaccggccggcacattgtgcatgcacttgcgcatcggatcgcatcagctgctgcttttgtccaccaagcaactattccctttccttccgccgcccaaatgccctcgtgcccggcaccggcaccggcagtggccaccttcctcctcgtcgcgcttctctcgtgcggcacacgggccatccggacgcacggcggctatgtccccgccgggcgcggcccgcgtcacggacgccgacctctacgcgccggccaaggagctgtacctcggcgaccgctgccaggtggccgacaccccggcgccgtggcagttctggatggtcatgctcaagaacggcaacctcgacaccaccgccgccgcctgcccggagaacggccgccccgcgcgcccgttcccgcagacgtcccgcttcccgtgccccgccggcgccgggtgcatgaaccagccgctgctgttccacaaccgcaccgcgctggacgacgccggccgccggctccgcggcggcctgttcgggacctacgacctcgacgccgccgcgggtctcggcgccggcgacgtctccttctactccgtgacgtgggagaaggatgtggcggcgagcggtcgcggcggcgggtgggcattccaccacaagctgtgcacgtccaccaagtacccgtggctgatgctgtacctacggtccgacgccaccaggggcttctccggcgggtaccactacgacaccagaggcatgaccaagacagtgccggagtctccggacttcaaggtgcggctgaccctggacgtgaagcagggcggcgggcgcaacagccagttctacctgatggacatgggcagctgctggaagaacgacgggcgcgcctgcgacggcgacacggcgacggacgtgacgcggtacagcgagatgatcatcaacccggccacgccggcgtggtgctcgccgtcgcggatcgaccagtgcccgccatggcacaccttccggaacggcagccgcgtgcaccgccgcgacggagcccgcttcccctacggcgcctaccacgtgtactgctcccccgggaacgcggcgcgcgcggagcagcccaccacctactgcgacgcctacagcaacccgcaggcgcaggagatcctgcagctgctgccgcaccccgtgtggggagagttcggctacccgacggccaggggacaggggtgggtcggcgaccccagggcgtgggacctcgacgtcggcgccatgtcccaggcgctctacttctaccaggaccccggcacgccgccggccaggaggcggtggacgtcgctcgacgtcggcacggagatatacgtcagcgacagggccgaggaggcggagtggacgctcagtggcttcgacatccttgtgccggacaagtgtatcaagtcacagcaacgggccagcaacagctgctggtagacagacactttaatgtcactgtacgttacgctgagtagcatagcaggccaaagtgttcttcgtactagaagaggtggtgtaggatgactatattactcatgttagtactaactaactataaaaaataaaatgatgattaatcaactt

SEQ ID NO: 96696 - DNA, 1820 bp, Zea Mays
ggctgtcgtcatccaccggccggcacattgtgcatgcacttgcgcatcggatcgcatcagctgctgcttttgtccaccaagcaactattccctttccttccgccgcccaaatgccctcgtgcccggcaccggcaccggcagtggccaccttcctcctcgtcgcgcttctctcgtgcggcacacgggccatccggacgcacggcggctatgtctccgcggtcggggaccccggcatgcggcgcgacggcctccgcgtggcatgggaggcgtggaacttctgcaacgaggtcggccaggaggcccccggcatgggcagcccccgcggtgccgattgcttcgatcttctcgagacgagctccgacgaggaggggcggccggtgtactcggtggcgcacctggtgagcgacgccgacaaccgcctgggcgcgggcgacccgttcccggggtccccgccgggcgcggcccgcgtcacggacgccgacctctacgcgccggccaaggagctgtacctcggcgaccgctgccaggtggccgacaccccggcgccgtggcagttctggatggtcatgctcaagaacggcaacctcgacaccaccgccgccgcctgcccggagaacggccgccccgcgcgcccgttcccgcagacgtcccgcttcccgtgccccgccggcgccgggtgcatgaaccagccgctgctgttccacaaccgcaccgcgctggacgacgccggccgccggctccgcggcggcctgttcgggacctacgacctcgacgccgccgcgggtctcggcgccggcgacgtctccttctactccgtgacgtgggagaaggatgtggcggcgagcggtcgcggcggcgggtgggcattccaccacaagctgtgcacgtccaccaagtacccgtggctgatgctgtacctacggtccgacgccaccaggggcttctccggcgggtaccactacgacaccagaggcatgaccaagacagtgccggagtctccggacttcaaggtgcggctgaccctggacgtgaagcagggcggcgggcgcaacagccagttctacctgatggacatgggcagctgctggaagaacgacgggcgcgcctgcgacggcgacacggcgacggacgtgacgcggtacagcgagatgatcatcaacccggccacgccggcgtggtgctcgccgtcgcggatcgaccagtgcccgccatggcacaccttccggaacggcagccgcgtgcaccgccgcgacggagcccgcttcccctacggcgcctaccacgtgtactgctcccccgggaacgcggcgcgcgcggagcagcccaccacctactgcgacgcctacagcaacccgcaggcgcaggagatcctgcagctgctgccgcaccccgtgtggggagagttcggctacccgacggccaggggacaggggtgggtcggcgaccccagggcgtgggacctcgacgtcggcgccatgtcccaggcgctctacttctaccaggaccccggcacgccgccggccaggaggcggtggacgtcgctcgacgtcggcacggagatatacgtcagcgacagggccgaggaggcggagtggacgctcagtggcttcgacatccttgtgccggacaagtgtatcaagtcacagcaacgggccagcaacagctgctggtagacagacactttaatgtcactgtacgttacgctgagtagcatagcaggccaaagtgttcttcgtactagaagaggtggtgtaggatgactatattactcatgttagtactaactaactataaaaaataaaatgatgattaatcaactt

SEQ ID NO: 96697 - DNA, 1926 bp, Zea Mays
ggctgtcgtcatccaccggccggcacattgtgcatgcacttgcgcatcggatcgcatcagctgctgcttttgtccaccaagcaactattccctttccttccgccgcccaaatgccctcgtgcccggcaccggcaccggcagtggccaccttcctcctcgtcgcgcttctctcgtgcggcacacgggccatccggacgcacggcggctatgtctccgcggtcggggaccccggcatgcggcgcgacggcctccgcgtggcatgggaggcgtggaacttctgcaacgaggtcggccaggaggcccccggcatgggcagcccccgcggtgccgattgcttcgatcttctcggtccgtccattccatctctttctctcctctttcgccggggtggttgagtgggttgccaccaagattaggtttttgaggaagcgtggatctctgttccgttccgcagagacgagctccgacgaggaggggcggccggtgtactcggtggcgcacctggtgagcgacgccgacaaccgcctgggcgcgggcgacccgttcccggggtccccgccgggcgcggcccgcgtcacggacgccgacctctacgcgccggccaaggagctgtacctcggcgaccgctgccaggtggccgacaccccggcgccgtggcagttctggatggtcatgctcaagaacggcaacctcgacaccaccgccgccgcctgcccggagaacggccgccccgcgcgcccgttcccgcagacgtcccgcttcccgtgccccgccggcgccgggtgcatgaaccagccgctgctgttccacaaccgcaccgcgctggacgacgccggccgccggctccgcggcggcctgttcgggacctacgacctcgacgccgccgcgggtctcggcgccggcgacgtctccttctactccgtgacgtgggagaaggatgtggcggcgagcggtcgcggcggcgggtgggcattccaccacaagctgtgcacgtccaccaagtacccgtggctgatgctgtacctacggtccgacgccaccaggggcttctccggcgggtaccactacgacaccagaggcatgaccaagacagtgccggagtctccggacttcaaggtgcggctgaccctggacgtgaagcagggcggcgggcgcaacagccagttctacctgatggacatgggcagctgctggaagaacgacgggcgcgcctgcgacggcgacacggcgacggacgtgacgcggtacagcgagatgatcatcaacccggccacgccggcgtggtgctcgccgtcgcggatcgaccagtgcccgccatggcacaccttccggaacggcagccgcgtgcaccgccgcgacggagcccgcttcccctacggcgcctaccacgtgtactgctcccccgggaacgcggcgcgcgcggagcagcccaccacctactgcgacgcctacagcaacccgcaggcgcaggagatcctgcagctgctgccgcaccccgtgtggggagagttcggctacccgacggccaggggacaggggtgggtcggcgaccccagggcgtgggacctcgacgtcggcgccatgtcccaggcgctctacttctaccaggaccccggcacgccgccggccaggaggcggtggacgtcgctcgacgtcggcacggagatatacgtcagcgacagggccgaggaggcggagtggacgctcagtggcttcgacatccttgtgccggacaagtgtatcaagtcacagcaacgggccagcaacagctgctggtagacagacactttaatgtcactgtacgttacgctgagtagcatagcaggccaaagtgttcttcgtactagaagaggtggtgtaggatgactatattactcatgttagtactaactaactataaaaaataaaatgatgattaatcaactt

SEQ ID NO: 96698 - DNA, 2390 bp, Zea Mays
cacgactgccgccgctgccgccctacgccaggtgtccaggtcatctccggcccattcgccggcgacgagcaccccactaggtacgcccaccgcatgctcttaaccttggtcttcaccctcagcttcatttccagctgcgcgaaaccgagcacctaaaccctaacttaccatcggtattcggatccgatctaatcacaagtgtatgtgcatgtattgtgccttctactcgctccgattgctcttgaaaaatcatcgggtgtacatgtctacgcccgtgcccttcaccgagtccagctcggccgggggatctgttctcaagatgcgaaaagagcgtcttttcccccctatgatccatccatccccttgtagtataagcctataggaataggatcttgtcatctcttcactgacctcaggcgtgttaatctcggttctttctttctcttgcgacggggtaccagatcgaccgagctatggacggcctgtggcatctgggggacgagctccgcgggcagcccaaggtggtggaggaccgccagtggtcgctcatgacatccaagctggcagagatcaccaggtccaggggcgagaggacgaacgacctcgactacgccaggatgaacgccgcccccgacgccaagcagtggggcaaggcggcgtcctaccagcaccacgacgagggcaggatggaccaccacgtcggcctcagcctcaagatgaacgatctcaagatgaacgaggccgccgctgccgcagtcatgaagctccccttccgcggcgtgccctacaacgtcaacccgatgtaccccaaggggagcaacgccaacgccaatgtcaacgcgttcaagatgaatgtcggggtgaacaagtactccagcagcacgaacgggaaagactccggcgggaaaagcggtggcggcagcaacaacaacagcggcggcggaggcaacggcaatgggaccgccaacggcagttccgcagttgacaagcgcttcaagacgttgccgacgagcgagatgctgccgaagaacgaagtccttggtgggtacatctttgtctgcaacaacgataccatgcaggaggacctcaagaggcagctttttggattgccagcacgatatcgtgattcagtccgggcaattactcctggcctgcctcttttcctctataactacaccactcaccagcttcatggggtatttgaggctgccagttttggtgggtctaatattgatcccactgcatgggaggataagaagtgtaaaggtgaatctagattcccagcgcaggtgaggatccgcgttaggaagctgtgcaagccgttggaagaggattccttcaggccagttttgcaccactatgatggcccaaagtttcgcctcgagctctccatcgcggagaccctgtccctgctagacctatgcgagaaggaaggcatctgagctgttggctgcctcgtgaggttctagtaaatatcaatcatccttgtatgttctgtagatggtggttggcaatgttgtttatttttcaagcgcaagctgctgccggtctcgttttccctgtcctggatggaagcaaagggacctggtactttgaaggccccccctcaaacataagctgtgagcctgtcagtgcacgtgtccgccgttgtcgtcaagaaccaaaccaaatcatgaaatcttgcgccgacggagagttggagcgtgtatgttttgctatctctatctacatgtctcagtagagtggatataccctggggtccccaaaagatgggggcctgtatgtaacactacgtgtaatggttaaggtgaatgtgccgtgaggccccccaaaagttggagtgtgtatttttgttgtcaccttgaaccgactttgcgtatgcttttttttagtgctgctaccttctgcgctgtgtttggcttctggttcatgtttttgtaatataaggtggcttgcgcaacattgtgtctgtctgtccagccgcaggatctggatgggtttcggcaggtgcaccaaccagacagacttggtatggatggtgaatggttgcatctgttcaaccgctgtcggtcagtgacaggccaagtactagcagatttggttcagctgcttgctggtgagagcaaagtactagcagctttgaagtcgactagagggccttctaggtgttcaagcaataatgcattcgtataacccataataatgaaatggtagcagcctgtcaacattcattcttctactcgagaaattggatggttctggtgatgcttggcttggttgtggttgctcattttgcaatcaatcaaatcaactgaagtggtttgctcatttattgtaatgaaccaaatcaagtgaagggaggcattcttcgcaaaatctaatatacagga

SEQ ID NO: 96699 - DNA, 1723 bp, Zea Mays
aaatctcgaaatttctgggcctctctcctccagcctgcatacccaacccttttgataaagaaacgggcctacacgggacacctgcctcctccccttctcccatctctccccgactccccctctccctctcgtggccacgactgccgccgctgccgccctacgccaggtgtccaggtcatctccggcccattcgccggcgacgagcaccccactagatcgaccgagctatggacggcctgtggcatctgggggacgagctccgcgggcagcccaaggtggtggaggaccgccagtggtcgctcatgacatccaagctggcagagatcaccaggtccaggggcgagaggacgaacgacctcgactacgccaggatgaacgccgcccccgacgccaagcagtggggcaaggcggcgtcctaccagcaccacgacgagggcaggatggaccaccacgtcggcctcagcctcaagatgaacgatctcaagatgaacgaggccgccgctgccgcagtcatgaagctccccttccgcggcgtgccctacaacgtcaacccgatgtaccccaaggggagcaacgccaacgccaatgtcaacgcgttcaagatgaatgtcggggtgaacaagtactccagcagcacgaacgggaaagactccggcgggaaaagcggtggcggcagcaacaacaacagcggcggcggaggcaacggcaatgggaccgccaacggcagttccgcagttgacaagcgcttcaagacgttgccgacgagcgagatgctgccgaagaacgaagtccttggtgggtacatctttgtctgcaacaacgataccatgcaggaggacctcaagaggcagctttttggattgccagcacgatatcgtgattcagtccgggcaattactcctggcctgcctcttttcctctataactacaccactcaccagcttcatggggtatttgaggctgccagttttggtgggtctaatattgatcccactgcatgggaggataagaagtgtaaaggtgaatctagattcccagcgcaggtgaggatccgcgttaggaagctgtgcaagccgttggaagaggattccttcaggccagttttgcaccactatgatggcccaaagtttcgcctcgagctctccatcgcggagaccctgtccctgctagacctatgcgagaaggaaggcatctgagctgttggctgcctcgtgaggttctagtaaatatcaatcatccttgtatgttctgtagatggtggttggcaatgttgtttatttttcaagcgcaagctgctgccggtctcgttttccctgtcctggatggaagcaaagggacctggtactttgaaggccccccctcaaacataagctgtgagcctgtcagtgcacgtgtccgccgttgtcgtcaagaaccaaaccaaatcatgaaatcttgcgccgacggagagttggagcgtgtatgttttgctatctctatctacatgtctcagtagagtggatataccctggggtccccaaaagatgggggcctgtatgtaacactacgtgtaatggttaaggtgaatgtgccgtgaggccccccaaaagttggagtgtgtatttttgttgtcaccttgaaccgactttgcgtatgcttttttttagtgctgctaccttctgcgctgtgtttggcttctggttcatgtttttgtaatataaggtggcttgcgcaacattgtgtc

SEQ ID NO: 96700 - DNA, 3082 bp, Zea Mays
cgttttctctggtacctaataagcatatatcctttggggacatacctgaaacttgtatccagaaggagtgaatggggtagctttcttgccacctttagaaagtccatttgattattttctcttggacaggacaggcagtgagatgagctgcgtcaagcaagcactgccagtgccagcagcagatataagcagaaggcaggtgatgcgaatggccgtccgtccatggcgttgcccattgagcattcctcaaggccgaccctggggtttcccttggggacggccctcttgctcctcgtgatctttgccctgagtggcatgttctcgtgctgctaccactgggacaagctccgctccctcctccggtctcggcatccaggcatgttccaggagggcacctccgtcgcgtcctcgccgagcaagacgacctgtgatcacaagctggacagagcgtgtggtttgcccgttatcatgcctggggacaaggtccccaggttcttcgcgaggccctgccctcacgagacgtctttgtgtttgccccaagctgcagagaagacggctggagttccgtcggagaccagatcatgcatgagccgtccgtcagtatctgtataaacacctgcatgacgcagttagctgttacggtgaccgactgtgtgtgtatatcatatgcttttggtaatacaatacaaagtgtgcaaacattccacttgtgatatatactatatacaagatttagacagtgttaggacttattcgttttgttctcaatctatgtgtaatagatgagattgagtgagtttaaattctaaacaagtcaaaatctttcataatttttttaataccatcaactccatatgccaaacaaacctggtgcactgcatgctcgtgtggaaataatcgtgcttgttgatgggcaaccaaatgagcccacgggcccagctacttcctctcggcccacgcgttcgcggtcagcaaggacgccgcgtcaccttccctccctgacccgacaaaccaacgccgcgtactcctctctactctctgccccgccaccaagctcgaccgaccgatgatcctcagccgcctgcatgtccgtgtcacccgccgatcccccgcgtccgccgccctccgcgatgcggcaacgcgcgccttggcctccgcgggcctcttccgtggcctccacggcggcgcctcctccgagcacggccgcgaacccgcaggtcctcttacgctctacaggaagctagtgagccaagggaagctcacgcatgatagttaccaggaaaatgtagcttccgaattagacaacctacttagtaggcttcaacggtacgagatggaaatggaggattatcatgacaagctgtacttctgggagaatagcagggagaaagagcggcgcaggcttcttgtcgaagaagctgaagataagcagcgtggtggtgtatggattgatgagagaaggggatttcttgacaagttggttgcacggagaagaagaggaagcatagaacctggagttggtaagtgggtctcgtacctgaaccgagagaagaaactagatacattggtaggccatagaccagtcgctcctgttgctcctaaaggattgtatctctatggaaatgttggaagtgggaagacaatgttgatggacatgttctatggggccactgaaggtgtcatcaaacacaggaggaggtttcactttcatgaggccatgcttgaaatacatgatcatatgcatgatgtatggaagagacgtgatgatgacaaatctattcactcaagtgctttcagttggatatcaagccttccttttgacacaaaaattaaggagtggttgattggcgaagagaagtacaaacaacagacacaggaaaagcacatccttttggcagttgctgacaagtttttggttgatagacaggcaaataaaactggagcaagcattctatgctttgatgagatacagaccattgatgtttttgctgtggtagcactttctggcattctaagcaggctgttaagcacggggacagtacttgtagcaaccagtaataaagcaccagaagatctgaatcaggatgggatgcaaagggacatcttccttgagttattatcaaaattggatgaaagctgcaatgagattcttgtgggtactgaaaaggattatcgccgcctaattccgacagaaggctcaactgaggttcactatttttggcctgccacttctgatgctcgcagcatgtatgaggctatgtggcatgacataactgaccaatcaggagaaaatattgtttctgtcaccattcctgtaatgtttgggaggtctattgagattcctcaaagctgtaatggtgtcgcaaggtttgacttcgagtatctatgtggtcgcccagtcggagcagcagattatatagcaatagctaggaactaccatacaattttcatatcagaaattccagcgatgagtatgaagatccgtgacaaggcaagaaggtttatcactcttatcgatgagttgtacaaccaccactgccgccttatatgcctagctgcctcatccattgatgatctttttcaaggaactgaggaaggacctctttttgatttagagagttttcagtttgaaaccgagtccgaagggacaaagctgaggagggatgttttggcggaaggcaatgctggctcaggaccatctactaccggccttgtggcgatattgtctggtcaagaagagatgtttgcgttccgcagggcgatatcacggcttatcgagatgcagaccccgctgtatctggagcgtgtgctggctgtacatccctcgttccgtcgtcctggtcttgcaagaaataacaggcctgcagttcctcagcctgctccggcggtttgaggtttgacagcctcgcgctgtaccattgctttatttcgagtttcgtgtgacaaggcaataaaaccaaccagagatggtaacagtgagacattgtaaatgattgtagaaaggttgtgattattaataagttaaaatttactattttaaacttcaacaggttacacatactatctgtcatttcatcttata

SEQ ID NO: 96701 - DNA, 1533 bp, Zea Mays
tggaacgtgcggggtcttaatggctcggcccgtcaggatgttgttcgttgtttggtggacttagtcaaggctgatgttgtttgcctccaggaaacaaaaatgtcggttttctctcgcttgtttgtgttccggttgcttgggtctgagtttcagaattttgttttcacaccttcagttggggctagtggagggattctagtggcttggaagaataatatcagctcatgtggctctaggattgatgaccattgtgtctcggtgaattttagccttgagactgggtcatcttggtggttgtcatgtgtctatgcccctcaagggaatcatgagaaaattcagttcttacaagacctcagattgattaggacccactgttctgggccatggctggttgttggcgattttaacatgattctgagtgatgaagacaagagtaattccaatgttgatcgtgctatgatgggcagatttcgaaggtggaaggacgatcttgccctactggagtttcctctgattgggcgcaggtttacttggtcgaatgggcatgcctgtcctactttagtcagattggacaggatgttttgtactgctgattgggaagatttatttccagattgccttctccagagtgctgctgctcaagattcggatcactgccctctcttgttgggcctgtgtgatattaataaaaggaaagggcgcttccattttcaggccttctgggtgaaattggaggatttccaggatgttgtggctaacgcatggagttcgattcccgcaggccagtgccctcttgttagtctttccaagaaattacaggctacggcaaaggctttgcagcgttggagtgataataaagtgggggatttaaaactacagcttgaaatggctcgggagctccttcataggttggagatggctcatgacagcaggactctatctccaagtgaggattggttaaggcgtacccttaagaagcacatcttggtgctctcctccttgtcgagatctatagcccgtctttggtccagaattaattggttgaaagaaggggacgctcatacttccccgttccatgctcaggctagattaagaaagaagaagaattttattggttcattatctacaagtgaagggcttattttgacatcacatgaggataaggctgatgagttgttccatttctatgatgccttgctcgggactgctttggggagagaaaattctcttaatcttgatgcccttgagatgccttctttcaatctcaatgagctagatgtgcctttctcagaggaagaagtttggggtactgtaaaatctatgccgtcggataaagctccgggcccggatggtttcaccggtcgtttctacaaggtttgttgggtaacaatcaaagctgatgttatggcagcgatctcttgtgtttgggctcgaaaatttaggaacatggggctgctcaattcagcgtttatcactcttttgcctaaggttgagggtgcagcccaagtgaaagattttcgtccgatcagcctt

SEQ ID NO: 96702 - DNA, 1757 bp, Zea Mays
actaggcaaggcattctcgacggccttcacagaccgtctcaaactcaaaaaaacgatgcccttcccctcccgccaccagcgcctggcgtcgctgacgaagctgctgaccacccacgtgaacgccggccgccaccgcgacgcgctcggcctcttctcccgcatgctctcggcccccgacctcccgccgctcaccgacccctccttcgcccacgccttcccgctcgcgctcaagtccgccaccgcgctccgcgtgcccggcgccgccgcctccttccacgcgctcgccgccaagtgtggcctgctctccagcccctttctcgcctccgcgctcgtcgcgtcctacggagcgcgcgtcgtcggcggtgcctgcggtgcctcctacgaactcactcgccgcctgttcgacgaattgcccgcccgcaacgccgtcgtctggagcgccatgatctccgtccacgtccgggcgggagacctcgccgccgcggcgtgggcgcttgaccacatggacgtccccccgactgcctcctgcttcaacaccgtgatagccgcggtcgccgagtccagggaacacccagcccgagccatcgaggtgtaccgacacatgcgaagagtgggcgtcccgccgagtttcatcacgctgctggcgctcgtccctgcatgcaccgtgataggcgcattgacttcgatcaaggaggtgcacggctttgcagtgcggcatggcatgtgcgcgagatcccacattggcagctccctcatcgaagcatatgggcgctgcggttctcttgctgccgcgcagagggtttttgaccaggttcatgatcgggacgtggttgtttggagctctctggtttcagcctacgctttccatggtcgtgcggaggtcgcaatgtcgcttttccaacacatggaggaccaggatgatgttcggcctgacagcatcatgttccttagcttgatggcggcctgtgcccattctggtcatgcagatgacgcattgcagtatttcgatgtgttgaccaggagatatggagtggaagcttgtggagaccattattcgtgcttggtggacgtcttgggccgggcaggacggctgcaccaagcttatgaacttctacgaacaatgccagtaaaggttacagcaaaagcctggggagctcttcttgctgcatgcaggaaacatggggatgtgcggttggcagaggttgccgggagagcattgtttgagatcgaaccagagaatgcagggaattttgtttcgctcgcaaacatctattcaggtcgtggcatgcatgaggatgcagagcgggtgagaagggagatggagcagcgaggtgtgcagagactgcctggtagcagttggatgctacatcacaagccaagttgttaatgcaatgcccaatatattttttttcgggcccagtgtgaccttttatgaaaagtcaggcatacaattcagaagtgtcatcgttggtgcacagaaaattttgttcagatgcagcgaccatttatccatggaaaggtaaacaaggaaaaaatcttttatttttttagcattcaggaaaaatgaacacctaacttgaatagggtaatagctccaaacatatcagaaaggtgctgtatgcagcattggcatgactgtaaaacttagctgactgtaaatgcagctgaaacatttatgtggtagtatggttaaccttagtatgtgagtcctgcagaatcatgaagttctcttctggcaatggagtgaatcaggtgta

SEQ ID NO: 96703 - DNA, 1559 bp, Zea Mays
gagaccacgtcgccttcgacccttctccgtcctcccggaacgcccgtcccgtccgtcctccccccatccacatccatcccgtgtgcttctactgctcctcgatttgatcaccgattaggggaggcggtttaccagtgagcacgcgcgagagataggataggaggaaagggaagctagcggcttcgctctcgcggggagatggcgcaggcggtggaggagtggtaccggcagatgcccatcatcacgcgctcctacctcaccgccgctgtcgtcaccaccgtcggctgcaccctcgaaatcatttcgccgtatcacctgtaccttaacccgaagctcgtggtgcagcactacgagatttggcgcctcgtcactaacttcctctacttccgcaagatggatttggattttctattccacatgttctttcttgcacggtactgcaagcttctggaggaaaactcatttagaggaagaactgctgactttttttacatgctcttgtttggtgctactgtcctaactggcattgttctgatcggagggatgataccttacatttctgagacatttgccagaattctgttcttgagcaattcattgacatttatgatggtttatgtctggagcaagcacaacccttttatccatatgagctttctgggcctgtttacctttacggctgcgtacttaccatgggttcttttgggcttctctatcctcgttggaagcagcacatgggtggacctcttgggtatgattgctggacatgtgtactacttcctggaagatgtatacccacgtatgactgggcgtcgccccctaaagacaccgtccttcattaaggcgctatttgctgatgacaatgttgtggtggcacagccacccaatgctgggattggtgctggtgcaaggttcggtgctattggtgtagatccccaggctcaatgatgaattactttcagtgacctgagggccgaggctgtgactgatctgggatgcggcagtttgtattctctgcgcaaattgcggaactgtacaagccattgttcttgtgtatttatacaggctagatgagagttattgtgcataacaaaaagattagtagtatcggaggcggctaagtttgtcacctgttggcagggcccggaggaaaatggatcgtgatgggcaaacaggccaacccctgttgcagaaacttgttcatgtgacggtttaacatctgacctgctaccctttcatgcatcggtgaatttagtctaggaaactgtttgaagtggggaaatttggtgctttggcagcgagaatttggatggagcgctgtaattgcagaatggtgcaaggaatgactcctaacattgtggacgcctggatggtgttcgttttccttcctgattctgctgtgttcaccgatccggatgatctggtctcctggaagcagtctttgtccatttttccttcatcagctgctctttaaccgtaaaatcggcgttcgtcatttcaagtgttgtgaccgtatcccttttctgttatataaataaaatgtttcagttagctgtttt

SEQ ID NO: 96704 - DNA, 1272 bp, Zea Mays
cgccccaccagcccaccaaacccatacataccatacgcgcaccaccagcagcctcgccgagatctgcctgctaccttcttctccatctatggcgccgccgacattgccccgcgcccttacagtcctcctcctcctcctcgtcctcttcgccgccacggcgcggtccgaggaggagacagccgagccccccgcatccgcgcctctacccgccgccgactcgcagcccgcgcactcgccaatctcacacccacctaccgcctccgcctccgccgccgcagacgcgccctcaccgcgcaaggccgcgcccgtcgcagccccctcctcagacgcgcccgccgccgccgacgacgaccaagcgtacaccaagcccccctcgccggcaccggcaccagccgccgccgccgacgacgaccaagcgcacaccaactccccctcgccggcaccggcagccgacggccgagcgtacagcaagtccccctcgccggcgcccgccgccgagcagatcaaggccgccagcgccagcgccaccgccaacgaccagggcgtggtggacgcggacgcggccgcgcgcccccgcggggaagagatgaacggcggcggcaaggccggcgtggcgctcggcgccgtggccgccgccgccgtcctcggcctcggcgccttcgtctggcggaagcgccgcgccaacatccgccgcgccaggtacgccgactacgccgcgcgcctggagctcgtctgatccgcttggctggcgtcccccctccctccccacgctagctccacggatcggatcggatcggaatatcggatcaggagatgcttccactgcaccgctaggaaggagagtagctaggccgagcctctgctcatattatatcgcttcattctttcgtgaccacggcaatgaataacaacaatccacgcatacgtatattcgtattcattcatacggagatggagatgggccatttttgtaaacatcgtgtacactataattaattatgtatttggagagtgctctattgttactagttattcatttttttaaacgtggttgttgccgcaagccgtcggttccatttccatgtgtacatacacaccttccagatctttacgaacgctttcagcatgctgctcacggtcgacaagtacaagagccataacttttttttcttcttccgccatccgcctgatcatttacgctggctgagaaaactaaggccccctttgaacacaggaatataaaaacacatgaatagaagaaaaaaaaataca

SEQ ID NO: 96705 - DNA, 3196 bp, Zea Mays
gcccgccggccgccgcaccaagaacgaaaccctaaccccgctcgctgattcaggaagggcgggaaaaccatggcgtcctccgccgcggcgccgagcggcgcgccaccggctgcgaagcgccctgcctccagcggacgggagggagatcagatggtcgtcacgccgctgggcgccggcagcgaggtgggccgttcctgcgtccacatgacattcaagggccgcaccgtcctcttcgactgcggcatccaccccgcgtactccggcatggcggcgctgccctacttcgacgagatcgacccgtccgccatagacgtcctcctcatcacccactttcacttggaccatgccgcctcgcttccgtacttcttggagaagaccacgttcaagggccgggtgtttatgacccacgccacaaaggctatttacaagctgctgctctcggattatgtcaaagtcagcaaagtgtccgtggaggatatgttgtatgatgagagtgacattgctcgctccatggataaaatcgaggttattgatttccaccagacattggaagttaatgggatacgcttctggtgctacactgctggccatgtgcttggtgccgccatgttcatggttgatattgctggcgtgcgcattctttacactggtgattactcccgtgaagaagaccgccacctacgagctgctgagctcccacagttctccccagacatttgcattattgagtcgacttatggtgtacagcaacatcagccccggattatacgtgagaagcgctttactgaggtcatccacaatactgtttcacaggggggtcgtgttcttatcccggcatttgcacttggcagagcacaagaactgttacttatcctcgatgagtattggtcaaaacatccagagctccataagattccgatctattacgcttcccctcttgccaagaggtgcatggctgtataccagacatacataaactccatgaatgaaaggatacggaaccagtttgcacaatccaatcccttccatttcaagcatatcgagtccttgaatagcattgataactttcatgatgtgggtccttcagtggtgatggctagtccaggtggtctccagagtggtctctctaggcagctttttgataagtggtgcacagataagaagaatgcttgtgttattccaggttatgttgtggaggggacccttgcaaagaccattatcaacgagccaagagaagtgacactggctaatgggctcactgctcctcttcatatgtcggtccactacatctctttttcagctcatgccgatttcccgcagacaagcaactttttggatgaacttcggccaccaaatattattctcgtgcatggagaagcaaatgaaatgtccaggcttaaacaaaaacttattactcagtttgatggtacaaatacaaaaattgtgtctcccaagaactgccaatcagtggagatgtacttcacttgtgagaagatggccaagactattggcaggttggcagaacaagtaccagaaggtggagagtcttccagtggcctacttgtcaagaagggattcacatatcagattatggctcctgaagatctccgtgtgttcacgcagttatctacagctaacatcattcagcgtatcgcggtcccttactctggatcttttgaagtcataaggtacagactgaaacaaatatacgagagcgtggagtcagcaacagaggaatctgatgttccgacgttaatcgtgcatgaaagagtgacggttcgcctggattcagaaagttatgttacactgcagtggtcgtccgatcccatcagcgacatggtgtctgattctgtggtggctatggtcttgaacatcggtcgggaaggccccaaagttgttccggtcgaagaagcggtgaagaccaaagaggagacggagaaggctgccctaaaggtggtgtatgctcttatgacatcgcttttcggtgacgttaaagtcgcagaggaagggaaatttgtcatatctgtagatgggaatgtggcgcacttggatgggaggagtggcgatgtcgaatgtgaaaatgctacgctgaaggaacggatcaagaccgccttccgtcgcatacagggcgccgtgagaccaatcccactttcagcctcttgataacttgtttgacatttcccatttgaacaaagtagcattctctgtttacaccagagtaccgggttttttttccctctctatcgaaaggaaccccagatgccttgtacggcatgctactcaagaggatttgattgttgatctgggattgcctctgtaaaatcacctgtaacattgtcatcctaacttgaaccacctccatcgttttcagtaaatttctacttaattttctgttttcttgtcgtactgacccgaattcacaatgtttgctgttccaagttctgttttgccatgttccatgcattctcgtgaagcaaaattgttgctggaagactggggcattctaccacgttcacgtgccataagtggagtcggtcacctatgtttggccgttatttgtgctaaagtgtctattaaacaggataaatggtcactaaacaatccattaaacttccattaaacaagacaagcgaacggaccgattctctgtatctactccacctttctattatgcgttagaatatttaatcaatataatgcggaatgcaaatgcatatgactaggaatgaatcaatctacacaagtgaggtatcacactgtaaaattcactacccgaccgattctgaatgggaacttgtgatgcctggagtcgtgggcgcatcgcgtgtagaaggagagggaggtcacgaggaagagggacggacacagcagggaaggcaggacagcgacttggaagcgaagctgctcttgctcttgtccttctccttccccgtcgtcgtcggcttcaccgtggggatgtgggagccgtcctcgccgccgcggtccttgcatttctcgcactcgtccaagaaggccttgaaggcgtcgacgcagtacctggccgcctccgccaccgtcatgccctcgacgagcccttgcgggtacgactccttggtgtggtcgccgttgagcaccgcggcgagctgcaccagctcctcctggaactcggacagcggggcatgctccgccgccgccgtccgccgcagcttcactggct

SEQ ID NO: 96706 - DNA, 2212 bp, Zea Mays
caccccaccaaccaactactctcacagtctcacctcccgctcctgccccctccctctcgttctcttcctaaatggcggccgagtccgccaggccgccctcgccgccgcgcgactccggctgccccgcgggcgcgggagactccaccagctcccagctgaccgcgacctacctcggcgtcagcttcgcgctcttcctcgccacgctcccgtcgggcaccgcggcgcgccacgtggcctcgctccagtcgcggggccgcctcctcgcctcgcgcctgctggccgccgaggaccagctgcggcagctgcgcgcgcgccgccgcgaggacgcccgcgccaacgcccgcgccgccgagatcttcgcgggccaccgcgccgcctggatggaggccgagcgccgcctgcaggcccgcgccgccgccgccgcggacgaggccgcctccctccgcgcgcacctcgccgacgccgaggccgacgccgctgcgctgcgcgcccgcgccgagcgactcgagcgcgaggccgccgagcgggatgagctgctcaccgcgctcctcgcggccacctcgcgcgccgggtactccggcggcgggcccctgccccgcgtccacgacggggaggagcaggaggaggaggagcgggcgcgccacgacgcgcgtggggagcgggagccggagcacgagcaggacccgctgcccgcgccgccgttggaccacgccgctgacaccaccgacgccgaggccctcgctgccgccgccgcgctctacgctcagcagcgccagaagcacgacgacgacttctacacggcggccatggccgcgtcgggaatgccgccgtggatggagatggaccgatcaaaagcctggcaggacctaaagtatgatacaattgagtcaacgtacaacacaaagcatgctgtaccgaggagagaatcaccctggaaagtggatgtagaatcttcaggagttccagcaaaacttaggttgctggagcaggaattacttaacctggaaaaggtagtgaatggagatttgtccaagattccattggtgatgagaaaacaagtgaaaagataccaaactctagctgggaaaattgatgatctttgcaaacgaatgcaaacaagtgacccttgtgattcaacacttaactcggagtttagaacacagcggcaaacagaattcttgctggaagcgtttcaccttcagcatcgtgcaactgaaaccaggcagaagctcggcacactgcaagcagagaccgcaaaaggcagctttggagatgagctaacagcagaagccaaaatgtgcacaagaagagcacttagttcaataaggaataacttcaaggaaatccagcgaagcttggagatttggctggcaagaattcttggagacctcgagggcatgctagccagggatggggcctcacgcattagggagtactttctgtctccatacacgtctgctgttcggtgagtggctggtgtcatggcatgcaggaatggtcatgttctcctcactactatatagtgactgcatgcgcatgaacaccctggagaatccctggatacacggtcagcaggtaaaatgccagaatcaagttcatgcgcacctgtggaacccccttgttggtcttttttatgggcagccttgcaagctttagcaaaattgaagagaagtgatctgggatcctaccagatttcacaggcggatcgaatgtagaatttagaagcatatatcccccattattagggacatcaaattttgacaccaaatctgatcaagttctagatcacccctcttcatatctgtcaaatttatgcgaaggattgcggttaagcaaggttgcatcgaagtgaggctgccagtgtgtactgctgatcgtgctgttagcaggttgatgtccttaccatcgaccacctcagttcagcctcaaatcagtttgaacataggtatagttctgtccgtaggtgttaacgcattatctgtctctctccagctcttcatcttgttgggattgtacagttttatgcttatggttgtgctgttctcctaactgtatctagaacagagtccttggatgcgctaaactgtattattgtcagtttatggttagtgatttgtatttatgttcatttcagctgttgagaacatttgccgtggcaatgcctggttgtgggtttttcttcgactgattgctgctacgaccacattatcta

SEQ ID NO: 96707 - DNA, 5444 bp, Zea Mays
attcaaaatgcagactcaactgtttaccagacctcatagtgtttcctaaactaaaactgctcgacacaagcagctagcaattctccacatagagaatgttacgcaacagtacaaatatatagtaacacatcttcaggaaagtattagcaggaagagttgtcacagaaatgttctcaaaacggcctaaaagggtgcaggcatgggcaagcggaacaactttcaatcacaagttcttgaacgcagactcatgaggaagcttctgcggcgttagcctagccaacaatgccttgttcgagaagtggtcagcatcaacaaagtagaagttcccctcagccttaaaggtgacaaagggcctgtttgtttcaggaggcctgacatcggcaaacttgacagtccttttgaggggagtagctagccatgtcatcacctcggcctcaaagctatccgaaccaggacgccaccggagcttgtgaatgtacgggctcacgaaccaatgcaacgctgcagtcgtagtggcgctgaggaaaatgacggtggatgcaaccgctcccttgaggatcacattcatgtcaggcgaagtcatgaatgttaccactggccccagcgacacggagaggcagcaggtggacagggagagaagcttcactttctttatggtcgatgatattggcccttggtataccaggttagcatcctcgtcatcctccttgatctgttttggtttgggcccgatgcttatcttgctgctactggattcggtttctttcacagcagcagcctgcgaagcgcatcgtatctgagcgtgcaaacaggccatcagaccaaagttgtcgcgtcttgcaagagaattaggcctggacgttgcgaaatgcctccacataatagactgaggaacctggaaatctggaggagaacgaaaaaaaaaacaatgagcataattcggcatggtatagtgctttacagtgatgcacacaagctaagctacaacaaatatgcagaacattaacattcacttcagttatccaataattgaataccgagacgtactagtagatcagacagtttcagtgaaggtatatattatcattcggtggaaagatatggaaatgttgcactagatttgacagagtagacaagaaactgcaccctatgcaccactataaataagctggcaaaatgcaactatatagtgccagaagatctcatagaccaaccaaaaggcattaggccattagcagattatacctagttttgaatccaagagcggagatttaccgatgctgaagataacatcactgaaccttgcaaattacaattgtatcaaaaaaggatagctagtagtgtgacattccagcatctagaacacatcaattttcgtctgaaaagcaattcgcagtaacaaaagacataaccgccccatatcccagagaagaagagctcacgcctgtccccaccgtcccaggtatataataatcgaacaagaaaacatacagatcactgttcctcaaacatttcaggcatgcactcgtaccttagacgccaccatttttgggatcgaagctaacacagaggcgggagtacaaacacggcggagaccggagagaagggagcgatcaagaggcggagagatacctgggacccgggagacggcgcgcggagtcgaggcgggacccacggagaagtggcggaggagagccccgcggagggaggccgaggatcggagcctcgccgtcgtcatggcctccgacccgatggatccaggtgtggggggactagactagggttttgggacggagaaatggggatgctgcgggtgtgggggttgtgcggtaccggtgcagaccacccatgaagacgacaacgatgcgtaaaagtgctcaatactaattgggcctactcaattggctttatgggcctaaagtcgatatcgatggcgggtcggcccaagcgattccctgttggattattacgaatcgaaaccattcttctcttctcccagctctcgctcgcacacgcacacccaaatcccaaccggctccgcaccgccacatctccttcgccggaaccctaaacgcctagccgccgcagccgcagccgcagccgccgccgccgaagcagctgcagatttcctcctgcggtgacgtcccggcaagccggtatgagtagccaccgcaaaaacttccgccgccgcggggacgacgctgaggacgccaacggcgacggcggcagccaccccaagccctccaccacgaccgccacgaagacgaaaaccctaacggtgcccaaacccaagtcgccgccgaggcgtcagggtgcgagccgcctcagctttgcggacgacgaggacgaggacgacgccgaggcgggcccgttcgcgcagcgccgccttcccccgacggcctcggtgcgcccggcccgcacggcgtccccggccgcgggagcgctccaccgcctcacgcccgccagggagcggatcaagagctctccggcacctgccggcgctgctgtgtcggcgccgaagccttccaacttccaatcccatgctggggagtacacaccagagcgcctccgggagctccagaagaatgcgcgcccgctccctgggagcctcttgcgtgcccaaccgcgggctcctgcgactgagccccggtcgcagaagttgtctggtacccctgcaagttccactccagctaccaccaccgcagctgcaacagaaacggtggttgttcttaaaggtctggtgaaacctatgtctgaggccagcattggaccaaggatacccaagcacgacaaggaggaagataaatctgaagaagaggggaaaggagatgaagaggatgaaggacccgtgatacctgaccgtgcaaccattgaagccatcagggcgaagcgacagcagcggcaacagccaaggcatgcggcgccagattatatctctcttgatgctggtggtgtgctgagcagccggaatgctgctggtgagtcgagtgatgaggatgacaatgagataacagatcggattgcaatgtacactgacaagccaggtgatggcccgaggagcacaaaaggtgtattcagtgggataagtaacaggggtcctgccaccagtttgggggctttcagtgatggcagcaggaacgttgaggatgatagagatgatgatgatgacgaagaagaagagaggaaatgggaggaagagcagttcaggaaggggcttggtaggaggatggacgatgctttctactcagaggtcagcaaatggggtaccagctgctatgcaggtccagccacagccatttggatacccaagttcttgtccatcgctcagcaagcggatgttgcaaataaagccttgcaagacaacatccgaaaacttagggagactcacaagacaacagtcagtgctttagttaagaccgacacacatcttaatgaagctctttcagagatatcaagcctcgagagtggtttgcaggatgctgaaaagaggtttgtttatatgcaggagctccgtgattatatttctgtgatgtgtgacttcttgaacgacaaggcatttttaatagaggagctggaggaaaacatacagcaattgcatgaaaaacgagctttggctatttctgagaggcgtgcggctgacctagctgatgaatcaggtgtaatcgaagctgctgtaagtgctgcagtatctatccttagcaaaggatcaagctcaacttgcctatctgctgcatcaaatgctgcccaagcagcagctgctgctgctaggggaagttccaacctccaacctgagttggatgagtttggcagagatatcaacatgcagaagcgtatggatcttaagcgcagggaagaggacagaagacgaaggaaaactcagtcagagaccaagagattggcatctgcagcgaagaataaggacatcgagaagatcgaaggagagctaagcactgatgaaagcgacagtgagagcactgcttatgtttccagccgggatgagtttcttaaggctgctgaccatgtgttcattgatgctaaagaggaatactcgagccttaggattgtcaaggacaagtttgaaggctggaaagctcagtacccttctgcataccgagatgcccatgtagccctgagtgcaccatctgtgttcagcccttatgtgagactggagctcttgaagtgggatcccctccacgaaacgaccgatttctttgacatggattggcacaaggttctctttgactatggcgtgcaagatgacgagagcccctcaggttcgaatgattcagatgtggttccagtcttggtagaaaaggttgctcttcctatattgcaccaccgcatcgagcgctgctgggatgtattgagtacccaagggactagaaaggctgtggaagctagcaggatggtgatcggttatttaccaacatcaagcaaggatttgcatcgactactggctgccgtgagcagccgtctaacccaggctgtcgccgatctttcagtcccagcctggggttcaatggtgacgaggaccgttccaggtgcctctcagtacgctgcatatagatttggagttgctgtacggctcctcaagaacgtgtgcctgtggaaagacatccttgcagatcatgtcgtcgagaagcttgctttagacgaactactgagagggaagattcttcctcatatgaagagcatcatcctggatgtccacgacgcgatcacccgggccgagcgagtagccgccgcgctctcagaagtctggcctaaacaaaaccaaaagctgcggcctttcgcagatctagtggctgagctgggcaacaagctggagaggaggcacgcgtcaggcatcagcgaggacgagacgcgtggcctagctcgccggttgaaaaacatactggctgttctgaacgagtacgataaagctagagccatttcgaaggcgtttcatctcagagaagccctttaggtcgtcctggatggagtcagagtgagaaatccagttttggcacaggtttctacatccttccagtttgcagagatgttgtaccacatatacatcttgaccatgatcgagtttttagtccatcgcttgatgctatcaaagaaagctgtgttgcttctaggttgttttctggttacgaacacacaaactggttaacaagatatgtattagatttattttttgcgagttcaagttatggtcccaatgtgtttatcaatggagctgggagcaaccctttggaatatgaacatagtactattatgctatttaacatatggggttactggtgatctgaaacttgtcagtatggcagccataagcgcgacccgattctgaggcgaatgctctgaactctttttcattgtattttggcaagtggtaggcatgaactagaactgtagattatgctctgagatgaatgtaatgattttagtctgagtta

SEQ ID NO: 96708 - DNA, 2007 bp, Zea Mays
cctatgccccatcccgccacccgcctccccctctccttccgccgtctcacctacttaccctcccttgccgcctctaacgcgcgcggctgccgctcgtcctcttcatccgacgacgaattacccctcgccgccgagctctttccggccgcagggcctacgctcctatccatcgcgcgatccctcgccgtcgcctccccgcccccgtccgccgcgtctgtcctcggcttcctctgccgccttccccacgacgcctccccgcacatcttcccccacctcgtcgccgccctcgcccgctcgccccgcccggtccttgcgctccgcctcttcctctccccgcccacgtccgcggccaccacccaccactccttcaactccgcgctactccggtttcccctcccccttcacctccttccggccttcttcactcactccatcctacgcttccctggcctcactcccaccctgctctccttcaacctcctcctcaagtgcatctgctcctccatggtcccaaggaaccccggcctctatcttgcagtcgcgttgggaatcctccacgatgtcattccagcgtggaatcttgtgccggacaagttcacctactctaccgtcgtgtctgcactggccgatgcggggtgcgtggaagaggcggtggcgctggttcatgagatggtggtcgatggagtggtgtctgctgaggcttttaaccctgtgctgaaggcgatgctgcgtgcaggggatgtcaatggggcagtcaagctatttcggtttatgcagctgaagggctgcacactgaccgcagtgacatacaatgttctgctgcatggtctactgttgtgtggggaggcgagggcagcgatgaacatcatgagaagaatggagaatgaagggattgtgccagggttgatgacctacggagcagtggtggatgggctggtgaagtgtgggagagtggaggatgcatggaaggtggctcaggaaatgggggggcagggactagcacccagtgagtttgtgttctccgctgtgatcaccgggttttgcaagtcaggagaggttgacagggcattgatggtgtgggagacaatggtggcagctagggtaaagccgaatgttgttttgtattcagcaatgattgatggttttgcacggtctgggaggatgacagaagctgaaaagttatttgaagaaatggttgatgcgaaatgtatcccaaatatcgtgacatacagctcaatggttcggggatatttccacattgctaattcatcgcgggcactctctacgtgggaggagatgataaaggttggctgtgtgccaactgccattagttacagcatattgatcagtgggttgtgtgatgtagggagattaaaagatgctatgatggtctggaaaaacatgattggtcgtggctgtgcacctgataccattgcttatacttcaatgatgaaaggtttatgcatgtctgggatggtagatggtggtctccgtctatttaatgacatgctggcaaagggtgatgccaaaccagatgtcattagttataatgttctattggatgcgttgatccgcacaaatgacttacctcgggcaatggacttgcttaaccagatgcttgatcaaatgtgtgatccagacacaataacatgcaatatttttttgcgggagtttggagttttagaggggaaagggagggaattcttagagggactggtcatgagactatgctatagagatagatatagggcagcaggagatgttgttatggtcatgctggctaaatatattgtgccggaggctggcatttggtataccatagtgagaggagtttgtcagactaagagagttcaaaaggtggttgacaattgttgggatgagatttggaggccttagagatcatacatattttttaatacgctgatgggcttcttgcagtactttatatattgaatttgcatcccatttgaaaagatgtttcctttaatacagtgactttgccaactt

SEQ ID NO: 96709 - DNA, 2529 bp, Zea Mays
actgcggctagtgcagtagtgtttgagtctttgaccgaggaaggataggcgaccggcgaccgcaagcaggagtagccatcatcaagcagtcaggaaagcaagcgagaagtcgtcgcgctactcttcgttgcctatatactccgcctccgcctccggtggttggttggtccctctaccatcgccagatcgcctgccttccctgctctccccgtcggctcaccgcgcgccccagatctccccgtccaaaggggacccaagcatcgcatcggatccgtcctgcgctttgccgccggcaactgcagaagcgaccagccatggcggcagccttcgatgcttacaccgacaagaacgccgtcttccgccgtctcaaggccaagcccgagaacaagatgtgcttcgactgcaacgccaagaaccccacctgggcctccgtcacctacggcatcttcctctgcctcgactgctccgccgcccaccgcagcctcggggtccacatcaccttcgtcaggtcaacgaacctcgactcatggactccagaccagctgaagatgatggcattcggaggcaacaaccgggcacatgctttcttcaagcagcatggatggaccgatggcgggaaggtcgaggcaaaatacacatcaagagccgctgaactttacaggcagatgcttaccaaggaggtcgctaagagcgccacgaccgataatgccctgccatcgtcacctgtcgcatctgaggcttccaagccgccatccgatgacttccctgaattcaaactcccagatgtgccagcaccaccggcagaggatctgaatgggaagcatgagcccaagtcccccaaagctgctcctcgttcaccaaaggccgctactcatcccacctttgccacttctgtgaagaagcccattggcgcaaagaaggttggaggcaagactggagggcttggtgttcgaaagcttactacaaagccaaatgaaagcctgtatgagcagaaaccagaagagccaaaacctgctgtacctgccttggctgcttcaactaaaaaaggtggtcaggccttgcattcacgttttgaatacgtggagaacgagccatcagctgattcgagaactgggggatctgtatctcgtgtgagtggccatgtagcaccaccaaaatcatcagacttctttcaagagtatgggatgggtaatgggttccagaagaaatctagcaatgcctcaaaaactcaggttgaggaaactgatgaagcaaggaagaaattctctaatgccaaggcgatctcgtcatctcagttttttggtactcaaaacagagaagagaaagaagctcaactatcccttcagaaatttgcgggctcttcatccatttcaagcgcggatctttttggccgcaatgatgcggacaactctaacctggacctaagcgctgctgatctcatcaacagaatatctttccaggtagcctttttgtaaactgttggatcggcaatctttgtggttccttggatgtttaagcagtctgccatggttttgtaggcttcacaggatctgtcttcgctcaaggacatagcaggggagactggaaagaagctgacatctctggcctccaatttcatcagcgacctggacaggatcctttgagcagggcaggcgaggccagcagcagttttgctatcctcctacctgcaccacagagtatatcccttgtggtgcatcaccgacagttcttgcacagttacagctctgtagagggatagtagatgattcttatcatgcgttttgtattctgacctttgcttgttgtgagacccagtccacatgaagatgtttttttatttgttattgatactttcaagacgttgaagcatacaattatatgcatcaaggttgtcaaagaaaggttcagcatgagaaagctgaccaaatgttgcgccagccaccagtctttggagttgtttgtggccaagttgcaagaagcatggcgtagggaaaactccgggcgttgccacgccagactcgtcactagtattaaacaactactagtgccatttggcgtctcgtttgtcggccatgagagggtcgatagcatgcagcagattcctttccaacaacaaggatcttgcaggcttgcacaaaggcaaattctcctcttgttttagacacagcatatttggtcgacggcttgtatgatccaaaatgaaaaccgtacggtgccccccctccccttctgttaggaatttagttagcaccgtttttagttgaaaacatgtaatcgctaaaattatatataccaatagtattggacgggattgtggaaactagaatccattactattctattttaatttttatatactttactgccgcaccttgtcttctcgcttgtgttgccggcgctcgtctagtcgtctttgtgtcgctacccttcgagttgtggctccgatctaagacatcctctgatttaaaaaaaaatctaaatctatgggctagaatctcaatggacttaaccgaaaatgaaaaaaaaaag

SEQ ID NO: 96710 - DNA, 2451 bp, Zea Mays
actgcggctagtgcagtagtgtttgagtctttgaccgaggaaggataggcgaccggcgaccgcaagcaggagtagccatcatcaagcagtcaggaaagcaagcgagaagtcgtcgcgctactcttcgttgcctatatactccgcctccgcctccggtggttggttggtccctctaccatcgccagatcgcctgccttccctgctctccccgtcggctcaccgcgcgccccagatctccccgtccaaaggggacccaagcatcgcatcggatccgtcctgcgctttgccgccggcaactgcagaagcgaccagccatggcggcagccttcgatgcttacaccgacaagaacgccgtcttccgccgtctcaaggccaagcccgagaacaagatgtgcttcgactgcaacgccaagaaccccacctgggcctccgtcacctacggcatcttcctctgcctcgactgctccgccgcccaccgcagcctcggggtccacatcaccttcgtcaggtcaacgaacctcgactcatggactccagaccagctgaagatgatggcattcggaggcaacaaccgggcacatgctttcttcaagcagcatggatggaccgatggcgggaaggtcgaggcaaaatacacatcaagagccgctgaactttacaggcagatgcttaccaaggaggtcgctaagagcgccacgaccgataatgccctgccatcgtcacctgtcgcatctgaggcttccaagccgccatccgatgacttccctgaattcaaactcccagatgtgccagcaccaccggcagaggatctgaatgggaagcatgagcccaagtcccccaaagctgctcctcgttcaccaaaggccgctactcatcccacctttgccacttctgtgaagaagcccattggcgcaaagaaggttggaggcaagactggagggcttggtgttcgaaagcttactacaaagccaaatgaaagcctgtatgagcagaaaccagaagagccaaaacctgctgtacctgccttggctgcttcaactaaaaaaggtggtcaggccttgcattcacgttttgaatacgtggagaacgagccatcagctgattcgagaactgggggatctgtatctcgtgtgagtggccatgtagcaccaccaaaatcatcagacttctttcaagagtatgggatgggtaatgggttccagaagaaatctagcaatgcctcaaaaactcaggttgaggaaactgatgaagcaaggaagaaattctctaatgccaaggcgatctcgtcatctcagttttttggtactcaaaacagagaagagaaagaagctcaactatcccttcagaaatttgcgggctcttcatccatttcaagcgcggatctttttggccgcaatgatgcggacaactctaacctggacctaagcgctgctgatctcatcaacagaatatctttccaggcttcacaggatctgtcttcgctcaaggacatagcaggggagactggaaagaagctgacatctctggcctccaatttcatcagcgacctggacaggatcctttgagcagggcaggcgaggccagcagcagttttgctatcctcctacctgcaccacagagtatatcccttgtggtgcatcaccgacagttcttgcacagttacagctctgtagagggatagtagatgattcttatcatgcgttttgtattctgacctttgcttgttgtgagacccagtccacatgaagatgtttttttatttgttattgatactttcaagacgttgaagcatacaattatatgcatcaaggttgtcaaagaaaggttcagcatgagaaagctgaccaaatgttgcgccagccaccagtctttggagttgtttgtggccaagttgcaagaagcatggcgtagggaaaactccgggcgttgccacgccagactcgtcactagtattaaacaactactagtgccatttggcgtctcgtttgtcggccatgagagggtcgatagcatgcagcagattcctttccaacaacaaggatcttgcaggcttgcacaaaggcaaattctcctcttgttttagacacagcatatttggtcgacggcttgtatgatccaaaatgaaaaccgtacggtgccccccctccccttctgttaggaatttagttagcaccgtttttagttgaaaacatgtaatcgctaaaattatatataccaatagtattggacgggattgtggaaactagaatccattactattctattttaatttttatatactttactgccgcaccttgtcttctcgcttgtgttgccggcgctcgtctagtcgtctttgtgtcgctacccttcgagttgtggctccgatctaagacatcctctgatttaaaaaaaaatctaaatctatgggctagaatctcaatggacttaaccgaaaatgaaaaaaaaaag

SEQ ID NO: 96711 - DNA, 1418 bp, Zea Mays
cagacacctaaacgatgacacagcgtgcacccaccaccaccagcgccgagcgccggccgcgataccgtcgtgtccccctccccaccgcattagcgccggccgacaaaattactaggtgcttaatttaactactagtggccctaggcgtgaaacttcaccagctccgccactgcccatggccaacggccgtccggaccctcgctgcgtcgtcctcaccgccgacactgcccgatccctcgtagattccgtcgacgccttcctcttcgactgcgatggggtcatttggaagggagataagctcattgaaggggtcccagagacgatggagctactgaggaaactgggaaagaaattagtttttgtaacaaacaactctagaaagtcgagaaggcaatactcaaagaaattcagatcacttggacttgaagttactgaggaagagatttttacatcatcgtttgcggcagccatgttcttgaagttaaataattttcctccagaaaagaaggtttatgttgttggtgaagatggaatcttggaagagctcaagttagctggttttgaatgttttggtggtccggaggatggcaagaaaaacataaagttggaggcggatttctactttgaacatgacaaaagtgttggagctgtcattgttggacttgatcagtacttcaattattataaaatgcagtatgcaagaacatgtattagtgagaaccctgactgccttttcattgcgaccaaccgtgatccaaccgggcatatgacatctgcccaagaatggccaggagctggagctatggttgctgcagtaagctgctcagtacagaaagaacccattgttgttggaaaaccttcaggctttttgatggacttcctcttgaaaagcttcaatctggagacgtcaaggatgtgcatggttggtgatagactggacacggacatactatttggccagaacaccggctgcaagaccctccttgttttgtctggttgcactgccttaccagaagtgcaggatgctcgtaacaatatccatccagatctctacacaaacagcgtgtatgatctagttgggttactgcagaagtaattctccttggccgcgttgcagcgcaatctcagcacgctttggatagcgcctatcagcaatttattacgtggattacttgcatgaagccatgtgttcttgaaacaacaattttgaactttctttggggtaacctgtttgacagtaacaaaatctttcaattggatcctacaaattagaccaatttgacaaccttgtaagcgtggctgtaaagctttaaatctggcaacttgattcccttgctggaaaatatattggttggagtatggaattgtacagaatcgaattgtaatgaagcaacgtgttgtactttgttgctaaacaa

SEQ ID NO: 96712 - DNA, 1359 bp, Zea Mays
cagacacctaaacgatgacacagcgtgcacccaccaccaccagcgccgagcgccggccgcgataccgtcgtgtccccctccccaccgcattagcgccggccgacaaaattactaggtgcttaatttaactactagtggccctaggcgtgaaacttcaccagctccgccactgcccatggccaacggccgtccggaccctcgctgcgtcgtcctcaccgccgacactgcccgatccctcgtagattccgtcgacgccttcctcttcgactgcgatggggtcatttggaagggagataagctcattgaaggggtcccagagacgatggagctactgaggaaactgggaaagaaattagtttttgtaacaaacaactctagaaagtcgagaaggcaatactcaaagaaattcagatcacttggacttgaagttactgaggaagagatttttacatcatcgtttgcggcagccatgttcttgaagttaaataattttcctccagaaaagaaggtttatgttgttggtgaagatggaatcttggaagagctcaagttagctggttttgaatgttttggtggtccggaggatggcaagaaaaacataaagttggaggcggatttctactttgaacatgacaaaagtgtatgcaagaacatgtattagtgagaaccctgactgccttttcattgcgaccaaccgtgatccaaccgggcatatgacatctgcccaagaatggccaggagctggagctatggttgctgcagtaagctgctcagtacagaaagaacccattgttgttggaaaaccttcaggctttttgatggacttcctcttgaaaagcttcaatctggagacgtcaaggatgtgcatggttggtgatagactggacacggacatactatttggccagaacaccggctgcaagaccctccttgttttgtctggttgcactgccttaccagaagtgcaggatgctcgtaacaatatccatccagatctctacacaaacagcgtgtatgatctagttgggttactgcagaagtaattctccttggccgcgttgcagcgcaatctcagcacgctttggatagcgcctatcagcaatttattacgtggattacttgcatgaagccatgtgttcttgaaacaacaattttgaactttctttggggtaacctgtttgacagtaacaaaatctttcaattggatcctacaaattagaccaatttgacaaccttgtaagcgtggctgtaaagctttaaatctggcaacttgattcccttgctggaaaatatattggttggagtatggaattgtacagaatcgaattgtaatgaagcaacgtgttgtactttgttgct

SEQ ID NO: 96713 - DNA, 980 bp, Zea Mays
ttaacttgttactgggcgaggtgaggcaatgaaattcagcaagcaaaccaaacagaccctaaattgactaaaacaagcatgaaagatgttcacaagtcaagtcccagcttatcaactgtggtctgtgtctattgtttataccacggtcggggatgtctgcctctacattgttggcaaggatgaatatgatgagcttgctttggctgaggtgatctttgcaattacatcagcagtcaaggatgtttgtgcaaaacctcctaccgagcgcctcttccttgacaaatacgggaggatctgcttgtgccttgatgagattgtttggaaggggttgcttgaaaacacggagaaagacagagtgaggaggttgattagactaaagccccctgtggagccataatttgcatgtaaagcatatgttggcgttgctgtaatccagatccaatcccatttgcatttgtaggcaaattttcagagttttcatctgcacattgtatctacagaattatcatcacttattggaggattgcgtgtgtgacatcaaaaacaatgtatcatctgtgtatttgctatgttgataagtgtgttactgcgttgtattttatgctactgtggcaagctcccatgtatgcataccacttttatagctgatatgggccttttaaaaaaaaatagatgattttattttgagaaatactatataggtacccagcaaagcatgaagataccatcctaattcctgactgaccctggaatttgcatcttgtttgcaatttttaatgtggaactatgcccccgagcattgcatttcaaggcaaatgtggctcccctgaagtgtaagtaagcattttctgtgcatcacctgtgctattattatcggtttaatgaccatcttgtatttttttttgggtacaaaactgttgcagttgtaacattacagccctgccgctctatatgtaaacttgttgtgtagagaacagacc

SEQ ID NO: 96714 - DNA, 1213 bp, Zea Mays
gagagagtgggctgggccgttgcggcgattagttgatagcccagcaaggaagcccaaactcgtcaccgtcgcctccttctattcatttcgccgagaggcgaaagaactgcttcgcacctacgttactgctgaaagatccagccggcacacacagacaccatcggcgaagaagaggccggagagaggatgatactggccgtgctcttcgccaactccgatggaaacatccttgtcgagcgattccatggggttcccgcggaggagaggctccactggcgctccttcctggtgaagctcggatccgagaacctcaaagggtccaagaacgaggagctccacgttgcctcccacaagtctgtgtctattgtttataccacggtcggggatgtctgcctctacattgttggcaaggatgaatatgatgagcttgctttggctgaggtgatctttgcaattacatcagcagtcaaggatgtttgtgcaaaacctcctaccgagcgcctcttccttgacaaatacgggaggatctgcttgtgccttgatgagattgtttggaaggggttgcttgaaaacacggagaaagacagagtgaggaggttgattagactaaagccccctgtggagccataatttgcatgtaaagcatatgttggcgttgctgtaatccagatccaatcccatttgcatttgtaggcaaattttcagagttttcatctgcacattgtatctacagaattatcatcacttattggaggattgcgtgtgtgacatcaaaaacaatgtatcatctgtgtatttgctatgttgataagtgtgttactgcgttgtattttatgctactgtggcaagctcccatgtatgcataccacttttatagctgatatgggccttttaaaaaaaaatagatgattttattttgagaaatactatataggtacccagcaaagcatgaagataccatcctaattcctgactgaccctggaatttgcatcttgtttgcaatttttaatgtggaactatgcccccgagcattgcatttcaaggcaaatgtggctcccctgaagtgtaagtaagcattttctgtgcatcacctgtgctattattatcggtttaatgaccatcttgtatttttttttgggtacaaaactgttgcagttgtaacattacagccctgccgctctatatgtaaacttgttgtgtagagaacagacc

SEQ ID NO: 96715 - DNA, 1180 bp, Zea Mays
gagagagtgggctgggccgttgcggcgattagttgatagcccagcaaggaagcccaaactcgtcaccgtcgcctccttctattcatttcgccgagaggcgaaagaactgcttcgcacctacgttactgctgaaagatccagccggcacacacagacaccatcggcgaagaagaggccggagagaggatgatactggccgtgctcttcgccaactccgatggaaacatccttgtcgagcgattccatggggttcccgcggaggagaggctccactggcgctccttcctggtgaagctcggatccgagaacctcaaagggtccaagaacgaggagctccacgttgcctcccacaagtctgtgtctattgtttataccacggtcggggatgtctgcctctacattgttggcaaggatgaatatgatgagcttgctttcaaggatgtttgtgcaaaacctcctaccgagcgcctcttccttgacaaatacgggaggatctgcttgtgccttgatgagattgtttggaaggggttgcttgaaaacacggagaaagacagagtgaggaggttgattagactaaagccccctgtggagccataatttgcatgtaaagcatatgttggcgttgctgtaatccagatccaatcccatttgcatttgtaggcaaattttcagagttttcatctgcacattgtatctacagaattatcatcacttattggaggattgcgtgtgtgacatcaaaaacaatgtatcatctgtgtatttgctatgttgataagtgtgttactgcgttgtattttatgctactgtggcaagctcccatgtatgcataccacttttatagctgatatgggccttttaaaaaaaaatagatgattttattttgagaaatactatataggtacccagcaaagcatgaagataccatcctaattcctgactgaccctggaatttgcatcttgtttgcaatttttaatgtggaactatgcccccgagcattgcatttcaaggcaaatgtggctcccctgaagtgtaagtaagcattttctgtgcatcacctgtgctattattatcggtttaatgaccatcttgtatttttttttgggtacaaaactgttgcagttgtaacattacagccctgccgctctatatgtaaacttgttgtgtagagaacagacc

SEQ ID NO: 96716 - DNA, 1149 bp, Zea Mays
gagagagtgggctgggccgttgcggcgattagttgatagcccagcaaggaagcccaaactcgtcaccgtcgcctccttctattcatttcgccgagaggcgaaagaactgcttcgcacctacgttactgctgaaagatccagccggcacacacagacaccatcggcgaagaagaggccggagagaggatgatactggccgtgctcttcgccaactccgatggaaacatccttgtcgagcgattccatggggttcccgcggaggagaggagctccacgttgcctcccacaagtctgtgtctattgtttataccacggtcggggatgtctgcctctacattgttggcaaggatgaatatgatgagcttgctttggctgaggtgatctttgcaattacatcagcagtcaaggatgtttgtgcaaaacctcctaccgagcgcctcttccttgacaaatacgggaggatctgcttgtgccttgatgagattgtttggaaggggttgcttgaaaacacggagaaagacagagtgaggaggttgattagactaaagccccctgtggagccataatttgcatgtaaagcatatgttggcgttgctgtaatccagatccaatcccatttgcatttgtaggcaaattttcagagttttcatctgcacattgtatctacagaattatcatcacttattggaggattgcgtgtgtgacatcaaaaacaatgtatcatctgtgtatttgctatgttgataagtgtgttactgcgttgtattttatgctactgtggcaagctcccatgtatgcataccacttttatagctgatatgggccttttaaaaaaaaatagatgattttattttgagaaatactatataggtacccagcaaagcatgaagataccatcctaattcctgactgaccctggaatttgcatcttgtttgcaatttttaatgtggaactatgcccccgagcattgcatttcaaggcaaatgtggctcccctgaagtgtaagtaagcattttctgtgcatcacctgtgctattattatcggtttaatgaccatcttgtatttttttttgggtacaaaactgttgcagttgtaacattacagccctgccgctctatatgtaaacttgttgtgtagagaacagacc

SEQ ID NO: 96717 - DNA, 126 bp, Zea Mays
atgcagataccctccaaacccaaggcgcttcgagttaccggcttcttccagctcctactgagacgccttttctcgtttcaggtagaaacttcttgccatctcttcagtcacatcactgcagaaaaa

SEQ ID NO: 96718 - DNA, 1116 bp, Zea Mays
atggtgctggctgcgcacgatccccctccccttgtgttcgacgctgcccgcctgagcggcctctccgacatcccgcagcagttcatctggccggcggacgagagccccaccccggactccgccgaggagctggccgtgccgctcatcgacctctccggggacgccgccgaggtggtccggcaggtccggcgcgcctgcgacctgcacggcttcttccaggtggtggggcacggcatcgacgcggcgctgacggcggaggcccaccgctgcatggacgccttcttcacgctgccgctcccggacaagcagcgcgcgcagcgccgccagggggacagctgcggctacgccagcagcttcacgggccggttcgcgtccaagctgccctggaaggagacgctgtcgttccgctacaccgacgacgacgacggcgacaagtccaaggacgtcgtggcgtcctacttcgtggacaagctgggcgaggggtaccggcaccacggggaggtgtacgggcgctactgctctgagatgagccgtctgtcgctggagctcatggaggtgctaggcgagagcctgggcgtgggccggcgccacttccggcgcttcttccaggggaacgactccatcatgcgcctcaactactacccgccgtgccagcggccctacgacacgctgggcacggggccgcattgcgaccccacgtcgctcaccatcctgcaccaggacgacgtgggcggactccaggtgttcgacgccgccacgctcgcgtggcgctccatcaggccccgcccgggcgccttcgtcgtcaacatcggcgacaccttcatggcgctctccaacgggcgctacaggagctgcctccaccgcgccgtcgtcaacagccgggtggcacgccgctcgctcgccttcttcctgtgcccggagatggacaaggtggtcaggccgcccaaggagctggtggacgacgccaacccgagggcgtacccggacttcacgtggaggacgctgctggacttcaccatgaggcactacaggtcggacatgaggacgctcgaggccttctccaactggctcagcaccagtagcaatggcggacagcacctgctggagaagaagtag

SEQ ID NO: 96719 - DNA, 1744 bp, Zea Mays
cggggacgctctccattcttcttcccctcctcctccacacgtccaaaagcctcgtccttcccacttcctacccatcatatctccatccgcggttccgcccagctgctccacatctcaattctcaccacacacacgcacacacactatcgtccagcaagctcgctgttgcttgccacccaccgcctcagctcgatcgcaacgcgcttggcatggcgtccgaggtgtggctatcgccggcgtctcgcctcccatccctctccaacgcaccacctcgcttacgctccaagcctgccaccacaaccgcctctttgctctctccctgtccccgccctgcccgcgccctgcctgtgctgcgtgtccgtcgccgccgccgacttcgcgccaccgagcagcaaggccaggttcaggagcaagatgacgaggtggtggacaggaacatcctcccctactgcagcatcgacaggaagcagaagaagacgctgggagagatggagcaggagttcctgcaagccctccaggccttctactatgaccagaaggccatcatgtccaacgaggagttcgacaacctcaaggaggagctcatgtgggaggggagcagcgtcgtcatgctaaacgaagatgagcaaaagcttttggaagcttccttggcctatacctccggcaacccaatcatgtctgatgctgagttcgacgaactgaaacttagattaaagacagacggcagtgtcattgtgaaggagggtcccaggtgcagcctaaggactcataaggtgtacagtgacttgaatgttgactacctaaagatgttcctcctaaatgttccagccaccaccgtagctctgggactgttctttttcattgatgaattgactggttttgagatcaatgtgttccagctgccagagcctttcggattcattttcacatggtttgctgctttgcccctaatattgttcttagcgcagtcattgactaaggctatagtccaggattttttaatccttaaggggccatgtcctaattgtggtactgaaaacctttccttctttgggactatactgtcagtctccagtggcggtacaacaaacaaagtgaaatgtgcaaattgcagtaccgagctggaatatgactcaaaatctcgggtgatcacacttccagaagcatcaaatgcataaacataggtgactctacatttacgccagtaactataaatggatgctctttggtctatattccaaatgtgggagacatcacaccagctttgaagtattgcccgtctccattgtgaacactctgcagcatatgtagcagataaatgagtgaaactatttgtactgcctgctctgcaaattagtatgaacacccctcaaaaagatttggcccacactctggtctctctgtttgcagctgggaacagggagctccagagcttgtgaattctatagaataaaggtggttgtccgcacagtatagcaaactgcgaagcctgcaactactagagtttggtctgtagcaggctcagttgggaatgtgtagcagagcatgatccatggtgtggatgaattgcagagtactgtgctgtgtgtgtaggaaggaaaagctgccgcctgccgattgtgcagtcagtctagtacgttggtatgcgaccatctcaagtctgggctttgattttaagcaatgatttttggcaatgaatgaacaagctatctactgtacactgtttttgtacagttatgtttgc

SEQ ID NO: 96720 - DNA, 1599 bp, Zea Mays
cggggacgctctccattcttcttcccctcctcctccacacgtccaaaagcctcgtccttcccacttcctacccatcatatctccatccgcggttccgcccagctgctccacatctcaattctcaccacacacacgcacacacactatcgtccagcaagctcgctgttgcttgccacccaccgcctcagctcgatcgcaacgcgcttggcatggcgtccgaggtgtggctatcgccggcgtctcgcctcccatccctctccaacgcaccacctcgcttacgctccaagcctgccaccacaaccgcctctttgctctctccctgtccccgccctgcccgcgccctgcctgtgctgcgtgtccgtcgccgccgccgacttcgcgccaccgagcagcaaggccaggttcaggagcaagatgacgaggtggtggacaggaacatcctcccctactgcagcatcgacaggaagcagaagaagacgctgggagagatggagcaggagttcctgcaagccctccaggccttctactatgaccagaaggccatcatgtccaacgaggagttcgacaacctcaaggaggagctcatgtgggaggggagcagcgtcgtcatgctaaacgaagatgagcaaaagcttttggaagcttccttggcctatacctccggcaacccaatcatgtctgatgctgagttcgacgaactgaaacttagattaaagacagacggcagtgtcattgtgaaggagggtcccaggtgcagcctaaggactcataaggtgtacagtgacttgaatgttgactacctaaagatgttcctcctaaatgttccagccaccaccgtagctctgggactgttctttttcattgatgaattgactggttttgagatcaatgtgttccagctgccagagcctttcggattcattttcacatggtttgctgctttgcccctaatattgttcttagcgcagtcattgactaaggctatagtccaggattttttaatccttaaggggccatgtcctaattgtggtactgaaaacctttccttctttgggactatactgtcagtctccagtggcggtacaacaaacaaagtgaaatgtgcaaattgcagtaccgagctggaatatgactcaaaatctcgggtgatcacacttccagaagcatcaaatgcataaacataggtgactctacatttacgccagtaactataaatggatgctctttggtctatattccaaatgtgggagacatcacaccagctttgaagaacagggagctccagagcttgtgaattctatagaataaaggtggttgtccgcacagtatagcaaactgcgaagcctgcaactactagagtttggtctgtagcaggctcagttgggaatgtgtagcagagcatgatccatggtgtggatgaattgcagagtactgtgctgtgtgtgtaggaaggaaaagctgccgcctgccgattgtgcagtcagtctagtacgttggtatgcgaccatctcaagtctgggctttgattttaagcaatgatttttggcaatgaatgaacaagctatctactgtacactgtttttgtacagttatgtttgc

SEQ ID NO: 96721 - DNA, 1514 bp, Zea Mays
cggggacgctctccattcttcttcccctcctcctccacacgtccaaaagcctcgtccttcccacttcctacccatcatatctccatccgcggttccgcccagctgctccacatctcaattctcaccacacacacgcacacacactatcgtccagcaagctcgctgttgcttgccacccaccgcctcagctcgatcgcaacgcgcttggcatggcgtccgaggtgtggctatcgccggcgtctcgcctcccatccctctccaacgcaccacctcgcttacgctccaagcctgccaccacaaccgcctctttgctctctccctgtccccgccctgcccgcgccctgcctgtgctgcgtgtccgtcgccgccgccgacttcgcgccaccgagcagcaaggccaggttcaggagcaagatgacgaggtggtggacaggaacatcctcccctactgcagcatcgacaggaagcagaagaagacgctgggagagatggagcaggagttcctgcaagccctccaggccttctactatgaccagaaggccatcatgtccaacgaggagttcgacaacctcaaggaggagctcatgtgggaggggagcagcgtcgtcatgctaaacgaagatgagcaaaagcttttggaagcttccttggcctatacctccggcaacccaatcatgtctgatgctgagttcgacgaactgaaacttagattaaagacagacggcagtgtcattgtgaaggagggtcccaggtgcagcctaaggactcataaggtgtacagtgacttgaatgttgactacctaaagatgttcctcctaaatgttccagccaccaccgtagctctgggactgttctttttcattgatgaattgactggttttgagatcaatgtgttccagctgccagagcctttcggattcattttcacatggtttgctgctttgcccctaatattgttcttagcgcagtcattgactaaggctatagtccaggattttttaatccttaaggggccatgtcctaattgtggtactgaaaacctttccttctttgggactatactgtcagtctccagtggcggtacaacaaacaaagtgaaatgtgcaaattgcagtaccgagctggaatatgactcaaaatctcgggtgatcacacttccagaagcatcaaatgcataaacataggaacagggagctccagagcttgtgaattctatagaataaaggtggttgtccgcacagtatagcaaactgcgaagcctgcaactactagagtttggtctgtagcaggctcagttgggaatgtgtagcagagcatgatccatggtgtggatgaattgcagagtactgtgctgtgtgtgtaggaaggaaaagctgccgcctgccgattgtgcagtcagtctagtacgttggtatgcgaccatctcaagtctgggctttgattttaagcaatgatttttggcaatgaatgaacaagctatctactgtacactgtttttgtacagttatgtttgc

SEQ ID NO: 96722 - DNA, 1607 bp, Zea Mays
cggggacgctctccattcttcttcccctcctcctccacacgtccaaaagcctcgtccttcccacttcctacccatcatatctccatccgcggttccgcccagctgctccacatctcaattctcaccacacacacgcacacacactatcgtccagcaagctcgctgttgcttgccacccaccgcctcagctcgatcgcaacgcgcttggcatggcgtccgaggtgtggctatcgccggcgtctcgcctcccatccctctccaacgcaccacctcgcttacgctccaagcctgccaccacaaccgcctctttgctctctccctgtccccgccctgcccgcgccctgcctgtgctgcgtgtccgtcgccgccgccgacttcgcgccaccgagcagcaaggccaggttcaggagcaagatgacgaggtggtggacaggaacatcctcccctactgcagcatcgacaggaagcagaagaagacgctgggagagatggagcaggagttcctgcaagccctccaggccttctactatgaccagaaggccatcatgtccaacgaggagttcgacaacctcaaggaggagctcatgtgggaggggagcagcgtcgtcatgctaaacgaagatgagcaaaagcttttggaagcttccttggcctatacctccggcaacccaatcatgtctgatgctgagttcgacgaactgaaacttagattaaagacagacggcagtgtcattgtgaaggagggtcccaggtgcagcctaaggactcataaggtgtacagtgacttgaatgttgactacctaaagatgttcctcctaaatgttccagccaccaccgtagctctgggactgttctttttcattgatgaattgactggttttgagatcaatgtgttccagctgccagagcctttcggattcattttcacatggtttgctgctttgcccctaatattgttcttagcgcagtcattgactaaggctatagtccaggattttttaatccttaaggggccatgtcctaattgtggtactgaaaacctttccttctttgggactatactgtcagtctccagtggcggtacaacaaacaaagtgaaatgtgcaaattgcagtaccgagctggaatatgactcaaaatctcgggtgatcacacttccagaagcatcaaatgcataaacataggtgactctacatttacgccagtaactataaatggatgctctttggtctatattccaaatgtgggagacatcacaccagctttgaagtattgcccgtctccattgtgaacactctgcagcatatgtagcagataaatgagtgaaactatttgtactgcctgctctgcaaattagtatgaacacccctcaaaaagatttggcccacactctggtctctctgtttgcagctgggtatgaaaaaaatgcacaatcttataccattgatgtttagctgttgctttgtagtcaatccagtaaataggctgtgggcatgtacaaatagagttacctgttaatttgttgttcctaaaatgtatgatacatagactgcatttcagttgggacatataacaccaaagcaatcacaatgaagtgtctgttatat

SEQ ID NO: 96723 - DNA, 879 bp, Zea Mays
atggcactatcttactttactggcacatggtattctggatccattgtagcaggtattttctggctcaaattttacagattgaaggtgggctgtcgcttgggatcgaaaaggatagggcatctactgccaccatggggtttgtcgacgactccaaagacatataacaaacttgctactcaaatcaccctccctccatcttacatagctcctgaggacactggtaaaattagtggaacaatttggaccgaggaagtggtcttacatagcacaactgctgccagcaggagtggggaagcaatgcagagaaagatggcacaaccatttgaggccaaacatcaagggaaccagcttccagtgcctcttgtaccgatcatcggcaagggagtgctagaggaggaggttatggtgagtcacacgtgggggatcgctgccgctgggtcaaacacctcgtgcttcaccagaactgaagccgacccagtctccttcatcaacatggtgactcctcccactattgaggtacacaggcactcatgcatcatccactctgtcccatccttgccgagcgcaacccatggaagtatgcgaagaatgacattcttttccttgatttcccctgttttgcgactccagctgaggcactttgagtatatgagagataccatggtaaagctgccgcatgaactagagactgcacggattaatgagttgcttgggaatattcaggccgtggttactcctgaaatgaatcagacaacaataattgaggaatttgacaagggacaccagcttgaagaagttaaaacggtcaatgagcaagtggttgttcctcctgtaaagaatctaagcaaacaaaaatcccaacaaatccaagaagactaa

SEQ ID NO: 96724 - DNA, 6041 bp, Zea Mays
atggccgcctcttccattcctccttgccaggttcaggagcaagatgacgaggtggtggacaggaacatcctcccctactgcagcatcgacaggaagcagaagaagacgctgggagagatggagcaggagttcctgcaagccctccaggccttctactatgaccagaaggccatcatgtccaacgaggagtttgacaacctcaaggaggagctcatgtgggaggggagcagcgtcgtcattgctaaacagacgaacagtgtcattgtgaaggagggtcccaggtgcagtctaaggagtcataaggtgtacagtgacttgaatgttgactacataaagatgtttctgctaaatgttccagccaccaccgtagctctgggactgttctttttcattgatgaattgactggttttgagatcaatgtgttccaggtcagtgtccacctgattcaactgccagagcctttcggattcattttcacatggtttgctgctttgcccctaatattgttcttagcacagtcattgactaaggctatagtccaggactttttaatcctcaagattcgtgtctaccctcttgatgtgcttatttctaagaagcacccttccaatgttctatttccagttgcagtgccgagctggagtatgactcaaaatctcgggtgatcacacttccagaagcatcaaatgcataaacataggtatgagcctacactctgcagcatatcttatatttttttggaaaggacggcaagagtttttccataatctttattagatgaagaaaaataaaaaaggttgtatagacactaaacgaaaagaaagcaaagcgcttcagctggggtgactcggaacaccaaagcaagacaggaaaccacagaccactcccaactgaaaaagaaactggcttaagcgcactccacaaaccacccataccggcagccgaactactgaggacattagaagctgaaacctaaaccgactactctgtagctgtgctaggttgcataaccaaattgtattgggtgatgtcatctttgcacaaacttgtgacttcacttggacgtctagtcttttgttggaagtttcttccattacactccttgccaccagaaatagattatgattccatcgaacactttctttgttgacttatcaaaggtggctctacatttgcccagtaactataaatggatcctctttggtctatattccgaatgtgggggatatcacgccagctttgaagtattgcccaagtctcctttgtgaacactctgcagcatatgtagcagataaatgagtgaaactttttgtactgcctattggaggagaataatacaatacacaaacagcccatagggcatagtacataaagcccaagggcaaaatacataaacgctaacacctcccacagtcgaaactctagttacctcagacattgagactggaccgaaagttggagaacaccgaggagggaagccccttggtgaagatgtcagcgaactgcgaagtcgtcggaacgtgaggacccagacatcaccgatggcgacgcactcacggacgaagtggaggtcgatctcaacatgcttcgtgcgttggtgctgaacggggttggagaggtacaccgcactgacatagtcgcagtagacaagagtgctccggtgaagaggctggtggagctccaggataagttggcgcagcctggacgcctcagccacaccgttggcatggcacgatactcagcctcagcactcgagcgggagacgacgggctgtctcttggaagaccgggagacgaggttgtctcccaagaagacaacgtagccggacgtggagcgacgtgtgtccgagcagccaacccagtcagcatcggtgtagacaacaagctcagtcggagtggattgccgggggagaagaccgaaattgagggtgccacgaaggtagcgaagaatccgcttaacagcggtgaggcgcggctcccgaggatcatgcatatgaaggcacacgtgttgaacaccataggagatatctggcgagtgaaagtgaggtacagtagggcaccagccaaactcctgaaggcagtggggtcatcgataggagcaccgtcaatagaggagatcttggcctgagtatcaaccagggtggaatagggcttgcagtcagtcatccaagcacgatccagaatatctagactgtagtggcgctgctggaggaagagaccagtagaccgctgctcggcaatacccaagaaatggtgaagctgatcgagatccttcattgcaactgttgtaaggcagtgatggtccgatgcaacagagcagagctggaggccgtaaagacaatgtcatccacatacagtagcaggtacataacattcgtgccctggtggtagaggaacagagaggtgtctgaccgggcctcaacaaaccctagagagagcagaaaggtggcgaaatggttgtaccaggcccgaggcatctgcttatgcccatacaaggacttgtttaggcggcaaactagatctgggcgagctggattcacaaaaccagtaggctggctgcaatacactgtctctgtcaggtaccatgaaggcgtacttgacatcctgctggtgaatgggccaagagcacgagactgaaagagccaggacagtgcgaatagtcgccggtttcaccaccgagctaaaagtctcatcatagccaacacgtggtcactgagtgaaaccccgaagaacccatctggccttgtaccgctctagagagccattagccttcttatgagtgaagacccacttgccggtgacgacgttaccacaggtgggacgtggcaccaagtctcaagtgtggttggcgagaagcgcctcgtactcctccatagcgcgccgccagtgaagatcggcaagcgcgccacggacggaggacggtacgggggagacgaccgcagaggtggacgactcggggatggtcgccgagagagtcaggtgatccacgagacgaagcgtcccggtggccgacgtgtcaccatcgggtgaacatggcgagggtcccgggggaggaggggagggtgggacaccgacggctcggcgagggaactggtcggtgcaccctcacaagcacgacgctagtagacgtgcatgggctcgacgaagcggcgaggcaccaacggagggggaggcgctgtcggagaaggtggtagctcgatccgcgggcatcgttggtagacgcgcacaaagcaaggggggtccaggcctgggcgaggtgggagcaccgcatccgtgcgcggcacagcagagggctctgcagccacaggtggcgcaacaggggagtctggggccataggagggacagcaggagagaccggggccgtgcggggcacgacagacggggccgaagaggcctcatgtaccccaggatgcatgagcggcgacaacggggcggttggtgagtgacctgcaggggggagaaacaaaggtggctggacaggaggagccacaaggtcagcatcaaataaacttgccaagtcagagctcgaggtggaagcagtggtagcgaaagtgaagcaggacttatcgaaaaggacatggcgagagataatgacaagacgagaggagagatcataacattgatacctcttatgatcaggagagtacccatggaagtcacaacgagacgagcggggtgcaaacttgtggggagcagtggtcgagaggttgggatagcaagcacacccgaagacacgaaggtgatcataggagggacgagtaccaaagagagcaaagtgcggagtgggagcactaattgccttggtgggaaggcgattgagcagataggtggctgtgtgcagggcctcggcctagaagcgagcgggaaccgaggcctggaacatcagggagcgcatgatgtcgttggtggtccgaatcatgcgcttagccttgccattccgggaagagtgtaggggcaagacatgcaaagctgaacaccgtgagtgagaaaggagtgagaaaggagtgggaggtagagttatcaaactcacgcccgttgtcgcactgattagcctgaatagtgcgaccgaactgagtagacacccaagcaaagaagtgagagatagtcgtgaaagtatcggatttcaagcgcaggggaaaagtccaggagtaatgcgagaaatcatcgacaataaccaggtagtacttatatcccgaaacactgatcataggagaggtccacaagtcatagtgaatgagagcaaaaggacgtacaacctgagaggtagaggaagagaaacgaaggcgtacatgacgacctaactgacaagcatgacagagggactcatgtgttctttgagtacaagagatggcggagctacataacaacttggacaaagcatccatgccggggagcctgcaaaagtcgttctgtctagctgcaacgctttaatcatgcgccttattatagtggtttcactttcacaataataaatgcggccatactcatgaggccaatgcacgagcaaacaaacagccttttttgtgcggatgggaaaggtgatgttacatgcatgtactgatgtgcgtgaggggaatgttaggagtatacatgagtgaataatgggcagaaaacatctggtgtaaagatgtgaaggatgccctaattaaggagtaactgtgtacattcacgtagctgatatatattctcttttgtgacggatcggaacgggctacggtaaaccacgtgccaggttgaaaagaggcttttggcactgacaggttggtcttaatctttagcaatgtgtaccgtgtgtgcacgtcttttgctactggaccagatcgattagcagtgcgcgctttgaatacaatgtttcaagactgacgcgggggtggggggggggtaaaagaaaacatcccctcttatgtctcttattttgatagtcagtcacactatttatcacaaagaacatgtcctggctgttgttttgtttcagacaatttgtttaccagagctgctcttttgttggatcaagaaaggacacagaagcagtagtatgtcgttgagcagtgtgaaagaaacaagtcaaagctagcgtttgaggagcttaatcggggccatgctagctaaatgaagctgtctaggaagcaggaacatcggagggattatattgtccatccacccattcaaagctaagatgtctctgtctgaattgacaaatggcagccagcaaccagcatagcgcggcacatcacacacattgaacagaccacacaaagctctgatgcctttcgtccagcatgccaaggggcgacggccaaggggcgctatggccacctcaatcacctccaccaccacggccgccactcagaacaccatgagcccccggcggcgacggcgatgatcaccccataatccggaatccggaggcggcgtcgacgtggtaggagcaagcggggtgggcgagggtgggtggagctgaagagagccaaggccacaggagagtgacccacgacattatcagtgagcccctctagcagcagtcgttccgcacctgctagaaggtagggaacggacaggtgtgcacgatcagcggccgcaagtgggagtagcactcgttgagccccagaaggaggtttaggacaagcgtgcggtcactgatcggctcgccgagcgcacaaaaatcgtctgtcgtcctctcaagctgacgacagtactcggtgaccgagagatccccctgggtgaagatgcagaaggtgaaagggaattaggcttacacctagttcctatataattttggtggttgaattacccaacacaaatctttggactaactagtttgcccaagtgtatagattatacaggtgtaaaaggctcacactcagccaataaaaagaccaagttttggattcaataaaggagcaaaggggcaaccgagggcaccccttgtctggcgcaccggactgtccggtgtgccaccggacaatgaacagtacctgtccggtgcaccaggggacttagactccaactcttcactctcgggaattctcggaagccggcg

SEQ ID NO: 96725 - DNA, 666 bp, Zea Mays
atggccgcctcttccattcctccttgccaggttcaggagcaagatgacgaggtggtggacaggaacatcctcccctactgcagcatcgacaggaagcagaagaagacgctgggagagatggagcaggagttcctgcaagccctccaggccttctactatgaccagaaggccatcatgtccaacgaggagtttgacaacctcaaggaggagctcatgtgggaggggagcagcgtcgtcattgctaaacagacgaacagtgtcattgtgaaggagggtcccaggtgcagtctaaggagtcataaggtgtacagtgacttgaatgttgactacataaagatgtttctgctaaatgttccagccaccaccgtagctctgggactgttctttttcattgatgaattgactggttttgagatcaatgtgttccaggtcagtgtccacctgattcaactgccagagcctttcggattcattttcacatggtttgctgctttgcccctaatattgttcttagcacagtcattgactaaggctatagtccaggactttttaatcctcaagattcgtgtctaccctcttgatgtgcttatttctaagaagcacccttccaatgttctatttccagttgcagtgccgagctggagtatgactcaaaatctcgggtga

SEQ ID NO: 96726 - DNA, 608 bp, Zea Mays
ttggagtgccagacaagcatatctggaaattctccccgacaggccaatactcttcaaagtcggcttatgatatgttatttcttggttccacttctttgagagcatatgagcgcatttgggaatcttgggcaccttcaaagtgcagtttcttcctttggcttgtcatgcacaacagatgctggaccgcagaccgtcttgctagaagggggctaccccaccccagtgtgtgccccctttgcgaccaagaagaggaaacaatacaacatcttctcatctcttgcgtctttgcacgacagttctggtattccttgttaagcaggtctgggttgcctaacctttcaccagataatgctagttgcagctttgatgactggtggagcagagctgtggagaagattccccgtgatctccaatccggcttcaattctctagttattcttggcgcttggagcctatggcgtcatcgcaacgactgcgtgtttaatgggagatcgccaagtctggcgagtgctctcaccctcgctggcgatgagctcaggatgtggtgtagtgccggggcaaaagggctaaacctgctttcaactcttatgtttatgcttgacccaggg

SEQ ID NO: 96727 - DNA, 525 bp, Zea Mays
atggcgggctcctggcaggcacagcgacagcagcaacggactcctggcgggcacaggaagagggcggcggacgtgacaaatccgcgcggggcgaccaagatccggtcccagatgaggttgccaagaaatgccactcctgcgctgttgattttagccctttcaatcgcaggagaaactgctttgaacccgcgacctggtgactcagtgaaacaacttttaccacagcaccagcatcattgtcggaactgtggtgaaatcttttgtgacaaatgcagccagggaaggattgctctgacggctgaggataatgctccacttgtccgagtttgtgatagatgcatggattacactgttatatatgcagcttgtcttgctgacttcttttgtaatgttacttcagagtggacccacactatatctaagactgaggtcactcaaaggcttagcattgctaaggatgttgccaacagatctgcaactgttcaaagtcatgaagatcttgcaagaaaactgaaggtgtattga

SEQ ID NO: 96728 - DNA, 2179 bp, Zea Mays
aaaagtgaactcttgcggggttggttcaacttacccatcatgacctacaaaatttgtttcgctagtctcaaattcttacatataaataatcctccttagatctttgccaggttttgattttcacatttgcacattttctccaggtgggcgagaatgaaccatttgtttctgaacttctgtccaaccttgctacaaccatcgccgatcttgagccacatcagattcatacgttttacgaatcagttggccatatgatccaagctgaatctgacaacactaatagggatgaatacctcaagagattgatgagccttcctaaccagaagtgggcagaaataatcggacaggcaagccaaagtattgatatcctgaagaaccaagatgttatccgatcagttctcaacattctacagacaaacacaagtgttgcgagctcacttgggccacacttcttcccacagatttcactaattttcttggacatgctaacagtctacagaatgtacagcgagcttgtatcaagcacgattgctgaaggaggaccctttgcctcaaggacgtcatttgtaaaactcttgagatctgtcaagagggaaaccctaaagttgatcgagacttttgtggacaaggcggaagatttgccacatataggaaagcagtttgtaccaccaatgatggatcctgttcttggtgattatgctagaaatgtacccgatgcaagggagtctgaagttctgtccttgtttgcaacaatcattaacaagtacaaaggggaaatgcttgaggatgtgcctcgtatatttgaggctgttttccagtgcacccttgagatgattactaagaactttgaagattatcctgagcaccgcctcaaatttttttctttgcttcgtgcaattggcacccattgcttccaagcattaatccagctttcaagtcagcaattgaagcttgtgatcgattcaattaattgggcgttcagacatacagagagaaatattgcagagactggccttagcctgttgttggagatcttgaaaaaattccaggcttcaggattccaaaaccaattctacaaaacctactttttgacaattgagcaagagatttttgcagtcctcacagacacattccacaaacctggtttcaagcttcatgtttcggtgctgcaacacttgttttgtgcggttgatggtctaacggagcctctatgggacgcgtcttctgtaccttaccaatatacggataatgctatgtttgttcgagattacaccataaagctcttagggacatcatttcctaacatgacagtaaccgaggtgacaaagtttgtagatggtcttcttagttcaaaacttgatcttccaagcttcaaaaaccatattagagacttcctggtgcagtccaaggagttctcagttcaggataacaaggatctatacgcggaagaggctgctgcccaaagagagagggagcgccaacgtatgcttgccattccggggctcattgcccctagcgagttgcaagacgagatggtagattcgtagtgttccttgttgattcagctctctaatgtagcttcctgtttgttggtccggcatcggaatacctctggagccctcgacgtccaagttttcttccagggtggtgaaagaaggtgcctgctgtaattttatttttggttacctccacatgatgctgattccaagatttgtggtagtagacagtcagttttgccgcatgactgctgctgggggtctctcagcagctgtggttgcctggatgtgttagcagcggctcttgtgctcggtgtactttgctaacattggtgcgtgtactttgcccatcatatattatattgtggtacatcattgtatgcttctttggtttaagttaatagatggaatagcgatttatgtatccaggcaggctggtaggaaccttgttactatgtctgtagtgtactattctgtgagatatctcatacgcctttttttttctttttctttggtgcattcctcaatgtgtagatttgctgtctcatcaacaagggtaggtttggcttggctgtgtatggagaaaaaactatgttcttttgttagcactctggtgcggagattacatatataaatgtagtaatttgttctgtgctgattatgtatacgaggaatcagtttcc

SEQ ID NO: 96729 - DNA, 3671 bp, Zea Mays
aattcccagaacctcaacaccaagttctttgcattgcaaatacttgaaagtgttatcaagtacaggtggaatgcattgcccgtcgatcaacgtgatggcataaagaattacatatctgatgttattgtgcagctttccagcaatgaagttacctttcggcaggagaggctttatgtcaataaactcaatattattttggtgcaggtactgaaacatgagtggcctgccagatggtcatccttcatacctgatcttgttgcagctgcaaagagtagtgaaactctatgtgaaaattgcatggctatattgaagcttctaagcgaagaaatttttgacttctcaagaggtgaaatgacacaacaaaagatcaaagaactgaagtcgtcacttaacagtgagttccggctcattcacgagctatgtttatatgtcctatctgcaacgcaaaggccagagctcatccgtgctacattggcgacactccatgctttcttatcatggatccctgttggattcatctttgagtcaccgttgctggagacattactgaagttcttccctatggctgcttatcggaatcttacacttcaatgcctaacagaggttgcagcacttcagtttggtgatttttataatgtgcagtatgtgaagacatatacatttttcattattcagttgcaggctattcttcctcctgaaaaaatcccggacgtatatgctaatggttccactgaagagcaggcgtttatacaaaatcttgcactcttcttcacatcattttttaagaatcacatgcgtatactggaaacaactcaagaaaatattgctgctttgcttatgggtctcgagtaccttattggaatttcatatgttgacgatacagaggtttttaaggtgtccttggattactggaatgtatttgtattagagctatttgaagcacacaatcaaatggaacctgcagtaactgtaagcatgatggggcttcaggcgcagatggttcctggaatggtagatgggggcacagctgttaaacagaggagacagctttactctggcccactctcgaaactacggatgctgatgatttgccgtatggcaaagcctgaggaagtacttattgttgaagacgaaaacggcaatattgtacgcgagacaatgaaagacaacgacgttcttgttcagtacaagatcatgagggaaacactgatctatttatcccatcttgatcacgaggacacagaacaacagatgttgaagaaactaagcaagcaattaaatggagaagactggagttggaataaccttaatactctctgttgggctattggatcaatatcaggttctatggtagaggagcaggagaatagatttctggttatggttattcgtgatttgctaaacctctgtgaaatcacaaagggaaaggacaataaagctgtgattgcaagtaacattatgtatgttgttggtcagtatccaagatttctcagggctcattggaagtttttgaaaactgtggtcaacaaattgtttgagttcatgcatgagatgcatcctggagttcaggatatggcatgtgataccttcctgaaaattgttcaaaaatgcaagcgcaagtttgtgacacaacaggtgggcgagaatgaaccatttgtttctgaacttctgtccaaccttgctacaaccatcgccgatcttgagccacatcagattcatacgttttacgaatcagttggccatatgatccaagctgaatctgacaacactaatagggatgaatacctcaagagattgatgagccttcctaaccagaagtgggcagaaataatcggacaggcaagccaaagtattgatatcctgaagaaccaagatgttatccgatcagttctcaacattctacagacaaacacaagtgttgcgagctcacttgggccacacttcttcccacagatttcactaattttcttggacatgctaacagtctacagaatgtacagcgagcttgtatcaagcacgattgctgaaggaggaccctttgcctcaaggacgtcatttgtaaaactcttgagatctgtcaagagggaaaccctaaagttgatcgagacttttgtggacaaggcggaagatttgccacatataggaaagcagtttgtaccaccaatgatggatcctgttcttggtgattatgctagaaatgtacccgatgcaagggagtctgaagttctgtccttgtttgcaacaatcattaacaagtacaaaggggaaatgcttgaggatgtgcctcgtatatttgaggctgttttccagtgcacccttgagatgattactaagaactttgaagattatcctgagcaccgcctcaaatttttttctttgcttcgtgcaattggcacccattgcttccaagcattaatccagctttcaagtcagcaattgaagcttgtgatcgattcaattaattgggcgttcagacatacagagagaaatattgcagagactggccttagcctgttgttggagatcttgaaaaaattccaggcttcaggattccaaaaccaattctacaaaacctactttttgacaattgagcaagagatttttgcagtcctcacagacacattccacaaacctggtttcaagcttcatgtttcggtgctgcaacacttgttttgtgcggttgatggtctaacggagcctctatgggacgcgtcttctgtaccttaccaatatacggataatgctatgtttgttcgagattacaccataaagctcttagggacatcatttcctaacatgacagtaaccgaggtgacaaagtttgtagatggtcttcttagttcaaaacttgatcttccaagcttcaaaaaccatattagagacttcctggtgcagtccaaggagttctcagttcaggataacaaggatctatacgcggaagaggctgctgcccaaagagagagggagcgccaacgtatgcttgccattccggggctcattgcccctagcgagttgcaagacgagatggtagattcgtagtgttccttgttgattcagctctctaatgtagcttcctgtttgttggtccggcatcggaatacctctggagccctcgacgtccaagttttcttccagggtggtgaaagaaggtgcctgctgtaattttatttttggttacctccacatgatgctgattccaagatttgtggtagtagacagtcagttttgccgcatgactgctgctgggggtctctcagcagctgtggttgcctggatgtgttagcagcggctcttgtgctcggtgtactttgctaacattggtgcgtgtactttgcccatcatatattatattgtggtacatcattgtatgcttctttggtttaagttaatagatggaatagcgatttatgtatccaggcaggctggtaggaaccttgttactatgtctgtagtgtactattctgtgagatatctcatacgcctttttttttctttttctttggtgcattcctcaatgtgtagatttgctgtctcatcaacaagggtaggtttggcttggctgtgtatggagaaaaaactatgttcttttgttagcactctggtgcggagattacatatataaatgtagtaatttgttctgtgctgattatgtatacgaggaatcagtttcc

SEQ ID NO: 96730 - DNA, 3353 bp, Zea Mays
aattcccagaacctcaacaccaagttctttgcattgcaaatacttgaaagtgttatcaagtacaggtggaatgcattgcccgtcgatcaacgtgatggcataaagaattacatatctgatgttattgtgcagctttccagcaatgaagttacctttcggcaggagaggctttatgtcaataaactcaatattattttggtgcaggtactgaaacatgagtggcctgccagatggtcatccttcatacctgatcttgttgcagctgcaaagagtagtgaaactctatgtgaaaattgcatggctatattgaagcttctaagcgaagaaatttttgacttctcaagaggtgaaatgacacaacaaaagatcaaagaactgaagtcgtcacttaacagtgagttccggctcattcacgagctatgtttatatgtcctatctgcaacgcaaaggccagagctcatccgtgctacattggcgacactccatgctttcttatcatggatccctgttggattcatctttgagtcaccgttgctggagacattactgaagttcttccctatggctgcttatcggaatcttacacttcaatgcctaacagaggttgcagcacttcagtttggtgatttttataatgtgcagtatgtgaagacatatacatttttcattattcagttgcaggctattcttcctcctgaaaaaatcccggacgtatatgctaatggttccactgaagagcaggcgtttatacaaaatcttgcactcttcttcacatcattttttaagaatcacatgcgtatactggaaacaactcaagaaaatattgctgctttgcttatgggtctcgagtaccttattggaatttcatatgttgacgatacagaggtttttaaggtgtccttggattactggaatgtatttgtattagagctatttgaagcacacaatcaaatggaacctgcagtaactgtaagcatgatggggcttcaggcgcagatggttcctggaatggtagatgggggcacagctgttaaacagaggagacagctttactctggcccactctcgaaactacggatgctgatgatttgccgtatggcaaagcctgaggaagtacttattgttgaagacgaaaacggcaatattgtacgcgagacaatgaaagacaacgacgttcttgttcagtacaagatcatgagggaaacactgatctatttatcccatcttgatcacgaggacacagaacaacagatgttgaagaaactaagcaagcaattaaatggagaagactggagttggaataaccttaatactctctgttgggctattggatcaatatcaggttctatggtagaggagcaggagaatagatttctggttatggttattcgtgatttgctaaacctctgtgaaatcacaaagggaaaggacaataaagctgtgattgcaagtaacattatgtatgttgttggtcagtatccaagatttctcagggctcattggaagtttttgaaaactgtggtcaacaaattgtttgagttcatgcatgagatgcatcctggagttcaggatatggcatgtgataccttcctgaaaattgttcaaaaatgcaagcgcaagtttgtgacacaacaggtgggcgagaatgaaccatttgtttctgaacttctgtccaaccttgctacaaccatcgccgatcttgagccacatcagattcatacgttttacgaatcagttggccatatgatccaagctgaatctgacaacactaatagggatgaatacctcaagagattgatgagccttcctaaccagaagtgggcagaaataatcggacaggcaagccaaagtattgatatcctgaagaaccaagatgttatccgatcagttctcaacattctacagacaaacacaagtgttgcgagctcacttgggccacacttcttcccacagatttcactaattttcttggacatgctaacagtctacagaatgtacagcgagcttgtatcaagcacgattgctgaaggaggaccctttgcctcaaggacgtcatttgtaaaactcttgagatctgtcaagagggaaaccctaaagttgatcgagacttttgtggacaaggcggaagatttgccacatataggaaagcagtttgtaccaccaatgatggatcctgttcttggtgattatgctagaaatgtacccgatgcaagggagtctgaagttctgtccttgtttgcaacaatcattaacaagtacaaaggggaaatgcttgaggatgtgcctcgtatatttgaggctgttttccagtgcacccttgagatgattactaagaactttgaagattatcctgagcaccgcctcaaatttttttctttgcttcgtgcaattggcacccattgcttccaagcattaatccagctttcaagtcagcaattgaagcttgtgatcgattcaattaattgggcgttcagacatacagagagaaatattgcagagactggccttagcctgttgttggagatcttgaaaaaattccaggcttcaggattccaaaaccaattctacaaaacctactttttgacaattgagcaagagatttttgcagtcctcacagacacattccacaaacctggtttcaagcttcatgtttcggtgctgcaacacttgttttgtgcggttgatggtctaacggagcctctatgggacgcgtcttctgtaccttaccaatatacggataatgctatgtttgttcgagattacaccataaagctcttagggacatcatttcctaacatgacagtaaccgaggtgacaaagtttgtagatggtcttcttagttcaaaacttgatcttccaagcttcaaaaaccatattagagacttcctggtgcagtccaaggagttctcagttcaggataacaaggatctatacgcggaagaggctgctgcccaaagagagagggagcgccaacgtatgcttgccattccggggctcattgcccctagcgagttgcaagacgagatggtagattcgtagtgttccttgttgattcagctctctaatgtagcttcctgtttgttggtccggcatcggaatacctctggagccctcgacgtccaagttttcttccagggtggtgaaagaaggtgcctgctgtaattttatttttggttacctccacatgatgctgctgggggtctctcagcagctgtggttgcctggatgtgttagcagcggctcttgtgctcggtgtactttgctaacattggtgcgtgtactttgcccatcatatattatattgtggtacatcattgtatgcttctttggtttaagttaatagatggaatagc

SEQ ID NO: 96731 - DNA, 2106 bp, Zea Mays
gcagagaaagaggaggagatgtgcagaaccgttacgatccattcatggaagaaagcagaaataaagcaggcagcctaagtaaagtatgtatactagtatgtggatatgtgctgcctgtaaccccaacaaaccaaagcaaaccaaactccatctccatctgctcgctcgctcacgcagcagccatgaccatgacgacaccaccgccaaggcagcagcatggcctggccgctgttgcgtccgaggtgcgcgcgcagcgcggcatcgcgctccctctcatcggcatgaacctcacctggttcgccaagcaggccgtgaccacggccttcctcggccgcctcggcgacctggagctggccgccggcacgctcggctacagcttcgccaacgtcaccggcttcgccgtcctcagcggcctctgcggcgccatggagcccatctgcggccaggcgcacggcgccggaaacgtcgccctcctgcgcgggacgctgctcagggccaccctcatgctcctggccgcctccgtccccatcgcgctcctctggacgcgcgtcgacgccgtgctgctgcgcttcggccagcagcccgacatcgcggccacggccaggacctacgtgctctgcctcctcccggacctcgccgtcacctccgtgctcaacccgctcaaggcgtacctcagcgcgcaggaggccacgctgcccactctgttcgccgctgccctggcgctggcgctccacatcctgctcaccgtctcgctctccgccaggatgggcgtccggggcgtggccgccgccgtctggctcagcgacctcgcgctggcgctcatgctcgccgcctacgcgctcgcccacgacctccggcgccagcgggggacaacgtcgaagccgatagcggcggcggcggccgccggctggctgctgctcctccgcctggccgtcccctgctgcctcaacacctgcctcgagtggtggtcctacgagatcctggtgctcctcacggggcgcctccccgacgcgcgccgcacggtgggcgtggtcgccgtcacgctcaacttcgactacctgctgttcgcggccatgctgtcgctgtccgtcagcgcgtcggtgcgcgtgtccaacgagctgggcgccggggacgccgccacggcgcgccgcgccgccagggtgtcggtggcgggcggcgcggcggcgggcctcgccggaggcctgctcatgctggcggcgcgccggccgtgggcgcgcatatacacgcgcagcccggaggtgcgggacggcgtggggcgggccatgaaggtgatggcgctgctggaggtggtcaacttcccgctcaacgtgtgcggcggcatcgtgcggggcacggcgcggccgctgctgggcatgtacgccgtcgtgggcggcttctacgtggtggcgctgccggtgggcgtcgcgctcggcttcaaggccggcctcgggctggagggcctcctggccggcttcctggtgggcgccgccgtcagcttggcggtgctggtgacggtcatcgtgcgcatggactgggcggccgaggcagagaaggcgcggacccgggcaggggcggcctctgccggcaatgttgagccggtgccggccaaggccaacgaggcggcgccatcggaggcttgctagctagctcatcatatggatcgatcgccaccgcttatatatagcaacaaaaatcaccaatcttggaaacccctgctacacttgtattcccaaactacattcatggttggaggcaacgagggaggcaggcattggtgctgatgatgctgataggccaagcccaactgcaaaacgtcggatcaccggtgggcctagtaagcaaacatatgggccggattgaggatgcatcatcgttatcatcatctattctattctaattctattcagattgaagaggcacagatagatcgataacggcaggggagagtagtggagtggagctgctgccaatggccgtagtcgtcctccagctcttcgtatatttccatccatacatcgctgctcctcatcactatagccgtcttctgtccttacttgtacacactggagctcacagattcgttcataaagtaattaagtttgtgtc

SEQ ID NO: 96732 - DNA, 315 bp, Zea Mays
atggctacgacggcgccgctcgttctcctcctccccctcgtgctgctgctgctgcaggcgaggtggtcgtcgcagcagcagcagcaggttgtgacggcggtgatcgtgttcggcgactccatcgtggatccggggaacaacaatggtttgcacacgctgatcaaggccaaccatccgccctacggcatggacatgttgaaccacgaggccaccggacgctactccaacggcctcataccaacagacctcattgtactgacgaaccatgaggcagtatatatatggaattctgatggaggagcaagactgaaatga

SEQ ID NO: 96733 - DNA, 2105 bp, Zea Mays
ccattcccattcccattcccatccggtaacggcatcccgcgtccctcggctcggatcgccgccgcccaacggagcaggagcaggagcagcgatccatcctatcctaggagccaaaccctagccagctatggagccgcccgccgcctcctcctcgtctgatccccactccccgtctccgtctccttctccctccgcctccccggccaagcgctccgcctggaagcaccccgcccccaacgacaccgccgtcatggacgccaacaactggcccgcgctctccgacgccgccaagggcaacaagctcccggactcctcggctccatcacctgcgcccgtagccgcaccatcggccgttgccaactcctccagttcgcaaaagcacggcgcccatcacggccgccacaagtccgccaggcgcattggcggtggtggcgaccactctccacgagaccatcctgaccggaacgttgccgctggttgggaccatgctgccggcggtggcgggggcaggggtgcccagaggaaccataataacggaggtggcaggaggggcaatggcgcacctgcctctgccactgggccttctcatcacggttctggtgccggtggcggcagcggcggaggctttggtgctaggcgaagaggggcatacgagccaccattctatcgtggccctccaccaccgatgggcatgggccactacatgagaggtgcgccgccgccaccgcccatgactgtcgcaccaccgttcatgggccctccaccgccaccagtttcgtccatgcgcccgtatgctggaccaatgatgttccatgacatgccatctcccatgtctcctgtatcccccatatacttttatgggccaccaccaccagaggctcttaggggactgcctcttgcgcctcctatggttggcccacctgcttatccatactttcaagcccagcctgaacctgaacctcagcctgatcctgagcctgatgcggaagaggaacgtgtcaagctgctcaagcagatagagttctacttcagcaaggagaacctatgctcagatgtgtacctgaggcagcagatggatggtcagggctgggttgatttatctcttatagctggcttcaaaaaggtccaagggctgaagaaggacctacaatatataaaagagacggtgcagtcctcatctgtactggaaatgaaggataataaaatcaggaagcacggagactgggagaaatgggtgatccctcgcgagagcaatcctgatgccccgtcaagattagcatctgtatcaagacctaatgtcaataacctgacatcacatctaggaggcatgggtctgcatgaatccgctagctctactggcgcagaggagctgaaccatcatgatgtcgtccagaacggatcgccttctggtaaggaaccggcagctgaagacagttctggtcagcaggagttgcaataagacagtggctcgccttcacaccatgactgcaggggttttgtgccagagcacaaatgatagtttcttcttttttttcgggtttttggggttggttggggggggggggtttggacgaggtgtgataatgactcatgaggggcgtgttagactgacaggcgaatgtgtttaccgggggtcaggtagataagattttgctttaccttgtggtattcaggcggaggggtagggcagctggtgaagcagcagagaaggaaggcggtggttacatctggaggcgcctcagatgacatggaagactgaaaaaacaagtctattgaagactgaaaaagaagtcaattgaagactagcgtagcggccctgggcggctttgttttcacaggatggtattctggtgttgcgatgaactagtcttcatcgggatggatgttgtaggaccttcaggttttttttttattttttttatggaggagctgaaagtttctgacttgggagagtgagggagtttgacttgttttgtttttgtggtggcgttaagttaaagtaagaagaagatgttagataatgtttgctccctgttcattctgctgtgctggccttgtatggtattatggtggctgtgaatgatggagactgagattgcgtggtc

SEQ ID NO: 96734 - DNA, 453 bp, Zea Mays
ccattcccattcccattcccatccggtaacggcatcccgcgtccctcggctcggatcgccgccgcccaacggagcaggagcaggagcagcgatccatcctatcctaggagccaaaccctagccagctatggagccgcccgccgcctcctcctcgtctgatccccactccccgtctccgtctccttctccctccgcctccccggccaagcgctccgcctggaagcaccccgcccccaacgacaccgccgtcatggacgccaacaactggcccgcgctctccgacgccgccaagggcaacaagctcccggactcctcggctccatcacctgcgcccgtagccgcaccatcggtcagatctcttctactcttgttactattacggatacacttaattattcgatcatatactcgatcatgttatggatgcccccattctattcgattcgatttcca

SEQ ID NO: 96735 - DNA, 1565 bp, Zea Mays
ggtgtggcgtagtgtaatcccaaccatgcatctaattatgtctaatgcagaatagtttaataaacaacatttgctaattgtgagctgtgacatcttgttttcttctctacgtgattcgctgcaggaaggtccttgcttaaaaggtaaaggcagggccagtgatgcagcaagaatcgtggttctgacctggagatcgttgctaattatgtcaagagattggaagtacttctggatcaggcttgtcttgtatatgcttattgctgtgtcaattggcacgatatttaccgatattggccattcactatcatctgtaatggtcagtgtggttacattgttatgttttgattcatcgaattggatttataatttggccattttggtttccacaggtgaggatttctgcgatatttgcatttgtatcgtttgtcatccttctaagtgcttctggagtacccgctcagatcgatgaggtcaaggtaaataccctatttaagtcctaggatggaaatatgctgcaagtagctaaaagtctcatgaaatcaaacttgctgtctatgctaggatgattattattattatttttcttttgcttatttgtcctatgcagatttattcccacgaagaagctaatcggcattcagggacaatggtgttcctgttagggaacttgctatcaagcattcctttcctattcctggtctccatcctgtcgtcgctggttttctacttcctgatagggctgaggaacgagttcagctccctgatgtactttgtgaccaccatctttgtatgcctgctggcaaatgaagcgcttatgatggttatctcgtacatctggctcgagacatacaagtgcaccttaactctcgttttcctacacgttatcatgatgcttgtggctgggtatctccgaatacgagaaaacttgccttatcctgtgtggacctacccgctgtccttcatctcgttccacacatacgctgtgcagggcttggtggagaacgagtacgtgggcacatcgtttgctgttggacagatcaggaccatacctggtgtccaagccgttcgaggctcgtacgacatttcgtcttccccaaacgcgaagtgggtgaacctcctggttctgctactgatggcgctcggatatcggattcttctctacttgctgcttcgtctagacgtgaggaagaacgcgaggaggcttggaaactggaggtcatggtggtcaagtgtgcattctgctgccactggtgcaaagtgatttttgagcttctatctaatcgagtgagtgagtgtcgtaggtgtttagtgagttctttggtttggtttggtttggtttgtatgccctgtccatatgagaaatgtatgtatacacgtattggttggcaacaaacacaaaacaatatcattgtttcctaatgacatacatctatttatctatctatctttagaccgctggtgcatgtggtcgatctgtccatatgagaaatgtatgtatacacgtattggttggcaacaaacacaaaacaatatcattgtttcctaatgacatacatctatttatc

SEQ ID NO: 96736 - DNA, 2569 bp, Zea Mays
ctgagcagtgagaaggccaggagggagagccaacgcctggcaaatgcagtgcaatggccgccacccaccgtcccattcctagctagcttggagccttggcagagcagcagccagcagcctgcccagcacaaacccagcagggaaggaaaggagaagagagaaggagaggtcgaggcgagcaatggaggtcgtcgcgtcctccgaccaatatcgctcgtcctcctcttccgccagcagccccgcgcgccgttactacctgcccaagcccggcgcgctccgccgccccatctccttcgaggactcccccgactgggacgacatccaccccgacgacaccatccacctcgccaccgccgcctctgcctccatttccattgcgagcagcgcctacccctcgccttcgccctccctgccccaagggtcctcctccgcctctgctgcatgccgcgaccggaaggtggccggagttaccctcgtctggaaggacctcactgtctcctcactcgccgcagccacaaaccgcttctccgaccgcctcgtcaagagctccaacggctacgcgctgccggccactctcaccgtcatcatgggccccgcgcgctccggcaaatccaccctgctccgagcaattgcagggaggctcagctctactgagaggatatatggcgaagtctttgtcaacggcgccaagtctcccttaccatatggatcatatggttatgttgaccgagacgatgtgctcattgaatccctcacagtacgagagatgctatacttctccgcgctcctgcagcttcctggtttcctatcttcgaaaaaggcaattgtggaggatgctattgcagccatgtcattaggtgaccatgctgacaaactcattggcgggaattgttttatgacgaggcttcctaccggagaaagaaggcgggtcagcattgcgagagagcttgtgatgagaccacatgttttgttcattgatgaaccactgtacaatcttgacagtgtgtctgcgctgctcttaatggtaacattgaagaaactcgcaagcacaggatgcaccatcatattcacaatgtatcagagcagcacagaggtttttggactcttcgatcgtatttgcttgctttcaaatgggaacacactcttctttggagaaacattggcttgcctacagcacttctcgaatgctgggtttccatgtccaatcatgcaaagtccatctgaccacttcttgcgggcaatcaataccgacttcgacagaattatagccatgtgcaagaatttccaggatgatcaaggggatttttcgtcagtgagcatggatacagcagtggcgattcggacactagaagcaacatacaaacaatcagctgactctgttgcagttgaatcaatgattgcaaagttgacagagaaggaaggtccttgcttaaaaggtaaaggcagggccagtgatgcagcaagaatcgtggttctgacctggagatcgttgctaattatgtcaagagattggaagtacttctggatcaggcttgtcttgtatatgcttattgctgtgtcaattggcacgatatttaccgatattggccattcactatcatctgtaatggtgaggatttctgcgatatttgcatttgtatcgtttgtcatccttctaagtgcttctggagtacccgctcagatcgatgaggtcaagatttattcccacgaagaagctaatcggcattcagggacaatggtgttcctgttagggaacttgctatcaagcattcctttcctattcctggtctccatcctgtcgtcgctggttttctacttcctgatagggctgaggaacgagttcagctccctgatgtactttgtgaccaccatctttgtatgcctgctggcaaatgaagcgcttatgatggttatctcgtacatctggctcgagacatacaagtgcaccttaactctcgttttcctacacgttatcatgatgcttgtggctgggtatctccgaatacgagaaaacttgccttatcctgtgtggacctacccgctgtccttcatctcgttccacacatacgctgtgcagggcttggtggagaacgagtacgtgggcacatcgtttgctgttggacagatcaggaccatacctggtgtccaagccgttcgaggctcgtacgacatttcgtcttccccaaacgcgaagtgggtgaacctcctggttctgctactgatggcgctcggatatcggattcttctctacttgctgcttcgtctagacgtgaggaagaacgcgaggaggcttggaaactggaggtcatggtggtcaagtgtgcattctgctgccactggtgcaaagtgatttttgagcttctatctaatcgagtgagtgagtgtcgtaggtgtttagtgagttctttggtttggtttggtttggtttgtatgccctgtccatatgagaaatgtatgtatacacgtattggttggcaacaaacacaaaacaatatcattgtttcctaatgacatacatctatttatctatctatctttagaccgctggtgcatgtggtcgatctgtcca

SEQ ID NO: 96737 - DNA, 2497 bp, Zea Mays
tggttgcgtacagtaccctctagaagcctccgggtcgctcggtgtgggttgctaactactcgcagcagccagaggccagatccagccgccaaccccccaaacaaaaccctaggccaccattctgaccaccaggcacaagcagagcagaagcagacatggccaccattccgaccaccgattctggcctcgtcctcagttcctccgctctcctccggaggactaggagggccgcctcatccgtcaccgccaggctgccagccgtcgcccgccgtcgcccgcagctcctcgtgcgtgcctccgccaaggagatcgcctttgaccagggctccagagccgcccttcaggccggcgtcgagaagctcgccgccgcggtcggcgtcaccctcggacccagaggaaggaatgttgtcttggatgagtttggaacccccaaagtggtcaatgatggagttaccattgcccgcgctattgagcttgctgatcccatggagaatgctggtgcttccttgattcgtgaagttgctagcaagacgaatgactcggctggtgatggaaccacaactgcctctgttctcgctagggagatcatcaaattgggcatgttgagcattacttcaggggcaaatccagtgtccgttaagaagggcattgataagactgttcagaaattggtggaggaacttgagaagaaatcaaggccggtcaagggtagtggggatattaaagctgttgctgccatatcagctggaaatgatgaatttgttgggactatgatcgccgaagctattgacaaggttggccctgatggtgtcctctcaattgagtcgtcatcgtcgtttgagaccacagttgaagttgaagaagggatggagcttgacagaggatatatctcccctcagtttgtcactaaccttgaaaaatctattgttgagttcgaaaatgctcggattcttgtcactgatcagaagatatcatcgataaaagaaattattcctctgttggagcagacaacacagttaagagcaccacttcttataattgcagaggatgtaagtggcgaggcgctggcaacattagtcataaacaagcttagaggaattttaaatgtggctgcaatcaaagctcctggttttggtgagaggcgtaaagctcttcttcaggacattgccattgttacaggtgctgaatatcaatccaaagatcttggtctactagttgaggatacaacagtggagcagcttggcatagctcggaaagttacaatctcaagttcctcgacgaccattatagcagatgctgctagcaaagacgatatccaggccagaatcgcgcagctgaagagagagctttctcagacggactcgacgtatgactctgagaagttggcagagagaattgcaaagctttctggtggagttgctgtggttaaggttggagcatcgaccgaggcagagctagaggaccgcaagctccgcatagaggacgcgaagaatgcgacttttgcagcaatagaggaaggtattgttccaggaggcggtgcagcatatgttcatctatcgacattcgtaccggctatcaaggagacgttggatgatcctgaggagcgcctaggtgctgatatcattcagaaggctttggtggcacctgcagcgctgatagcccataatgctggggtggaaggtgaggtgattgtggataaaatccgggaaagcgagtgggagttcggttacaacgccatggcggacaagcacgagaacctggtggaggctggtgtgatcgaccctgccaaagtgactaggtgcgccctgcagaacgctgcctccgtggctggaatggtgctgactacccaagcaatcgttgtggagaagcccaagaaggctccagcagcagctgctgcagcggcaccatagggttctttcaccatgtaataatactttctagtgaaaaacaattttactaggcatggaacaggcacgttagagtgacgaggagaaaaaactatttttgtcatgcgtgggccggaataaattgagtcaggaattgcatggattttgggccaggacgatttgcaaattggttggattagagtgtggatggctgattggacattgtatcctatctgcattctgttcactcagttggctaattcacatttctctccagtccttccctcccttttgtgacgatgcagttttttatcgtctggtaaaatggcaaggcaacaaattcatggtgctgcttctatctccccgtctccatcccgcaccacaggtactatttgctctttcatccgctacgatctggcagcggtttccaatggtacatgacaacaccggcagagcatcgacggatcgcttgtggttgaagggcgaaaaggctttgcttgagttgctgctaggaccttggcaagagtagacaggcaagctgacagaggaggtgaagttggcagcagaagaaccagacacccagttggagttggatcagatgtagcacagca

SEQ ID NO: 96738 - DNA, 687 bp, Zea Mays
gccaaatgggaaacaagatattgtaggcctggagccgtgaaacaacgacaccgcaagaccgtacagcagcttcaggtgagcagccatctatgagcagccctcctgccaccgaggcctgtgctggcaacgacggaagccatttggcgggatctcagccagatgctacgccatatgcttctaccagcacaacgcagaggatgagttccgaagcattagcaagccagcaatgtggatcactaccacaaatttcgataaaccgagctgaacgtacccttgagatgaagggcagccccaataatcttcacggacacccaggcatgcagcaaactgcgaatggtttcaatgatgttccaggaccaatgatgttcccacatgtggctcaactggtggtgaatcagatgcagacacatacggctgattgataatgttgtgtgtgtgccagggggtcgggtcgcctttgatccgtcgcgcctcaacctgaggctgcaactgtgagcctgttgtgtaattgcttaagtagttattaggatgatagcatgcatagatgtgttgggtggatgctgtaacagtggtgatcggtgagttgcgattctgaatgtgtagcagaaaaaaccacagccgaaatgaaacatctgtatagattatcgaggatttttttagcatgaaaccgtgcgaatcagtttgtct

SEQ ID NO: 96739 - DNA, 2451 bp, Zea Mays
atggcaactcgcaacgaacacagattccgaagagagaccagggcatccataattatccaggaaaaacataatgaacagttccttgaatcacagactcgttggcgccaacacagagcttatgctgcttacaaacagcaacagaaagcttctttgattctccaatgcttgtggagggcacgcattgcaagaaaggaacttcggaaactgagaatggaagcaagagagaccggcgcactgaaagaagcaaaagacaagctagaaaagagagtagaagaactcacatggcggttagacgtcgagaagcgtttgagggctgaccttgaagaagcaaagagccatgaaattgaaaagttgcaatctgcactgcaaaaaatgcaagaaaatctcgaggaagcccatgcagcaatagtaaatgagaaagaggctgcaaagttagcgattgaacaggcaccaccaaagatagtagaagtgtcggttattgacaatgcgaaacttgaggagttgacaactcaaaataaagaacttgaggatgaactaagtacgtttaaacaaaaggctgaggatcttgaaaataagcttattgagttccaaaaacagtctgatgaactgtcacaggagacacaagaacaagcatccaaagttactcaacttcaagagctggtcgaaagattggaaagcaagatcgccaccttggagtcagagatcgagttgctccacagcaattctgcactagctattcaggtcgtggttactcctgaaatgaatcagacaacagtaattgaggaatttgacaagggacaccagcttgaagaagttaaaacggtcaataactctatttgtacttatgtttgcataggctaccatgctctaatttcacacgagattttgagatacttcttgacacttgtattttttgtcattgaagcccatatgctctgttgctatgccataatggactgcttggatgatgccgaccttctggccaaaagggtgtggagatttgagcctatttcaattgttttccaagtaactgcaaatggtgttggcctgctagatcctggtgttgaaagtaaccgtatttttttctttaggttgaagcatgttcaacaagttgaactatctaatcctaatgttgagatccgcttgcttgaagtattttaccacaagatttataagagcacgaccaggcaaccgtcgaccacgcccaatcgggagctctatcttggcgtcaaagtacattgtggcgaggaggtggctatcaagttgagatggaatgttggcaaagagaacatgcagagaggactgcaattcattggtaggaatttctctgttgctgtgtacgaacaagtcaattctcctataggtttcaacatcacctttactggtttgcttagcctcaccaccgatataggtttagaatttcctataatacaaactaatttctgtgggattcttaacggctattccattatttagttagtaagtaatatacaattagtttgtcagtttggtggctttaatttgcatatttttctaccatgttttgggaatattactaatatatattaaccctttgaagcttgttgtaacaagataccttaattgtcacacaatgctactgtcatttggcgattgcgtttaacacattgctactgctgggatttgtgggactaaatggttgtacaactcaaacatcatcaaggcccaagatgtcatctgcatgctcatgagtcagaagaatgtgttatcaacaaggaggagatgtgagtgtaccatgggtatgtagaacactgaatttatttttacagccatagtgaacactcttttagttggccttttgatttgaaataaaccactatagaacattgatttttttcttttacagtcatagtgaacacaagataccttaagcacaattataacagtttgtcccatccacatatccctcgtcatgcctttccatgccatcttcgccacctgcctgtaaccctcgggtccgtccgtccgcagtaagagaattgtataaaaggtctatttaggtgacccatgatataatttctcagatgagtttttctactacaatagttttattgcctaggtgcagcaataatcagtattaagcaataaagttcagtattgctacaattaactcttaaatgtagttttgttttacatattatatctcaagttaattctcctatccatgttgtcttgtatttttgcgttgaagagatggaatgttggtagagagaacatgcagagaggtacaaattgaggttcatcgagatagatttgaaggatttttatttcagtgaaaattgatgctgaccagtcacttttttgttttggacaggactgcaattcattggtaggaatttctctgttgctgtgtacgaacaagtcaattctcctataggtttcaacatcacctttactggtttgcttagcctc

SEQ ID NO: 96740 - DNA, 82 bp, Zea Mays
ccgcgtacgtcctcctcgtctggacgtcccactgctgcgcggaggacggcacgacgaagcccgtcgtcgacgacgccgcgac

SEQ ID NO: 96741 - DNA, 2641 bp, Zea Mays
attatcgatcccagccccaggccatggcgacgaggtggaggaggtcgctgctctgggtcgccgtcgtccagttcctgaccctgtgcgtcgccgagcatctcgtagtggaagcatacaaaaagtcctacattgtgtatctgggatcacatgcatatggccgtgatgcgtcggcggaggagcatgctcgcgcaacccagtctcaccaccacctcctggcatcgatcctcggcggcgacgaccaccaccaccatgagacggcgcggcagtccatcttctactcctacaccaagagcagcatcaatggcttcgcggcgcacctggaggagtcggtcgcgcagcagatcgcggagcaccctgaggtggtggcggtgctggagagcaagatgctcaagctgcacaccacgcggtcctgggacttcatggacctggagcgcgacggtcacgtcctccctggctccatctggaaccacgctaggttcggacaggacgtcatcatcgccagtctcgacagcggagtgtggcccgagtcccacagcttccaagacgacggcggccaagtgccagctcgctggaagggctcctgtcaagacaccgttaagtacggtgtcgcctgcaaccgcaaactcatcggcgctaggttcttcaacaaagacatgctctttagcaacccagccgtggtgaacgccaactggacgcgcgacaccgagggccacggcacccacacgctctccaccgccgccggtggctttgtgccccgtgccagtctcttcggctatgccactggcacagccaaaggcggcgcgccgcgtgcgcgcgtcgccgcttataaggtttgctggtcgggagagtgcgccgccgccgacgtccttgcgggcttcgagtccgccatccatgacggcgccgacgtcatttccgtctccttcggtcaggacgcgcccctcgccgatgacgtcaagtcactcttccacgagcctgccatgctcggctcgctccacgccgccatccacggtgtctccgtcatctgctccgccggcaactccggcccgtacgatgacaccgtcgtcaatgccgcgccatgggtcaccacagtcgccgccaccaccgtcgacagagacttccccaacgttctcaccctcggcaatagcgtgcgccttaggggaacgagcctcgagtctactacgctgcactccagcatgctctacccgatgatcgacgccgcgcgcgccgcgcgcaccacctctaacccgtacgacgcggccagctgcgggctcggcaccctcgaccctgctgccatcaggggcaagatcgtcgtgtgtcgccgcggcggcggaggcggaggcgacgtctcccgagtcaccaaggggatggccgtgctcgaggccgggggagccgggatgatcctcgccaacgacaggatggacggtgacgacatcgtcgccgacccgcacgtgctcccggccaccatgatcacctacagcgaggccgtctctctgtacggctacatggagtccaccagcaaccccgtcgccaacatctcgcccgccaagacggaggtgggcgtcaagaactcgccgtccgtggcgggcttctcctcccgcgggcccagcgggactctgccgtacgtgctgaagcccgacatcgccgcgccgggggtcgacatcctggccgccttcaccgagtacgtcggccccacggagctcgcctccgacaagcgccgctccgagtacgccatcctgtccggcacgtccatggcctgcccacacgtctccggcgtcatcgctctcctcaaggcggcgcgccccgagtggagccccgccgcgatgcgctccgcgatcatgaccacggcgcgcacccaggacaacacgggagcgcccatgcgcgaccacgacggcaaggaggccaacgccttcgcctacggcgccggcaacgtgcaccccaaccgcgccgtcgacccgggcctcgtgtacgacgccggccccgacgactacttcaccttcctctgcgccatgggcatctccgcggcagacatgaagcggctcagcgccggcaagttcgcgtgcccagctaatagcgctaaggaggcgcccgccatggaggacctcaactacccgtccatcgtggtgccgtcgctgcgcggcacgcagacggtgacgcgacggctgaagaacgtcggccgtccggccaagtacctcgcgtcctggcgcgcgccggttgggatcaccatggaggtgaagccgagggtgcttgagttcagcaaggtcggtgaggaaaaggagttcaaggtgacggtgacgtcgcagcaggacaagctcgggatgggctacgtctttgggaggctcgtctggacagacgggacccactatgtcagaagccccgtcgtcgtcaacgccctcgcatgatctatccagttcgtgctaactagagtacactacctactactactacttgagggccttgtggatttttgtgacatcttagataagtagtaaggctctaaaatatatttttatttcttcttgttattattagtaaagaaatgagataggtttttttttgcttagctaaaagacatatcatctataataaattttggctctttgcatgggaacttgaattaatggtaaaaaactgcatatctata

SEQ ID NO: 96742 - DNA, 1635 bp, Zea Mays
atcggagggtctctccattccatccgaatctagctgctgctgctgctgctggttagctcaatcgatcaatcaatggcggcagcaacggcaactgcaactgcaactgaggctgccggccaccaccaggagcagcagcagcgtttccgcgtcgtcgacacggccctggtggcgcctgcagctgctcccgcactgccgccgcgctccatcccgctcaccttcttcgacgtcaagtggctgcacctcccgcccgtggagcgcgtcctcttgtaccgcctctccccggacgccgacgtccccgccattctctccggtctcaggacctccctctcccaggccctccgcgccttctacccgatggccggccacgtccgcatgccggccaccaataaccgccgccacgagctgtgctaccgccccggcgacgccgtccccttcaccaccgcggagtacaacgtggacatcgaccacctcatcgccgacgactccgtccccgtgcaggtggcccagctcgcccctctcgcgccgcacctgcctaagggccgcgccgtgctcgccgtgcaggccacgctgctgctcggccgccggggcctcgcggtcggcgtcaccgtccaccacaccacctgcgacggcgcagggtccacgcacttcctccacacatgggccgccgccgcagccgcaagagcagatgagcacggtcatctcgtcatccccccgccccccgtcatcgaccgggaactcatcccggaccccaggggcctgtacgacgtgtacctcagaagcatgccgcccatggtgtcccaggacgactttgagttcgtgctgggcaagcctcaggatcccggcgaggacaaggccctggccacgttcacgctgtcccagcagcttctgcagagcatcaagagcgcggtcgcccacgaggcggcgcggcgtggcatggtgacgccgccccggtgctcgtcgatcctcgccacctacggcttcatctggtcctgctactgccgagcccgaggggcggcggcggcggcggcagagaggagctacttcctcttctccgtggaccagcgctctcgcctgaagccggccgccgtcccggagaagtacctgggcaactgctgctgcccggccatcgcgagggcgcgggcggacgaggtgtccgccgggggcatcgcggggctgttcgcggcgtgcgcggcggtggcggcggcgttggaggaggaggtgcgcgagggggcgcaggagcggtgggacacgtgcgtggcgcgggtgaaggaggccgcggccaaggggatgctgtccgtggccggatcgcccaggttccgcgtctacgacctcgactttggattcggccggccggagaaggtggacatggtgtcggtggccaagaccggcgccatctccgtggcggacgcgcgtgttggaggtggaggcgtggaggtgggtatctctctgccggtggcgtcgggtgacatggaccgcttccgacagagcgttgcagacgggatggagtggctccggttgctgtgattgcatcatttgcatgatgtgtgcgtgttaataatgttgatttctacaacagaaatacgtcaataaaaggacgaaacatgcactttgcatttagaaaaagaatccaaaaaa

SEQ ID NO: 96743 - DNA, 162 bp, Zea Mays
gttattttcagggttactcactggttcagattctggagacttctacagaaggaggaaaagcaccaacaaattctcgatgcctgtcgagctttggaggtggtggcgatggaagtttttgcaatgcatggatggcgctcgaatgcaagaattgaagatggctag

SEQ ID NO: 96744 - DNA, 5162 bp, Zea Mays
tttgaagatgccatcaccgtccgtcacccccattaggggcaacaatatgtatgtatgtatgtatgtgcttagtgtctcttccgttgcaggcgtccaaaagccgctttgttgtgggctctcatgtctgggttgaggacccagatgaggcctggatggatggcttggtggaacagatcaatggggacgaacttgtcgtcaactgcacctctggaaagaaggtaactgctaatgtgtcaagtgcctaccccaaggataccgagtctccacgtggtggtgtggaggatatgacaaggctagcatatttacatgaaccaggagtgcttcaaaacctaaagtctagatttatgctaaatgaaatatatacttatactgggaatatcttgatagctgttaatccatttcaaagacttcctcacctatataacaacgatatgatgggcatttacaaaggagcagaatttggtgagctgagtccccatccattcgccatcgctgaccgttcgtatagacttatgatcaatgatcatataagccaagcaatattggtgagtggagagagtggagcagggaagaccgaaagcactaaaagtcttatgcaataccttgctttcatgggtggtaagcctcaagctgaaggaaggtcagtgcaacaacagatcctggagtccaacccggttcttgaggcatttggcaacgcaaaaaccgtcaggaacaataattcaagtcgttttggaaagtttgttgagattcagtttgatgcgaatgggaagatatcaggagctgctataaggacctatcttctagaaagatcacgtgtgtgccaaatatctgatccagaaagaaactaccactgcttttacatgctatgttctgcaccaccagaagattgcaaaaaatataaattgggagatcccagatcatttcactatctcaaccagtccaactgtattgcgcttgatgggctggatgactccaaagaatacacggaaaccagaagagctatgggtattgtgggtatgagtactgacgaacaggatgcaatatttagagttgtggctgctattcttcatctgggtaacatagaatttgcagaaggaagcgaagacgattcttcagtacccaaagacgagaaatcccaatttcatcttaagacagcagctgagcttttcatgtgtgatgaaaaaggtctcgaggaatctttgtgcaagcgtgtaatggcaacacgtggggagagtattacaaaaaatttagatccacgagctgcagctctgagtagagatgcattgtctaggattgtttattcacgtttgtttgattggattgtaaataaaatcaatagttcaattggtcaagatcctgattcaaagattttgattggtgtccttgacatttatggtttcgagagtttcttgacaaacagctttgagcaattttgtatcaatctaacgaacgagaagctccaacaacactttaatcagcatgtctttaagatggagcaggaagaatacaccaaagaagaaattgactggagttatatccagtttgtggacaaccaagaaattctggatctaattgagaagaaacctgggggaataattgctcttttggatgagacatgcatgttgcgaaattcaacgcatgagacatttgctgagaagttatatcaaaagtttaaagacaaccctcacttcagtaaacccaaattttcacggtctggcttcactgttcatcactatgctggcaatgtcacttatcaaacagacctgtttttagataaaaacatagattatgctgtaaatgaacatcaagttttgttaaatgcctcaaaatgttcatttgtgtcaagtctttttccaccgtgtgaagaatcaacaaaatccacaaaatttacttcaatcggctcaagtttcaagcaacaattgcagagtctgctagaaactctgagtgcaacagaaccacactatatccggtgcataaaaccaaataatgttctcaagccagcaatatttgagaacagtaatgttctccagcagcttcgttgtgggggagttttggaggcaataaggataagctgtctgggataccctactaggaggacattttatgaatttgttaatcgatttggtattctacaacccaaagtccttggtcgaagccatgatgaagttactgctgcaaaaatgcttcttgacaaagccaatcttgcaggctatcagattggaaagacgaaagtatttcttcgtgctggtcaaatggcagagttagatgctctaaggacagaagttttgggactttctgctaaaaaaatacaaagcaaacttcggtcatttctggctcgcaaaaaatatatcgagctgcaacaatgtgctacacaaatccaggcaatatgcaggggaacaactgcaagaaggcgttatgaaaaccttcgtagggatgtagcttcattgaaaatgcagacctgctaccgtatgcactatgcaaggaaaaactatgtagaaatctgttctgcgtcaactaatatccagtctggtttacgtggtatgggtgctcgcatcaaactccgcttgaagcggcaaacaaaagctgcagtgattattcagagtcgatgccgctgttatttagtacgttcacgatatgttaggctggtgaaggccacaattacggctcagtgcggttggagaagaagagtggccagaaaggaacttcgaaacctcaaaatggctgcaaaagagactggtgctctacaggctgccaaaagcaaactggagaaggaagttgaggagcttacatggcggctacagctggagaaacgtattagggctgatttggaagaagctaagtcacaagaaaataagaagctccaattacaattgcaggaattgcaattgcaactcaaagacacaaaggacctattgaaaagggaacatgaagctgccaaagaagcatcagagaaggctgctgcagtaccagagattcttgctgatacagctcaagtcaatgagcttactgctgaaaatgagaagctcaagtcattggtggcctcttttgaggaaaaacttcagaatgcagaacagaagttcgaagaaacagagaaagctagggaagaattagtcaagaaagcaacagatgcagagtcaaagataaatgaactgaagaacacaatgcaaagccttcaagaaaagttgactagcacggaggcagaaaaccatgttctcaggcagcaatctatgaaagcaagacctgataatatgcctttgcttaacatgcatcggaaatcaaatttggctaatggaagcctacattctgacgaacagacgcctcacggcactcctatggagtttggaaggagatccatcattgagagacataatgagagtgttgatgcattgataaattgtgttgttgaaaatgttggattcagtgaagggaagccggttgctgcaataaccatatacaaatgccttcttcattggagaatttttgagacggacaaaacaaatgtttttgatcgattgattcagatttttggttctgcaatgcagaaacaagataacaatgctgatcttgcatactggttatcaaattcatcatctctactgattatactacaaaagagcctcaaacctcctggttcatctgtaacaactccaatgaaaagaccacagactcagacatcattccttggaaggatgggatttcgtgcttcaagtattactgttgatatggatcttgtccgccaagttgaggccaagtatcctgctctcctttttaagcagcaacttacagcttttgtggaaggcttatatggaatgatccgagacaatgtgaagaaagaaatatcttcagtaatttcactagtcattcaggttaccccatctatcgaaagtcatcctcaggcaccaagaaatgcaaaagctggtttgatcacagatcaaggtagctattggcagacaatagtcaaacatttgaatgacctcttagaaattttgcaagaaaattgtgtaccgacagtttttgctcggaagatctttacacagattttctcattcatcaatgctcaactcttaaatagtcttctcgtgcgtcgggagtgctgttcctttagcaatggggaatatgtgaaacaagggttggacgaacttgagacttggtgcacagtggccaagccagagtacgcaggatcagcatgggatgaacttaagcacatatgccaggctgttggtttcctggtcattttcaaaaagttcaggatctcgtatgatgaaatcatcagtgatttgtgcccagtattgagtgtccagcaaatttacaaaatctgcactcagtactgggatgataaatataataccgagagtgtatctgaagaggtccttgatgagatgaaaaaagtggtgaacgagggatctggccaaggcacttcatcagacaatacatttttgctaaatgaggagataagcttgcctctatctctggaggagattgccaactctatggatgccaaggaatttcagaatgtgagtccaccgcaggaactccttgacaacgctgcattccagttcttgagaagctgaggatgagaaagacagggaggcaggcatagatagaagatacagatagatagaaatgcccggtgtcccccttagctaggtgctgtaaattcagatagttcggtcggtccatgtagccttttgaaatgaaattcttggccattctcgcttcacgtatgggccttgtaaatttagatagtgtgcgctgagcggaggagccagttcaccgacgtcgccaagccgtcgcggatccacccgtcgttgaccccatggacgctaaccccacgcccccatgggggaggaggaggaggccacatcgtacaagcagcagccggagaagatgtgtggcggccagaggaagaaggctgagtcagtgatcgcaacggagaagttatgtggagttctggcgttgtgtggcattgggctggggaattaaggagctcaacctgttggttagcgggttaggataggggatgtccatgtcaggtaaccgtttgaaaatttcctccttttcttctggtttatgctggtggtttgatttcgttggacctacatataggtggtgattttaattagttgatgttgttggatacatgtttactgtacttttgaagc

SEQ ID NO: 96745 - DNA, 758 bp, Zea Mays
tggagacagcggagccctgatagctatgtactccgattctgggctgggcttctctgtcctgtcatcactacaagtttcctttgctgcatttcttccagaatgtagaatgaccgcctcatcttcgagcatcacaacggtcttctcaaccaccacattatcgtcgctgctgttcatccttgagatgttaccgttggtttcctttacactagcagtttctgttgtacgaagagatttagctccagctgaaacctcttttctctctctactagctactgcatttttcacaacagcaggagcttgcgagtatttgaccttcagttctggtagtgttgctgatttactctggtcaagctgcattatagctgaaattttctttgtctggctatcttgtggcatgctttttctccgcgggcggtccacgcttgctgacttggaattcaaagtatggccagtcgaactgttggttttaggttcagcaagttttctcaatctctcgttggatgattcggtcctcccacttctctccttcatgtctgtcaaggttggcttactaactgcattagtattgtcatttagtttgcttgattttgctgttttttcaggatcagtccctggggtagttttgataggaaattttctgagaggtgaagaggatgcaagttcggtatcgctgagctttgagctcttgtaggtgctgggggaaaccttgggagaaggctttactctgggctgctgtggtgttggtgcattggaagtgc

SEQ ID NO: 96746 - DNA, 1257 bp, Zea Mays
gcgtccactgtccaccacaacagccaccaggcgctcctcctccggcctctccccactccgtctcgccacccccgcctctccttctcgccgcgcccagccggcctccgttccttcttcccggcttctggttgccgccttggcacgcatggcgttgcgcttgcagagccagagttcgttcccctacaggaggaggaggaggaggaggaggacgcccgattcgtcgtggtgaccttctacaaattcgtgcccctctttgacccccacgccgaggtcgccagacacctcaacttcctccagggacgcgacatacatggtcgcatttacttgaatgagaagggaatcaatgctcagtacagtggccctcacaaagatgcagtggcatatgcagactgggttaagaaacatcatcagttttctgatatgcttgttcaaacctcaccagctgtaactgggcatgcctttcctagactgaaactacggtacaaaccatcacttgttcagttagaaggaggtagtttgcatcttccgttgctggaccctaacatgcgtgcgacaccattgactccatcagagtggaaggaaagacttgaagctaggacatgccttgatgtgtcctcaggcgaaacatctggaagggggcttttgctgcttgatgtgaggaatgattatgaatgggatgttgggcactttgaaggtgctcagcggcctaatgtggactgcttcagaagcacttcctttggactttcgggagaggtaatacattgctcagatcctctaaatggtgtagacaaagagaggacagatatactaatgtactgcaccggggggataagatgtgatgtgtattcaacaattcttaggaagaagggctttcggaatctgtatacactggagggaggagtgtcgaactatctcaaggtggaggggccagcagggtgggtgggaaatctctttgtctttgatggccggctctcgttgccaccagcgacattcaatgaggaagaagatgaggaggaacagcaggagaacaagaggtgggtggggtgctgctacgtgtgcggatcagaggtggtggagctgcggcaccgcaactgcgccaacatagactgcaaccgcctttatctgtgctgcggttggtgtgcggaggagctgtgcggctgctgctgctccgactgcaaggtcgcccctcggctgcggccgctgctgccaggccaccagagatacttgaaatggcatgtctaccgcgacggacggacg

SEQ ID NO: 96747 - DNA, 957 bp, Zea Mays
caaacccctacccattcattgctcacgcacgcattcaagaccatgaagtccaccttgccatctatgtccttccaatcaccctgtttcaagatccaaccggctactcagcagagcctctggcctcctcggcgacagagcacgaggaaaccaggacttcctctaaagcttatacgtgcagcattaggaccagacgccaatggcggactcctcaatgctgaccgcagaggtgccaccttaccatcttcgcccctgtcagatgtagttcaggagttttactcctccctcaatgaaaggaacagcaaacggctcgacaagttgatggcccctgattgcatcatcgaggataccgcatattataagccactggatgctaagtgtacccatatctacttcaaacgactgatggaatccatgggagagaaggtcaaatttgccatcgacgaggtttgtcaaggtgcaggacggaccgctgcagtaatgtggcaccttgaatggaatggatacatcatcccctttagcaggggctgcagcttctacatatgctcagtaaatggagcagtgcttcttatcaggaaaatccacatcttcaatgagtcaccactgaagccaggaaagtgggcattggaaatactcaacattgttaccaacttattcaacgtgttccccaaaccagctgaaggtttcctcaaggatccagaagcagtagctcaaccattcattaacctctacaagttttatgtggagccttttatcatcccctttcttgcatattatacccacttttggacatatgtgggtcgaggattgagtatggtgctacacatcttgtataacctatataaacggcttatgtaaagagcttaactgactgaaattcagaacaataaatttgcaaagattggtctattagtatgttaattgttaactcgatgcaatgagctaaaaaaaacgtccttc

SEQ ID NO: 96748 - DNA, 2271 bp, Zea Mays
gttctgtctgtcttcacttatccgaggttccgtgcagcagtggaaaagagcagattttagcagagcagcgagggtcggagaagcctccccaagcttcgaatcgctatgcagcccgtcaaggtgtacgccgaccggcggtcgcaaccctcccgagctgtcatcatcttctgcagggtgaaccagatcgatttcgaggaggtcacggtggatctgttcaagtctcagcacctcacacccgaattcaaaaaaataaacccaatgggacaggtacctgcaattgttgatggaagattcaaactatttgaaagtcatgcgattttgaggtatcttgcatcggttttccctggagtagctgaccactggtatccttctgacttgttcaccagagccaaaattgagtcaatcttggattggcatcactcaaatttgcggcgtggtgcagcaacccttgtaatgcacactgcattggctcccttccttggtcttacgacaagtcatgaggctgtgaaacaagcagagaagcttgtgatgcagtcactgggggtgatcgaatccgtatggctgaaaggcgatgccaagttcttgctaggtatcccccagccatcgattgcagatctgagccttgtctgtgagataatgcagttggagatccttggcgatgaggtccgtgaccgattcctgggagctcatgagaggatccttgtctggatggacaaggtgaagaaagccacgagccctcattttgaggaagcccacgagctccttttccaagtgaagaaggcacgcatggtgcaaggcagcagcagcaaggcttttgagtcgagcacaaagctcaaaacagcatcaaagctctgacgaccaaaggcagaataagcgacagacagatccatcttgtgatataatataataaacgggaactattattaattactgttggtattaattacacttattccagaaggccacaagtgcttcgttgcacttacttattccacaaggccacggtcgggaactacttactgttcgttccagcatgctatagtaaacaactctgcaacaacatcatccccaaaaaacaagcaaacaacaaaattggtatctagtctgtcttgaatctgtgtgaaatcctctccaggccgtccttgcactcttccattgccctcttcgacttgtctccaagggttgcaccaaacgcagatacgcttcccttcacttgtgctgatacctcgtttgccctggaagcagcacaagccccaaactcggtacaccactgccttgcatctgcagcttgctgctttaggattgcgatgaaggacctcacatgctgcatcactctctccaccgcaccccgagacctcacctccatctcaccagacattgtcttgagcttctccagcagagcttctgcctggttgatagactcgtcgactgcgttttctttgccagcgttagcccatgtcaccccagctgaggcgtcatccttcagttctccttcgacaacaactctgattccttgacgctcccattggttccgggcctcctcaagggcgcgtgcatgctcccgggcctttttggcttcctcctctgcccaagccctggttaagttaaagagcacaataacatcatgcacaatgaaataatatgcacaaaaatgatcaaatctcagatgtcaagaattcttcttgccttgccatagataacgccttcctctccacttcaagctcatactgaagttgcacaacagccgagttatcgctctcaatttccttttggagtttctcaatcctactcttctcgaacgacacctccaccttcttgctcagtacgttctgcagctgttcctctacctcactcctcaacttcaacagaacttccatttcagactcaacagcagctctgcccctgaccagaatattcttctcttcctctctttctgccctcaacctatctagctccaccctagcttcttcagctactttttcaagggtctctaccctttctctttcctccttaagctccctttcaaaacttgcattaagatctttctcgacctgagcaaccaatgcagcatgtgcatttacagctgcttcagctattttctctgcctcgatacgggcaacctcctccagaaccacttcgccagaatcaccagctgaaaatgctagggcagcttgtccctttgtcacaggtttgttcggttggaaaagtcttgtgaaaccttcaagacaagagctttagcgataaccctgaatccacaccaggaagatcaat

SEQ ID NO: 96749 - DNA, 627 bp, Zea Mays
ctcaagatccagcagaagtggagcaactgcgagaagaacttaggcgacaacaggatcaacaagctgcgtaacatgaatattatgctacacagattcaacaacagcaaacactcatacaacaactagaacaggcccaagggatgcacgtcccggtgcccccaccaccaccaccacctcccgttcattatccttggtcttcacctccacctacacctatatctccatctaccgaacatcagacccctccagctaccttgctgacgcatgaacgagaagacgggttagactttgtcgaaaccctcttcgctagtggtggtatcaaccatcactcgtcactgtaacccgatggtgaccggcgaccgtgagcttccatgttattgtgttctgatacttgagactttttattatgactatgtatgagatattgtctcttattagtactggatgatgagatgtgtctttattataactatggatgagacttttgtgatgtaattgatgagactatggatttaaatattgttttgtgattgtgtgtgagatgttttatgtgaaaatatgttgtgctatatagttgttgatatatttgttatgttgtggaatgtggtgtaaaataaaaataaacaa

SEQ ID NO: 96750 - DNA, 612 bp, Zea Mays
atgcatctcctcaagcagataatgaatgctcgtgaggctgtagcgaggaaaggcttccaaagtatactgcaaatgtctacagatggccttgttgttggttcgttaatgaattggttgatggataagcttgatccagttgacatgaccatactgcctggcctaggaaaggagctgaagataacaaaggagactgttcgtctaattcttgggttgcctagtgctgggggagggaaaccgtttatggattggtatggagaagttgatgctgctggcaggcttaggaaacaactcaaaatttcgaaggatgagtttgatattgccacccttcaggaaataattgttacaggtcgtgatgatgatctaaccattaggtgtttcttccttatcctattcaaccggctgttgttcccgacctcttcatggtcaatctccaacaatgaagttctaatgacagaagacatggaccgcttcccagacatcgattggtgtcagttagtatttaacgatttgtgtgaggctgctgcaaaatggcataaaaggaacactaatcatgtcaccgctacgatatataggtgttccatagtcattgtggtaattcctgtgatgccatag

SEQ ID NO: 96751 - DNA, 679 bp, Zea Mays
tctgctgctaaagtttcttagcatgcaccaagggcaaggcactcctgctcctcctaccaccgccagccacgcccgccgcatcgcccgccgcacccgggacagctgcgccgcagccctcgccaacactctatgctccctcctcctgggcctcctcctcatcgccgccgtcgtcgtcttcgttatctggctcggcctgcgcccacaccgcccgcgcttcaacatggcctccttctctgtggccggcggcctcgacccggactatagcccggccggcgccagcctctccttcaacgtcaccgaccgcaaccccaaccggcacattggcatctactacgacgccatgcacgcatccgtccacttctacgacgcgctcgtcgcctccggcccggccttcgccgacggttggtaccagcccaacaggaccaccacctcaatcacgggactcctcgacttcctcggccccgtcaccaccgacgcctcctggccctccttttccgccgcggttcgggccggccgcctgccgctgcgcctgcagctcaccacggccatccgcttcagggttgccaacgccttccactcaggccgccaaaagatgcatgtcagctgcaacctgttcgtcggcgccaacggccacctgctgccggactccgtcggggtcgcctgtgacagatacatctga

SEQ ID NO: 96752 - DNA, 659 bp, Zea Mays
ggcaagcaagggaaggagacagagaaacacatggcagcagcagcagtgaagtcgtcggccgggatggcggggaagaagtcccggaagccgtacgtggtgagcaggccgcgggagaagtggaccgccgacgagcacggccgcttcctccacgcgctgctgctgttcggccgcgactggaagagggtccaggcgttcgtcgccaccaagacgggcacgcagatacgcagccacgcccagaaacacttcctcagagcggacaagaagctgggcctcgccgtgccgccgcggcaccctcaccgctctgccgccggttgcccggcctggtgcgccgacgatggtggtaccctggcgccggacgtcgagacggttcagttccccctgtctccggacgacctgcgcctcgctcaggtgtacaggttcgtgggcgacgtcttgggctctagcgtcgaggcgcagctgcacaggctgctgggcgcggaccctgtcgtcgtggacaccgtcctacgggtgctggccaacctccaagacaacttggacattttgtaactgctgcttgaaagaatcacaagtaactgtctgaataattcttgaaacagacggtcgcttaatcttctgtagagcggcagcaaatctgacaatcagcattatctactgaaaca

SEQ ID NO: 96753 - DNA, 166 bp, Zea Mays
atgtgcactgctcttggaatatattctaagagttttgaaaagccttttcttgagtgcatttctgaatttgatgctacagaaaggtgttaaatatatacaacaatctgatattctagactacctgaagcatgtagagtcaaggttccaagaacatgaaaggtgtacg

SEQ ID NO: 96754 - DNA, 694 bp, Zea Mays
gtaatggagttcaatggaccgtttctccttccccactctcccccgttgcacttgttcaaatgagtttttgtattaacaaacgatatggtttcagatgattactcttggaggttcttctgaactggacttgttgattacatggacccattttcagaaggtgttgttttcagtgtgaggcctacaaagaaaagttggaaaaacatttccaatatatcttgtggtgagaagaaattatgggaaaaatgaatacagtgaagacatggccacacgcgcaagaacaatttgctttaaagttcttctccattagttttaaacatcaccatttggaaccagtttgctactaaatttgatcagtctgcagccgaagcagtagccagctgaacatgctgacatgttattgcgggtggtcaaggctcaggattcagagcagaagatgcacataaatactggtgaatgatgccatcggcgatgatgaattgatgaaacgatggatgatgccattgatgaaagatggaatggaactcaaattttggtggtcgcacaagtgtggagacatgaatttacatatacttagttaggctcaatgttagcacaaacagttgatgagcaagtttaaatttagagtacacttatgtatgagttatttgacaatgcttatttatgagatactgaatggtatttatctatattatat

SEQ ID NO: 96755 - DNA, 163 bp, Zea Mays
ggagcggactgcggagcttgcgggcgtgttattactgggaactgcggcgcggctacgcgcgcggagcaggagctcgggaggcggtgccggtgaggaggaggagttgggtcagctccatttcttggggagtggtgcgctcgttgtgctgttggcctctgcggtt

SEQ ID NO: 96756 - DNA, 651 bp, Zea Mays
atgtacatgatgtcctttttcgctattcctaaaggtattcttaaaaaactgaattacttccgctctcgattcttttggcaaggggatgagagcaagagaaaataccgccttgctagatggaatatcctatgccaacccaaagatcaagggggccttgggatccatgacctaagtatcaagaacacaactctcctaagtaaatggctattcaagcttctaacatcagatgacatttggcaacagcttctcaggaacaaatatctaggacctaaacctctagtccaggtgttgattggaaaaccggagactcatttttggtctagtctgatgaaggttaaacaagattttcttcgtttcggagtcttcaaaataaaaaatggatcaattatgagatttttggaagacgcctggtttgaaggacaaggattgaaatatcgataccttggcttatatagcattgcaacaaagaaattcataattattgcggaggcgctaacagatacaaaagcaattttttcttggagaagaacattatttgggactaggttagcgaagtggaacgaattacgctcatgtatcactaacattcagttatcacaagaggatgatacttttcattggagcctgacccaatccagtcagttctcggtg

SEQ ID NO: 96757 - DNA, 1235 bp, Zea Mays
gtggaaaccctttttttctgggaaaacaatgaaccatataccaccaacggaacacgggaacggcggaagcaaacaactagaaattccccagcccggttccttttcgtgcggtttgatctcgtcggaggcccggccgcagttccgccatcagccatcgaattcgatggcggccaacttcgggaacaagatccgcaacgccaagctggttcttcttggagatgtaggcgctggcaaatctagcttggttcttcggtttgtcaagggacagtttgttgaattccaggaatcaacaatcggagcagctttcttttcccagaccttagcggtaaatgatgagactgttaagtttgaaatctgggatactgctgggcaggagaggtatcatagcttggcccccatgtattataggggtgcagccgccgccattgttgtctatgacatcacaaatccggcctccttcacccgtgccaagaaatgggttcaagaacttcaagctcaaggaaatccgaatacaatagtggctcttgctggtaacaaggttgatatgctagatgcgaggcacgtggcagtagaggaagcaaagacgtatgcccaggagaacggtctcttcttcatggagacatctgctaaaactgcaatcaatgtgaatgacatattttatgagattgcaaagagattgcttcaagggcaagaggctccaagtccacaggctggaattgttctgaatcagagaccagatgagaggatggtcagcacttcctcgtgctgctcatgaagctgtgtttcaacctcatacatagttccgttatgaaatgtatcagaggagattaagcaaaatatcccatgtggtgtcggtgtcgtccaggctgatgttgtccccttctcctgctgctcgtttcttttcacatgtttgtgatgtaaatgcccatactagaatgtcaccaaagtgttgattatgctcttatcatttgattacgcccctctcaaatttgcgtaaatacaaggtgtaattttttaagtctttaactgggttactcctactgacttggtagagcatggtaaattcagctacagtatcattgctgcaggaaccaagaaaggaaaggtgccctgttaataatgtttcctttctaaatgtcgctttgccagtttccaaatttcctgacatggaacagtaattgtaattttgaggagtattgtattgtcattgtcgtgggtacttctgtattgtattg

SEQ ID NO: 96758 - DNA, 865 bp, Zea Mays
cctcttgtgagattagatcctaacatggcgtcaccatcaaataatgcactcatctatctctcatcaccatgtctgccttcccagtccgccatttcccactacaaatagcgagctgatcgatcgatctcaggagcacctagctcagagctagctagcaccagctacagccatggacgacacccgtggcctgctcatcggccaagcgcgagacgacgagcaggccaggaacgtcatggtggttggctccacgagtgctctggccgtggtgagggagtaccggagggggaattggacgctgccggagacgatgatgctgatcgaggccaagcaaaaggtgcacgaggagcggcacccgggggaccagggcctggcgcggtggcgctgggtcgaggactactgctggcgggccggctgccggcgcagccagaaccagtgcaacgaccgctgggacaacctcatgcgggactacaagaaggtgcgcgcgtacgagctcagcgccgctggggccaatgccgccgccgccggcagaccgctcagctactgggcgatgggcagggcggagaggaaggagaggggcctcccgaacaacctcctccgcgagatatacgacgccattgccgaggtcattgggaggaggacgagcatgggttgcgccgccggtgccgcgttcacggcgacgacggccagcttactcgacgtccccatgcaagcttccccgctcgctcaagtcctgccccgacctctcctggctttaggtactcgttccccagagtcaccggagagaaagaggaggcggccatcactggacgggctgcgtccagggaccagcacgtcgtcagcgcctggaacgcagggctataatcaa

SEQ ID NO: 96759 - DNA, 103 bp, Zea Mays
ctcccgaccgcaacgcaagcgtcaaaccaaataaattctactgtcctagttgtgaatgttttccacaaaattccaaatccccaaaacaacaaccggatgaggg

SEQ ID NO: 96760 - DNA, 180 bp, Zea Mays
atggaaagaattggtaaccaactaggccagcagttcctaggaagattatcttcaatatccatccaaatttcttctcaacttcttcctctagtgccctgtcatctctctcgtcgtaggtgcagagccttcgagccaagcggagccctgggccgctaccactccatccgttggccgctacct

SEQ ID NO: 96761 - DNA, 1894 bp, Zea Mays
aaccatcaatgctgcaatgaagcccaaagaagaaaaagaagtttgtatggagatagccaagtttttctatggttgtggcatacccttcaatgctgccaactcaagacaatttgaggtagctgtagaggccattgcacagtatggtacggggttcaaaccccctagtttccatgagctacgagaacctttactcgcgaaggttgtcaaagagatatacggtgagaagaagcatgaggatgcatggagtcaatatggttgcaccctcatgtcagatggatggagacaggaggggtcgacatttgatcaacttcctagttaacagccctgaaggtacattctttttagaatcagtggatgcatcgagtgagtctcatgatgcgttgatgcttgcagagctactagataagagaattgagcagattggcagggataaggtcatacaggttgtaactgacaatggtgccaactacaaggctgcagggcgcattttggttcagaacactcctaccttgttttggaccccttgtgctgctcactgcttagaccttatgctggaggacataggaaaactaaaggattttaagaagcctattgcacgtgctcgtcatgtcacaacattcatatatagacatgggaggattctaagtgagatgagggtgcatacaaaaggtatggatcttgtgaggcctgctgctactagatttgctactgcattcctcaccttgaggagtatacataagcacaaggatccattgagagtattattttctggtgatgttttcactcgctccaaagtatctaaaacagaagcagggaaaaaagtatatagcattgttttctcaacagagttttggcattcagtagagccttagagcttctttaccactacttgttgtgctcagattggttgacggtgatgagaagccagccatgcctgaggtggcagcagctatgaagatagcaaagcaaaagattacttcatcattctctattcaaagcaagaaagcttgtctaaaccgcatcatgaaaattgttgacaaccgttgggtgaaacaaatggacactccgttgtatggagcagcactctacttgaaccctgggaaattctatagcatgaagcaaagtgatgatgaaggctatgttggagagctaaggggttgcttcaatgatgtacttgttaaaatggtgctagatgaggaccttagagacaaaattgatgctcaggcagtcctttatgagaaccaaagagaagcatttgcaaacccaatggctattaaaaatgctcaaacaagaaacccacttgattggtggcttgcatatggtggtcgaaccattgagttatataagtttgcaagacgaattgttagtctttgtgcttcatcatccggttgtgagcggaattggagcaagtttgaatttatgcataccaagaaaaggaacaggctagagcacaaaagactgaatgatttagtgtatgtttcatacaatagaaagatggccgctaggttccaaaaaatgcgtgaagaagggaagaactttgatcctttggttcttgaagattttgattaggacaatgagtgggttgatccattagctaattcatctgttgttggggatgaccctcttttcacatgggagcttgttgatcatgccatcggtgcatctacacaacttcaaggccgctactttcctaggagagctcatggtactcaagtgccaattcttgaggatggtgaagatggtgttgatgagggtgatgagaatgaagacgatgacaattttgtgcttgacgaccttgatatggatgatgaagaagaaacaaacaacagtggtggccctggtgatgagcaagacaaggatgatgttggttctatgatttggatgatggctattg

SEQ ID NO: 96762 - DNA, 206 bp, Zea Mays
ctgccattccatgttctgctcattccgtgttctgcctttccgaatccctcctccccgcgcacagtccattcccatgttctgctatcattctatatctatcattctcattctccctccccattcccatgttctgccaccattctatatctatcattctcattctccctccccgcaaagctcattcccattctcattccctcgtacag

SEQ ID NO: 96763 - DNA, 112 bp, Zea Mays
ggaaaatgtcactctgttggggtgaccaactcactaaaccaaatttcatttaataacatgtccatgcactattactctttgcgtatatgtaaaggtagagaagaacaaaatc

SEQ ID NO: 96764 - DNA, 1338 bp, Zea Mays
atggagttccaacaaattaaattctggaggcaaaccttaacacaacgccgcatatctatcgggcacgaactctgtcatttaaaagatcccagccacctagcgctgcctacaaattgccctaaaactggaatccctctaacaaaagcaccaagatgtgcagaaaaagagaatccatatttgctggagcatgcacttgactcgatacttgaaagaggagagatccctgatgtacagttgattactgaatcgatatgccagtctattgctcatagagattatggaaggacgctgcagctcttgaatattatgacccaggcctcaataaaaattaaagaagtcgagtgggattacctactacagcaaaatatgcatcaattcagcattgatgccctcgagggccttataaagtatctcagtactaatggtactaccaatgctgatcctgcagttgatttagtaagagcactgcagtcccaatgccgggacgataccagtactcaacagtttgaactctcttttcatggaagtggaaacaaatattcatgtagcagtctggcagaactagatcagctcacttgcaagaacttgtgcactgatataattcttgacgtccctggttctgatagagagatgcctcagttaggtgtcagtgctctcatgtgcagggacatctcattaaacggtcaacgagtggaaaacaaacatgagctttctgatcttgggcagaggggtccacaggtatctgcaattgacaaagtacttgattccatgaattcttatggtgacaattcgtatggggagatgccatcagcttcaaaaattcttgagctgtgggagcatgagaggtaaatgacatgtttgctccaaaaacagaaaattagaggataaatgaaatgctagcagatattatttgatatatgggcagtgcaatccttgtataaattactgacaaatgctgtaaatttgaaggcccctaagttggttcgtgggatctctgctgcaatcgtgttgcctaaaattattatcagaaggctcttatttgtgtgatctcattgtccatactacggaaaaaacagggaatatatagaagctctgagctcttggaagataaatttatgcattgacactgtttctctatttatagcgtctctcaaccctcacccaaccaccatctccatcgccaatgcatgggtctgggggcttttctgcgatcagcacctccttataaggacgacgtgatccactgctagccaaagaagcagcagatgaagtgttaaggccttcgtcttcacaccatcgctgatacttcaagcgacatccaagaaaagcattagatgg

SEQ ID NO: 96765 - DNA, 2988 bp, Zea Mays
atggcagtctcctccccgccgcctcctcgattgcacctctccctccatcttcgaaagcctatccagaactcgccgcctagcggcaaaaaggcacgccccgctccgacagccgagacgctccgccgccggttcctccgccggggcgtctcgccgacccccaagatcctccacaccctccgcaagaaggaggcgcttaaggccctccgccgcgcaaggaaggacacggccgcagccgctactgcgtcacgcaatccgtgcgacgaggaggagacccgcttccgtgcggccgccgcggagtaccacgcgctcgcgggacggccatgggacgccggcacccgcggcatggcgcccccgcgcggtttggacggggaggagggcgggctcgagggcctgagggagatgctcgcggcgaggaggggcgacgggttccgttggctactggatgacgacatcgaggctgaggcagcggagaggaagcaacagaggcgtccgggcgccggctgggatgtggggaccgaggacgaggagaggaggattcagttgctagtcagcaggttaaacggagattacctaagttttcgtgattggaggcttactagagtgatgaaaagggctgacatcatatatagtgaagataatctactgagaatactagatgggcttgaggcacgaggaaactggaggcaggctttatctattattgagtgggtgtacaatgaaaatagctataggcatcggaaaagcaggtttgtgtatacaaaattactctcaatccttgggaaatcattaagagcaactgaagcacttcacattttcaccatcatgcggggagatgctcaaatataccctgatatgcctgcataccattgtattgctgttactcttggtcgagctggtcttctgaaggagttaatcaagattattgagtatatgagacagaagccctcaaaactagtaatgaagatgcggcgcaaggattgggatccttcattggagcctgatgtacttgtttataactcggtgctcaatgcatgtgttctgtcacagcagtggaaaggtgtattttgggtgttccagcaaatgagaattggtggtttaccacctacaggagcaacatatgggttggccatggaagttatgttgaaagccaagaagtatgactttgtccagaagttctatgagaagatgcagaaaaatggcgtaccaccaagagcaataacttacaaagtgcttgtaagatctttttgggagcaggataaaattaatgaagctgttgaagcagtcaatgacatggaacaaagaggagttgttggagcagcaagtgtttactatgaattagcttgctgtctctgcaataatggaaggtggagagatgctatgttacaggttgagaagctgaaacagcttcccctcacgaaaccactggagtacgcatttactggaatgatcttagcctcatttaatggtggatatatctatgattgcatctcaatatttgaattaatgaaggaccactgcatgccaaatattgggactgtgaatgtcatgttaaaagtttatggacattgtgatatgtttgggaaggcaaaggacttgtttgaaaccaccaaggcttgtttcttaaattctcagacatatatccacgagcattcgtcattcaaagcagacacatatacatacaactctatgcttgaagcatctgcctctgcccaacagtgggaatacttcgaatatgtgtatagagagatggctctgtctcatcactgtctagatcaaagcaaatattcatggttgctcatcaaggcatgcagagctggaaagccatatttgctggagcatgcacttgactcgatacttgaaagaggagagatccctgatgtacagttgattactgaatcgatatgccagtctattgctcatagagattatggaaggacgctgcagctcttgaatattatgacccaggcctcaataaaaattaaagaagtcgagtgggattacctactacagcaaaatatgcatcaattcagcattgatgccctcgagggccttataaagtatctcagtactaatggtactaccaatgctgatcctgcagttgatttagtaagagcactgcagtcccaatgccgggacgataccagtactcaacagtttgaactctcttttcatggaagtggaaacaaatattcatgtagcagtctggcagaactagatcagctcacttgcaagaacttgtgcactgatataattcttgacgtccctggttctgatagagagatgcctcagttaggtgtcagtgctctcatgtgcagggacatctcattaaacggtcaacgagtggaaaacaaacatgagctttctgatcttgggcagaggggtccacaggtatctgcaattgacaaagtacttgattccatgaattcttatggtgacaattcgtatggggagatgccatcagcttcaaaaattcttgagctgtgggagcatgagaggtaaatgacatgtttgctccaaaaacagaaaattagaggataaatgaaatgctagcagatattatttgatatatgggcagtgcaatccttgtataaattactgacaaatgctgtaaatttgaaggcccctaagttggttcgtgggatctctgctgcaatcgtgttgcctaaaattattatcagaaggctcttatttgtgtgatctcattgtccatactacggaaaaaacagggaatatatagaagctctgagctcttggaagataaatttatgcattgacactgtttctctatttatagcgtctctcaaccctcacccaaccaccatctccatcgccaatgcatgggtctgggggcttttctgcgatcagcacctccttataaggacgacgtgatccactgctagccaaagaagcagcagatgaagtgttaaggccttcgtcttcacaccatcgctgatacttcaagcgacatccaagaaaagcattagatgg

SEQ ID NO: 96766 - DNA, 1980 bp, Zea Mays
atggcagtctcctccccgccgcctcctcgattgcacctctccctccatcttcgaaagcctatccagaactcgccgcctagcggcaaaaaggcacgccccgctccgacagccgagacgctccgccgccggttcctccgccggggcgtctcgccgacccccaagatcctccacaccctccgcaagaaggaggcgcttaaggccctccgccgcgcaaggaaggacacggccgcagccgctactgcgtcacgcaatccgtgcgacgaggaggagacccgcttccgtgcggccgccgcggagtaccacgcgctcgcgggacggccatgggacgccggcacccgcggcatggcgcccccgcgcggtttggacggggaggagggcgggctcgagggcctgagggagatgctcgcggcgaggaggggcgacgggttccgttggctactggatgacgacatcgaggctgaggcagcggagaggaagcaacagaggcgtccgggcgccggctgggatgtggggaccgaggacgaggagaggaggattcagttgctagtcagcagaacatccatccaactggtattggagtcaaatgatccaaccttgccgcagcctgaagatcgaatatctggtgtcgagaagggcttggctgggttacaaccaaattgcgggccaccatggaacaaaaagaggttaaacggagattacctaagttttcgtgattggaggcttactagagtgatgaaaagggctgacatcatatatagtgaagataatctactgagaatactagatgggcttgaggcacgaggaaactggaggcaggctttatctattattgagtgggtgtacaatgaaaatagctataggcatcggaaaagcaggtttgtgtatacaaaattactctcaatccttgggaaatcattaagagcaactgaagcacttcacattttcaccatcatgcggggagatgctcaaatataccctgatatgcctgcataccattgtattgctgttactcttggtcgagctggtcttctgaaggagttaatcaagattattgagtatatgagacagaagccctcaaaactagtaatgaagatgcggcgcaaggattgggatccttcattggagcctgatgtacttgtttataactcggtgctcaatgcatgtgttctgtcacagcagtggaaaggtgtattttgggtgttccagcaaatgagaattggtggtttaccacctacaggagcaacatatgggttggccatggaagttatgttgaaagccaagaagtatgactttgtccagaagttctatgagaagatgcagaaaaatggcgtaccaccaagagcaataacttacaaagtgcttgtaagatctttttgggagcaggataaaattaatgaagctgttgaagcagtcaatgacatggaacaaagaggagttgttggagcagcaagtgtttactatgaattagcttgctgtctctgcaataatggaaggtggagagatgctatgttacaggttgagaagctgaaacagcttcccctcacgaaaccactggagtacgcatttactggaatgatcttagcctcatttaatggtggatatatctatgattgcatctcaatatttgaattaatgaaggaccactgcatgccaaatattgggactgtgaatgtcatgttaaaagtttatggacattgtgatatgtttgggaaggcaaaggacttgtttgaaaccaccaaggcttgtttcttaaattctcagacatatatccacgagcattcgtcattcaaagcagacacatatacatacaactctatgcttgaagcatctgcctctgcccaacagtgggaatacttcgaatatgtgtatagagagatggctctgtctcatcactgtctagatcaaagcaaatattcatggttgctcatcaaggcatgcagagctggaaaggttcgtgtccgtgctttgccacagaaataa

SEQ ID NO: 96767 - DNA, 3799 bp, Zea Mays
caccctctggcttgccgttaatttctttcccgtttcactcctcgcgtttttacacttggcccccaatccaatccccgccaggccgccatgccgacgccggtgcccgccgcgcgccagtgcctctccccgcccgccgtcacggccctcgacgccgccgtcgcctccgcgcgccgacgggcccacgcgcagaccacctcccttcacctcatcgcctcgctcctcgcccccaccgccgcgccgctgctccgcgacgcgctcgcccgcgcccgcagcgccgcctactccccgcgcctccagctcaaggcgctcgacctctgcttcgccgtctccctcgaccgcctcccgtccacccccacctccgcctccacccccacctcacacgagccccccgtcgccaactccctcatggccgccatcaagcgctcgcaggccaaccagcgccggaacccggacacgttccacttctatcaccatcaggcggcgcccacctcccccaacgccatcaaggtcgacctctcccaccttgtcctcgccatcctcgacgacccgctcgtcagccgcgtcttcgccgacgcgggattccgcagcaacgagatcaaggtcgccatcctccgccccgcgccgcccgtcccgctgctcggccgcctccccacgcgcgcgcgcccgccgccgctcttcctctgcagctttgccgccgcggacgacgccgacgtcccctcgcccgcgcccgccctcgcgggggccgcaccgggggaggacaactgccgccgcatcaccgacatcctcgcccgcggacgcaaccccatgctcgtcggcgtcggggccgcctccgcagccgcagatttcgccaaggcgtccccgtaccgcatcgtccccatcggccccgcctctgccaataatcaggcggcaccgacgacgcccacctctggccttatcttcagcatcggtgatctcaaggacctggtgcccgacgaggccgacctgcaggacgcggctcgccgggtggtggcggaggtcacgcgcctgctcgagacgcacagacctgctgcccgccaaacccaaacggtctgggtcatgggctggtccgccacctacgagacctacctcgccttcctttccaagttcccactcgtcgacaaggactgggaactccagctgctgccgatcaccgccgtgcgcgacgccggccctgcagcgggactcgtgcctcctcctccagctccagccaccacggtcgctgccttgtccatgcctgccactacaagcttcgcggagtcatttgttccttttggaggtcttttgtgcgatacctatgaagcaaatagtctcacaacaaatttctgccctcaggctctacgatgtcaacattgcaacgatagatatgagcaagaagttgcctctatcattagaggaagtggcgttacagctgatgctcaccaagaaggtctaccttctctgttgcagaatggcggcatgatgggttctaacaatgagtttgatgcagtcaaggttagagatgatcaaatggtattgagtacaaaaatattgaatctagagaagaagtggaatgagtactgtgtacgtctccatcaaggttgcaatagaatcaacagagatccttgccagttatttccacatcacattggtgttcgagttgacagggaaagatgtgcaaatccaaaccaaagcgcacagacaattgcacttcagagggatattattaaaccttgtgcattgtcttctccatacaccaatataactgcaaagagtatttcagcaccagaccaaataaatgcagaccttgtactaaaccttcaagtgaggcagtcgaggagtaatgaaccccttcaaagtggggttgtgccattccaacatatcaactcatcaaattataacaaacccgaagaatcatctgctgcacctgtgacaactgatttagtgttggccacccctcgtggatcttccttcaaggattcaagtagtgccctgtgtaaacgtgtagaggacattgaagagacaatccagctgatgcctaacaaggttgacgatctgaatcttaaacctcctcacttgtctatacaaccttacacttgctccaagagttcctcatcaaattgggagcaaacatcacctagtgctctgcattcaacatctttaggaggcacttctgcctttggccaatggcagaggccttcaccgctcgcaacacaaagttttgatttgagcaattacaagctacttatggaacacctgtttaaggttgttgggaggcaggaggaagcattgagtgctatttgtgcatccattgtgcggtgcaggtcgatggagaggcgtcgtggtgcaaacaaaaagaacgacatatggtttagtttttatggccctgacagcattgccaagcggagagttggtgtggcacttgctgagctaatgcatggtagctcagggaacttgatatatctggacctaagcctcaatgattggggtaaccctagtttcagaggaaagcgtgccaccgactgtatctttgaagagctgagaaagaagcggcgatcggttatcttccttgacaatattgacaaagccgattgccttgttcaggagagcctgattcatgcaatggagactggtaggtacaaggacttgcatgggggacgagtgactgatcttaatgactcgattgtggtgttgtctacaagaatgatccaaggatgccaggatgcttctcttggggtggaagagggcaatgctttttcagaagaaaaggctgtggcagctcgtgggcatcaactgaagatcatagttgagccgggcacaaccaacatcggtggaggcaacgttgtagtttcgtcaaggcattccttgggaagcagtgaagcctcaagttattccagtaagcggaagctccacatctctgatgggcaagaaaagacagaagaatcggcaagcacttcaaagcgactgcatagaacatcaagcatcccattcgacttgaacctcccaggcgacgatgaggaagcccatgatgatggtgatgatgacaagagcagtggcagccacgaaaactatctagagggatctgtcggaaacctcttgcgttgggtggatggttcaatcaatttcaagccatttgactttggcaagctttgtgaggacatcctgcaggagttcagcaatactaccagcaaaattctgggcaccagggggtgcaggctggagatcgacgctggggctatggagcaggtagtggcagcggcatgggcatccgattcgcatgagaatgagaagaggcctgtgcggacgtgggtggagcaggtgtttggcaggagccttgagcaggtcaagatgaggtgtgagaatctgagcagctgtaccctgagactggtttcctgtgaggtgaaagaagatggttttggagctttgcttccctcgagaataattctggattggtgatggtgatatgtgtcgtttgcattattgctgctagctatctagctgtaagtattggttagttagctgacaccacccaccgtactgtagcatatataggttcatatcattatttggtggcttcaaaataatgtaattaagctggagtatgtacgtacggtagtctagcaattaaactactcgttcaagtccatgacctggggatggatggctgtatttattgttgctcctgcgtgtatatatatatttgtaagaccgacgtgatggccttttcatgtggaattccatatactgatgtcatttaactgtctgtgcaagacaattgcataattcacaagtatggaaagcaaaa

SEQ ID NO: 96768 - DNA, 1632 bp, Zea Mays
gcagatggccaacgcaattcaccagtagtagtagttgtagcggcataactagctatggctaccaccatggcggctaacgacccgacgagcatccgcgtggttagccgccggctggtgaaggcctccgacgcttccatccagcctcatgtcatgtccctctccaacctcgacctctacgtctgcgactcacagctcggcacgctgtgcgtctaccccaacgccggcggcggcttcagcgcgcgcatccccagcctgttcgagtccctcttgccgtccttgctcaattacctctacccattcgccggccgcctcgtcaccaacccaagctccggcctccccgagctccactgccacaaccaaggcgcagagctcgtggtcggcgaggtcggcgtcgccctggggagcctcaactacggcgcgaccaaggattccgtcaagaagatggtgctcccgttccccagggacgtccttctgtcggtgcagctgctctccttcgcgtgcgggggcttctccgtcatgtggtggatcaaccacctcgtcggcgacggccacgtgggcgccacgatcgtcaggacgtggtcccagctcgcgcggaccggggacatcggcggtgcgcccccgctcaactacgaccgctccgtgttccgcccgcgcagcccgccgtcgtacagcgactccgtcgcggccaccttcacaacgttcgacgagcagcgcctgcccaacgccctcacggcggaggccagcttcgtggaccgcgtctactacgtggaggcgagcgacatcgccgcgctgcgcgacacggcggcggcggccaccacggcccagcgcccgacccgcgtcgaggcgctgtccgcctacctgtggaaggcgctcgccgacgtcgtggccgcgtgcccccggagcaacaaggagcgctgccgcatgggttggtgggtcagcgcgcggcgccgtgtcacggcgcctaagctcgtcgctttgatgcccggctacctggggaacgtgacgacctacgccctgggcgacgcgccggcggaggagatcgtgcggaagcctctggcggaggtggcggccatggtgcgggacgccatcacgtcggtggactacgacgagtacctccaggagatggtggactgggtggaggtgcacaagacggaaggcctgatggaggcggccgtcatcggagtcggcgcgcccacgctgaaccagtcggtgatgaccacgttcccgctcgacaccgacttcggcttcggccaggctactctggcaaccacggtctctgactatggcaggctttgctcggctttcctttcggtcggagcgcggccgggaggcgacggctcctggctcgtcaccgcctacatatggccgcagctggcggcggcgctggagtccgacggcatcttcaagcttctcacggcggagtacctcggtctagctatgtgagcaactgaacggaacacagttagctcgacggatcgatcatatatgtgttttctttcttttgattcgaatcgatgcatgatgtgcttcctttgtttttctgtcagcttttgtacctgtacgccagcagatgagactctggtctttgggatattatatatctgctaaataaagatgggctcgacatatata

SEQ ID NO: 96769 - DNA, 125 bp, Zea Mays
taataatattgtgcaaaatgacatgtccacaaccacattaccacaataacacaagttcaactaatagcaagtcgacaattgcaaacaaagtggaatgagatgtctaatagtccacaatcacaaac

SEQ ID NO: 96770 - DNA, 5731 bp, Zea Mays
tgtgtcccctccccccctcagatcagatctctccctctccttctcccggccccgagtggagctgtggaggcacctcgcatcaccgccttcgtctctccagactagccgagagagatctcgacaccgccgcccgttgccatggcggcggccaacgcccccatcgccatgcgcgaggcgctcacgctcaccagcctgggcatcgcgccgcagtttgtcacgtttacccatgtcaccatggagtcggagaagtacatctgcgtccgcgagacctcgccgcagaacagcgtcgtcatcatcgacatggccatgcctatgcagccgctccgccgccctatcaccgccgactccgccctcatgaaccccgacgccaggatcctcgcgctcaaagcccaaatacctggaacaacacaggatcaccttcaaatatttaacatcgaggctaagactaagatcaagtctcaccaaatgcccgaacaggttgtattttggaagtggatcactcccaaattgttgggtttagtgacacaaacatctgtttaccactggtcgattgaaggtgattctgagcccaccaagatgtttgataggacagctaacttggcaaacaatcaaatcatcaactatcgatgtgacccagcggagaagtggcttgtgcttattggaattgcaccgggagccccagagagaccacaactggtgaagggaaatatgcaacttttttctgtcgatcaacagcgtagccaggcgcttgaagcccatgcagcatcttttgcaacatttaaggttgttggtaatgagaacccatcaacccttatttgttttgcctcaaagacaactaatgctggacagatcacttcaaagttgcatgttattgaactgggtgcccagccagggaaacctggcttttctaagaaacaagcggaccttttcttcccaccagatttccaggatgattttcccgtagctatgcaggtttcacaaaagtatgggcttatctatgtaattacaaagcttggccttttgtttgtatatgacttggaaactgctgctgcagtttacagaaatagaatcagtccagaccctatattcttgacagcagaatcttcctctactggtggattttatgccatcaacagaagagggcaggttttacatgccacggttaatgatgcaactgttgtaccatttgttagcggccagctgaacaaccttgagcttgctgttaatcttgccaagagagcaaatcttcctggtgcagagaacttggttgtgcaaaggttccaggaactgtttgcgcaaacaaaatacaaggaagcagctgagctggctgcagagtctccgcagggcctcttgaggactcctgaaactgttgcgaaatttcagagtgttcctgtgcaagctgggcaaacacccccactcttgcagtactttggcacattgctaactcgagggaagctcaatgcctttgagtctcttgagctatctcgacttgttgtcaatcagaacaaaaagaaccttctggaaaactggttggctgaagacaaactggagtgcagtgaagaactaggagatcttgtcaagactgtggacaatgatcttgcactgaaaatatacatcaaggccagggcaacccctaaagttgttgctgcttttgctgaaaggagggagtttgacaaaatacttatatattcaaagcaggttggatacaccccagattatctcttcctcctgcaaaccattttgcggacagatccacagggagctgtcaactttgcattgatgatgtcacaaatggagggaggttgtccagtagactacaacactatcactgatctcttccttcagagaaatatgatacgggaggctacagcttttctgctggatgttctgaagccaaacttgccggatcatgcttttcttcaaaccaaggttttggagatcaacttagtgacttacccaaatgttgcagatgccattcttgcgaatggtatgttcagtcattatgaccgtcctcgtattgctcagctctgtgaaaaggctggattatacttgcgtgccctccagcattattcagagttgcctgatatcaagcgtgtcattgtaaatactcatgccattgagccccaggcacttgttgagttctttggcaccctttcaagggagtgggcactagagtgcatgaaggaccttctactggtaaatctgaggggaaatcttcagattgttgtgcaggctgcgaaagaatattctgaacaactaggagttgatgcttgcataaaattatttgaacaattcaaatcttatgagggcctctactttttcttgggatcctatttgagctccagtgaggatccagatatccatttcaaatacatagaagcagctgcaagaactggacagatcaaagaagttgagcgtgtaaccagagagtctaatttctatgatgcggagaagacaaagaactttttgatggaagcaaagctacctgatgcccgcccactgattaatgtttgtgaccgctttggatttgttccagatctgactcactatctatatacaaacaatatgcttcggtatattgagggctatgtacaaaaagtcaatcctggtaatgctcccttggtagttgggcaacttctggatgatgaatgcccggaagatttcatcaagggtttgattctctctgttcgttctctgcttcctgttgagccactagttgatgaatgcgagaagaggaaccgcctacggttgcttactcaattcttggagcatctagtgagtgaaggtagccaagatgtgcatgtccacaatgctcttgggaaaatcatcatcgacagcaacaataaccctgagcatttccttactaccaacccattttatgactctcgtgttgtgggcaaatactgtgaaaagcgagatcctacacttgctgttgttgcttatagacgtgggcaatgtgacgacgagcttattaatgtcactaacaaaaactcattgttcaagctacaagctagatatgtggttgagagaatggatggtgatctgtgggataaagttcttcagcctgagaatgaatatagaaggcaactcattgaccaagtggtttcgaccgcattgcctgaaagcaagagccccgagcaagtctctgctgctgttaaggcattcatgactgctgaccttcctcacgaattgattgagcttcttgaaaagattgttcttcagaattctgcattcagtggaaacttcaacctgcagaacctactcatcctgaccgccatcaaggcggatccatccagagtcatggactatgttaacagactagacaattttgatgggcctgctgttggtgaagttgctgtcgaggcacagctgtacgaggaggcttttgctatatttaagaagttcaacttaaatgtgcaggctgttgatgttctcttggataacatccgaagcatagacagggctgaggagtttgccttccgtgttgaagaagatgctgtttggagccaggttgctaaagcccagttacgtgaaggtctggtcagtgaagcaattgagtccttcattcgtgcagatgatgcagcacacttccttgatgtcatccgtgcggctgaggaagccaatgtgtacaatgatttagtgaagtaccttctgatggtaaggcaaaaggcacgggaacctaaagtcgacggagaactcatctttgcatacgctaagattgacagactcagtgacattgaagaattcatacttatgccaaatgttgccaaccttcaaaatgttggtgaccgtctatatgatgaagaactatatgaagctgcaaagatcatatatgctttcatctcaaactgggctaagctggctgttaccctggttaagctgaagcagtaccaaggtgctgtggatgctgctcgcaaggctaacagtgctaaaacatggaaggaggtctgctttgcttgtgttgacgcggaggagttccgtcttgcacaaatatgtggtctcaatattattgttcaggttgacgacctggaagaagtcagtgagtactaccagaacagaggatgcttcagtgaacttattgctctcatggagagtggtcttggacttgaacgtgcacacatgggcatcttcacagaattgggagttctatatgctagataccgctctgagaagcttatggagcacatcaaacttttctccacccggctcaacattcctaagcttattcgagcttgtgacgaacagcagcactggaaagaacttacctacctgtacatacagtatgatgaatttgacaatgctgccaccacaattatgaaccactctccagatgcatgggatcacatgcagttcaaggatgtctgcgttaaagttgcaattgtcgagctatattacaaggcagttcacttttatctgcaagagcatcctgatctcatcaatgatatgctaaacgtgcttgcacttcgtttagatcacaccatagttgtagacataatgcgcaaggctggtcagttgcatcttgtgaaaccatatatggttgcagttcagagtaacaatgtatctgccgtgaatgaagccttgaatgagctttatgtcgaagaggaggactacgagagactccgtgaatcagttgacatgcatgacaactttgaccagattggtcttgcccagaagcttgagaagcatgaattgctggagatgaggaggatcgccgcctacatttacaagaaggctggcaggtggaagcagtcgattgctctatcgaagaaagacaacatgtacaaggactgcatggagacatgctcacaatctggcgaccgtgaactgtcagaggacttgctcgtgtatttcattgagcagggtaagaaagaatgttttgcttcttgcctcttcatttgctacgacctgatccggccagatgtggctcttgagcttgcatggatgaacaacatggtggactttgccttcccgtacctgttgcagttcattcgtgaatacactagcaaggtggatgatttagtgaaggacaagatcgagtcgcagaaggaagaaagagccaaggagaaggaggagaaagaccttgtggctcagcagaacatgtatgcgcagctgcttcctctcgctttgccggcgccgccaatgcctggcatgggtggtcctccacctccgatgggtggaatgggcatgcctcccatgggcgggatgggtatgccgccgatgggccctggtccgatgccagcattcggaatgggaggctactgagtggtggttttgcagggagcttagatgatgatgtgaattgttccattgcaagcataagtggaacctcattggagctgtagatggttttacagtttgggaaatcaatattctttattgtaccaggaaacttttttttgggcgagtgagtgaaatcagcctgacccatagtttgagaagcgcaacctgtgatatgttttacgatgggatcggaaataggatgattaggttgtttcagcatgagctgttaaaagctggtaccatgtgtatgtatagtggtgtgataaaatcttttgcgtgtcggcagagtgaagatagacaaatgtatgtttccttgttacgacctgttaatctatatattagcccgacttgtagttcaaatgccctacattattttcttctagctcctccaacttgtagttcaatcggtaatactatatttattaataaattcaatggatatgttctctat

SEQ ID NO: 96771 - DNA, 231 bp, Zea Mays
atggcacatggaaaactccacaaaaggcaaaaggcgtccaacccagcacggcagataaacaacaggtctctcacgcgttacatacaggacagcacagtccaccttaaacttatgcagctggtagctctgaagctctcccaagattccaagaagcaaatgaccctctatctagctccttgtgtagctgctgcatcttcagtcagtcagtcagtcagcacacttggcacctga

SEQ ID NO: 96772 - DNA, 2739 bp, Zea Mays
gggatcgggagtggcgccctgacggttaccgcggcgcaagaagcaaaactcgtcgcggtggaacggggtgatggtcctccgggcaaagacttcctccttgatacaatcagcttcaagagcaggagcatggatgcccccgcaccaactcgccatttcctccgccgcgacaaggccctcctccactctctccgccgcagtcgccaggtgcagcagagctgcggccatcacggaccccttcgccatcgcggacgccctctccgccgccagttccgccccggcgtcgcagtccctgtccaccggatcgcagctccacgcgtccggcataaagctgggcgtcgttttcgccgacacctacacctcgaaccagctcctcatccactactccaagcgcgggcaactcgccagcgcgctggacgtgttcgacgaaacgccgagccgcaaccacgtcacctggacggctattgtgtccgccgcggcgcgcggcggggcgcctggcctgggcctgcggctcttcgcctccatgctcaggagcgggttctgccccaacgagttcgctctggctagcgcgctcggcgcttgctgccagtgggtggcggctgacgtgaagctgggcctctcccttcacggcctcgccgtcagggccgtcctgcatggaaacccttacgtggggagctcgctgatgctggtgtatgccaagcacgggcgtgtcgctgctgcggagcgagtgttcgcaggcatagcttccggttccagagacgtggcgtgctggaacgcgatgctggagggctacgtcgccaacggccatgggtatgacgcgacgaggacggtggccctgatgcatggatctggaatagcgcctgacatgttcacctacatttcggctgcgaaggcttcttggatcgcccgcgacttgtatttcgggcggcaggtccatggtctcgtcgtccgcagcgtgttggagtccaacaacacctcagtgatgaacgcactcatggatatgtatttcaaagcgggacagaaggaaaccgctgctgatatctttggcaagattcggtggaaggatactgtttcttggaacacgatgatatcaggcctggaggacgagagggcagctgcggactgctttgtcgacatggcacggtgcggctgcaggtctaaccaagttacgttctctgtcatgctgaggctgagtggcgcctccctcggccttcagatcttcggacttgcctaccgccatggctactctgacaacgttcttgtggcgaacgcagccatcaacatgctctcgcggtgtgggctgctcagctgtgcctatggctacttctgtgatctcggtgtccggaacgtcgtgacgtggaacgagatgatcgcgggctatggtctgcacggctgttctggagacgcgatgaggctcttccgcagcttggtttgcttcggagcaagaccggacgagttcacctatccagccgttctgtctgccttccaacaggaccatgatgcaaggaaccatgagcaagtccacgcaagtgttctgaaacaggggttcgcttcatgccagttcgtgtccacctcgctcatcaaagcaaaagcggcccttggctcctcagttctaggtccactgaagatcatccaggatgctggcgagatggatttggtgtcatggggagtcgccatctctgcgttcgtgaagcatggcttgggtcaagaggcactgtctctcttcaactcgtgcagagttgactgcccagagaagcctgatgagttcatcctgggcaccatcctgaatgcatgtgcaaacgccgcgttgataaggcagtgcagatgcatccattcgctcgttgtcaggacaggacacagcaagcacttgtgcgtgtccagtgctttggttgatgcctatgcgaaatgcggtgacatcactgctgccaaaggcgctttcgctacggtttcgaccaaggacgccatagtgtacaacaccatgctgacagcttatgccaaccatggtctgatccgtgaagtcctcagcctctaccaagagatgactcagcttcagttggcggctccaacaccagctacgttcgttgctgccatatcagcttgcagccacctcgggctagtggagcaggggaagcttctgttcagctccatgctgtctgcgcacggcatgaatcccacaagggccaattacgcatgcctgattgacctcctggcgcgaagagggctcctggaagaagcaacaggcgttatccaggcaatgccgttccaaccgtggcctgcagtatggaggtcactgatgaacggttgccggatccatgggaacaaagaactcggtctgcttgcttcggaacagatcctgaggatggcaccaaacagtgacggcgcatatgtgtcgctgtcgcatgtctacgctgaagatggagattggcggtctgcagaggacgccaggaggaagatggctgagaatcaagtgcacaaggcgcaaggttacagcagtcttcagatctagccattcagttttgtgttcgcagtgaatgtaaagtgtgaaatgctctctctcttttttttgccgggcatttccccaaaaaaaaaaatccacacacaattactcctaaaaataggtttgggcatttgatgcacatctgtaggatcctcatgctgctgaatacacgctcactgactcgtgctctatagtttatagcttcattgttaggcatcagcgctggggagagggtcctgttcaac

SEQ ID NO: 96773 - DNA, 1840 bp, Zea Mays
cacgcttgagtcttgacgctcacggacacggagtcacggaccgtggctctccgccggccaccaccagccgccgccccatgtagcaaattagcaacccgccgagcaagagcaaccgccggcggcccggcgccgaccctgccgtccaggactccaggcccgtcctcctgccgcggtgctgcctgcgtccctgcccccgccaccgcccaccgccagcagtaggcatcaagccgagcgaggagcgagtagtggcgctgcgtggctgcgtccctggctcggtggctccctgcccagtgcccagtgcccctgcgtcagcgtcgccgtcactgcactccgagttgcagctccagcaagtgaccattgctctagagatccacatgtgggtttcagtgcattttcgtatcttttagaactgaactgtgaaaaacacaatggcaacaatcatatctggagcaaggagccttcactcactcgctctgcgatcgcggatgttgggcgaaatgactcagctcggtccttttaaccgcaacgtgcagcggaggtggagaaagcctgtagattcggcaagaacacgtctcgagggaagaactatggatcataggctggacaagctaatggttcagctgaggaacttgaggctggccttggctttgcatgaggtgatatctcagcagaggaacggatatgcgtctctccagctcctctcaaggtggaggcatgaggtcgggctgaacattgaggtcggtgctttcctcaagaaatacccccacgtgtttcagacctacgtgcaccctgtcaagaggaaccactgctgcaagatcacgcagaagatgtccgacttgatcgcagaggaagacgctgtggtcagggagaatgaggtcggcgtagttcagcggctgaagaaacttctcatgctctctgtggatggaactctgaacatgcacgcgttatggctcataagaagggaacttgggcttccggatgattacaggtcctctatactgccgaaccatcgacatgatttaattctcgaatccccagctactctatcacttttctctatggatgaaacattggctgtagctaaggtcgacgagtggaggaaaagggagtacacagaaaaatggctagctgaatcagagacaaaatatgctttcccgatcaacttcccaactggatttaaggttcagaaaggtttcagggagaaactcaagaactggcagaggcttccctacaccaaaccttatgagaagaatgattcgcattcgatccgcaacgtggagcggcttgagaaacgcattgttggtgttcttcatgagcttttgagcctgacgatcgaaagaatgatgccacttgagagactgtcacacttcagaagattgtacaccatggaggtaaacctgctagaattttttctcaagtatccaggcattttctacatctcgacgaaaggaagcacacagacagttatcctaagggagagttacagtaaaggatatctgattgagcctaaccctgtgtacattgtgcggaggaagatgctggacttggtattatctggatctcgtaacgttggtgaatgccaacaggatagtgcaacttggtcagctgaggagcatggtctgggaagcagtcatgggtgccaggataacatatgccaggtggattctgcaattccatactggaacatggagttagaagtgacgcatggaaagaaccaattaactcaaccgtgatcttgctgtaatctctacatataaaaatacctactgatatcgtctgcctagggtgaagcgatgcctagctgcggcattgcttgctgccttgctcacctgctttcctg

SEQ ID NO: 96774 - DNA, 2501 bp, Zea Mays
atggcaacaatcatatctggagcaaggagccttcactcactcgctctgcgatcgcggatgttgggcgaaatgactcagctcggtccttttaaccgcaacgtgcagcggaggtggagaaagcctgtagattcggcaagaacacgtctcgagggaagaactatggatcataggctggacaagctaatggttcagctgaggaacttgaggctggccttggctttgcatgaggtgatatctcagcagaggaacggatatgcgtctctccagctcctctcaaggtggaggcatgaggtcgggctgaacattgaggtcggtgctttcctcaagaaatacccccacgtgtttcagacctacgtgcaccctgtcaagaggaaccactgctgcaagatcacgcagaagatgtccgacttgatcgcagaggaagacgctgtggtcagggagaatgaggtcggcgtagttcagcggctgaagaaacttctcatgctctctgtggatggaactctgaacatgcacgcgttatggctcataagaagggaacttgggcttccggatgattacaggtcctctatactgccgaaccatcgacatgatttaattctcgaatccccagctactctatcacttttctctatggatgaaacattggctgtagctaaggtcgacgagtggaggaaaagggagtacacagaaaaatggctagctgaatcagagacaaaatatgctttcccgatcaacttcccaactggatttaaggttcagaaaggtttcagggagaaactcaagaactggcagaggcttccctacaccaaaccttatgagaagaatgattcgcattcgatccgcaacgtggagcggcttgagaaacgcattgttggtgttcttcatgagcttttgagcctgacgatcgaaagaatgatgccacttgagagactgtcacacttcagaagattgtacaccatggaggtaaacctgctagaattttttctcaagtatccaggcattttctacatctcgacgaaaggaagcacacagacagttatcctaagggagagttacagtaaaggatatctgattgagcctaaccctgtgtacattgtgcggaggaagatgctggacttggtattatctggatctcgtaacgttggtgaatgccaacaggatagtgcaacttggtcagctgaggagcatggtctgggaagcagtcatgggtgccaggataacatatgccaggctgttggagcagtccttgaagagaaagtgcctctgatatattctctgctcaaaggattagccttgcagttgccagacgatgtacctgataaaaatgagataattagattgagaaaggttgcaagcagtgttggtgttggcgacaaacatgatgctgagtgggtacactctattctggcagacgctggtgcagctaatgataattcttggatcctacttccatacctttgtgctgcattcatggtgtccaacatttggaacggtgctgtttatgatgtcaatataggtggactcagtaacaatttgcactgcctagcaaggtgtgtaagtgctgtgattgggggaagcgaatacactcgggtcgaaagggagcagcgaataaattctctttcaaatgtgcatacagatgaactgcaagaggccgagttaccgagccgtgtctcagcagaagcaaatatcaaatcttgtatgcagatctacgtcaaactgtctgcagggatcgtcctggattcatggaacgacacaagcaggtaggtacctggtgcactgcattttgtttgctggcttaaattttttacatgacaccaaatgcaggcagcacatcgtcccgaagctgacattccaggaccagctctgcgagctgtccccgtacgtgccaaggagcaccttagaagctcacatcccatacaccatcctgcgctcgatataccaccagctgtacggaggctctctgctggcctcggaaccggcggagcagtccccaaggcagtcgcctctcatctctctggcacacgcgtccccgtccgcaaggcagatgcagaaccgaccagagacaacacccaggtcccacaccttcgacccaggctactacagctcgtcggggtcccagcacgacgatggctacgacgcggataggagggccggacggctgctgcgcggagcatgaggcgctctggaccgctcgacttcggtgcgagcagaaaggcgaagaagttcgtcgagggctccagctccgggagcagcgatggagctggctcgttgcagaggttcgcagtgtcgagatctggccctctatcgtacaaatagggccgcatgtaatgtaaactctagagcagtagatcttcctatgcgtgctggtttacgtagctagcagcagcagctagttgtgctgtaagtaaaacccattaattgttttgttttgtttgctgctctatcgtacaaatagggcatcatgtaatgtaaactctagagctagtttttattttggttag

SEQ ID NO: 96775 - DNA, 490 bp, Zea Mays
gaggcggcttgcggcagcttgcgttcccttcgttgccgcctaccccacgcaacgcaacgcaacggatcgccaaatcaacttgagcttgagcatcccaccaatccactccccaacagcaatggacgccgcccagcgccgcgtcggtacccacctccagcgcccgccgccgcccgccgggggctacggcctcaccgtcaaccccaccgcggccgagtacgtccacgcgcagggctacagtgtcctcctccctgagaaattgcaaaccggcaggtggaacgtgtaccgatccgcgcgttcaccgttaaggctgataagtagattccctgacaccccagacattggaacgctgcatgacaatttcacgtaagacaccggggccaccaccccacttccatctggcctttttatcttgctttctttcctatctagcttctgtgaaaggttctgttattaccaacaacaatgtgatcggtttactgtttccctttat

SEQ ID NO: 96776 - DNA, 1812 bp, Zea Mays
caattcttcactcagggaaagggaagtcctcaacctttttgtcttccaaaacctgaagatgttgccactatctgttacactagtggcactactggcacaccgaagggagctgttctttctcatgggaacttaattgcaaatgtagcaggatcaagcctaaacattaagttttacccctccgatgtgtatatctcatatctgcctttggctcacatttacgagagggttaaccagattgcagcactgcactgtggtgttgccattggattctaccaaggggataatttgaagctcatggatgatctggctgctttgagaccgacaatattcgcaagtgttccccggttatataacagaatttatactgcgattacaaatgctgtgaaggagtctggtgggctgaaagaaaaattgtttcatactgcatacaatgccaagagacaagcaatccttaaagggaaaaatccatccccagtgtgggataagttggtatttaacaaaataaaagctaggcttggtggacgagtgagacttatgagttcaggtgcttctccactgtcagcagatgtcatggaattcctgaggatatgctttggtggtgaagttcttgaaggctatggaatgacggagacatcctgtatcatatctgcaatggatattggtgacagatcaattggtcatgttggatccccaactgcatcttgtgaggtgaaacttgtggatgtcccagaaatgaattatacatctgatgatcaaccttatcctcgtggagaaatttgtgttagaggacctataatattccagggttactataaggatgaagttcaaacaaaagaagtcattgatgaagatggttggttgcacactggagacataggtctgtggctacctggaggacgtttaaagatcatcgataggaaaaagaacattttcaagttagctcaaggagaatacatagctccagagaagattgaaaatgtctatgccaaatgcaagttcattgcccaatgttttatatatggcgacagtttcaactcttccttagttggtattgttgcagttgaaccagaggttatgaaggcttgggctgcatctgaagggatccagtgcgaagacttgaggcagctttgtgctgaccctagagcaagagctgcagtcctggccgacatggattctgttgggaaggaagcacagctaagaggttttgaatttgctaaagctgttcggcttgtcgctgagccattcacagtggacaatggtctcctcaccccaacattcaaggtcaaaaggcagcaagcaaagacatactttgcaaaggaaatttcagatatgtacgcggagctgcgggaggcagaggcacccaggtcgaagttgtaatgatcaattcaaggagaagcgacatatacaggcttacagatcatatgtctagaagaaacgtaatcatctttttactggcgcagcaaataatggttcctgcaatggtcaggaagagtcgagacggaggcagtgcttggtgcaaatcatatagatgaatcctcgttatgaacctctcaactgaatgccgttttcccttgtccaacgtgccaagccacgttagcctgatactaggtagagaggaaaaagatattctgcaaatgtaacagtgaacagttaacaatcgtggtgtgttgttgcatatctagttgatcggaacgacctagagaaatgtgaagaacacgaagcgcctttctgtttgaatttaaataaggattattcgcgatggcaatctctcaatataatctactgctaagcaatcaaattgcttggacggtc

SEQ ID NO: 96777 - DNA, 415 bp, Zea Mays
ttccttctacagttacgcaaggccatcggggatttacctaacctagcattgtgttctgatgcttgcaaagggctaacaaatgcaatgaaggatgtttttccagaagctgagaaaagagagtgtttccggcacctaatgaacaattatgtcaagcaatatgctggatccgaatacatgtaccctgctgccagggcgtacaaggcagaagtatatgacatgtacattgcaaatgtcagaagcaatcctgatattgctgcttggttagataggttccattccttgttgtggtaccgaagtgcattcaaccctactatcaaatgcgactatgtaacaaataacattgctgaggtgttcaataactggataaaggactacaaggacctccctgtttgtgacctggctgacaaaattagga

SEQ ID NO: 96778 - DNA, 1319 bp, Zea Mays
atggaggacacttttcgctatattgaatcggggccgcagatccgcgatccgacggctagggatgtgcgcgggaagagcaatttggcaagtggtgactatggcgagtcagtaaaaccttcccaaactaatggttctactctgaaacatcaatcagatatgccaccaccaccggctccaccccctcggaacaataatttcaatgggaaggagaaacaaccagtccctgtttctagagaagatgatgatgacatttttgttggagatggagttgactatttagttcctaacaaggaaatgagtcagagccctgtctctgatatggatgaatccccacataaccatcagaagcagtccaatttcactgaaccgctgtatggcccagttccaccatctgaatctgctcaagcttggcaacaaccgaacacgtacgatgctgctgttcaagctcagatggcagctgctggatatcaaggtgactggtcaagctatgtgtatgcggaacagcagttgggttatccagaacagtatgtgcagcaaagcacccaggaatacgatgtgttagcggaccctagtatatcccaggatccgaggttcatgactcaggcggacaaggatcggggtttaggttctgttttcaaacgtgatgatcaaaggcttaatcagctgagggaaaaagatgcacgggagagagatccaaattttatttcagatagttactcagagtgttatcctgggtaccaggagtataataatgagattgcaggaagcgatgatgaagatgatttatcgaagatggatatgggtggacgggcaaagggccgtcttcacaggtgggactttgagactgaagaggagtgggccaagtacaacgaccagaaagaagccatgccaaaggctgccttccagtttggggtgaagatgcaggacggcaggaagacgaggaagcagaacaaggaccagaagctcactaatgacctccacaagatcaacaagatcctggctaggaagaagggcgagaaagatggggcggaagatggcggtcactacgacgatgatttacctagctcgaagaaacagcgtggctgaagctgtcatttttcgtttctcctgctggttatggcattctacgggagagttacgatggtgtttagctggcagctgtatcatgatgctttcatttaaggtggcatcaggacataatacatgtcaaaaactttacaaccgtggtcgatattttaacaggaacagaatgatccttggtgattttgtttgtcttgtaagacatatcgaaattgtataaaatgtcaaaaatctaaaat

SEQ ID NO: 96779 - DNA, 912 bp, Zea Mays
accgatttcctcccattcaattcgtaaatttcgtccatgcatgggcatggaatggatggatgtgaatgccacgaacgattccgccccgccggccaggtgagagatgagcctcacggcggccttccgtgccaccaaaatcccgcgcgctcttcctccaaagtgcggtgagcctgccgcctcctcctcggcctcggcgtccggggatccgccgccgggggccgcgaagagtactaaggcgccgccgccgtggtgcgtgtaccttatagcctcatcccggatccgccgcacgtacgtcggcgtcaccaccgatttccctcgccggctgcggcaacataatggtgagttaaaaggtggtgcaaaagcttcctctgccggcaggccttggaatctcgcatgccttgttgaaggatttgccaacagaagtgaagcctgtgagtttgaatcgaaatggaagatcgtctcccgaaaaattgcacggaaaagaactgagcttagcatgaagtcagtgttgcaacatcgagaagcagctttgagcagagtggaaacattcatggattgtagccacctaaaaatcaaatggcagtcaagttgagaccatttaatcacttgcactatgcaggtggcaggcatctaacttggagaaacataaccacttaagaatcctcctgtcttctagcagctcgtagcaaagataacttataatcttctgctgaacaatcaagatggctgctgctatgctttcttaacatgaaaaaccaagagtagccccagtgaaattctatgtttgatttttttttctatgaacaattgtttccgaacaataatatggatcatgcgacacccgtttgtaaatgtaaattatacttatgtattgtaatcacctatatttcttctcattcatcttggcctttc

SEQ ID NO: 96780 - DNA, 1437 bp, Zea Mays
accgatttcctcccattcaattcgtaaatttcgtccatgcatgggcatggaatggatggatgtgaatgccacgaacgattccgccccgccggccaggtgagagatgagcctcacggcggccttccgtgccaccaaaatcccgcgcgctcttcctccaaagtgcggtgagcctgccgcctcctcctcggcctcggcgtccggggatccgccgccgggggccgcgaagagtactaaggcgccgccgccgtggtgcgtgtaccttatagcctcatcccggatccgccgcacgtacgtcggcgtcaccaccgatttccctcgccggtgattcctcgccctgctctacctgcctcccccgttcctttccccacttgcttgtctcggatagtcgtcatatggttgcagcaagctaagttcgtgtggtgttagcatttggagaagactacggttggagttgcagaaccacaagaaattgaccccatccggttgtgcttgttgcaggacagtgtggctctatctcgttagggctgaaatttgattgctttgcttcaatttagtacttcttgttttgtattcatactctgagtcgccttgctctggtttgcaggatacacatgcttgaaaatgcaaatttaattcacagtttttcaataggtatatgttaataacagctagcagcttaagcaagcatactgttaaaatgaataaagacctgtagtactagtcatgcacatagatgttgtatttgtgtattagtgaaaggagccttttttatatatttatataggctgcggcaacataatggtgagttaaaaggtggtgcaaaagcttcctctgccggcaggccttggaatctcgcatgccttgttgaaggatttgccaacagaagtgaagcaacttgactgcctgtcatgtgtcctggcgtataaccaactagttcatctatctttttcgagcctgtgagtttgaatcgaaatggaagatcgtctcccgaaaaattgcacggaaaagaactgagcttagcatgaagtcagtgttgcaacatcgagaagcagctttgagcagagtggaaacattcatggattgtagccacctaaaaatcaaatggcagtcaagttgagaccatttaatcacttgcactatgcaggtggcaggcatctaacttggagaaacataaccacttaagaatcctcctgtcttctagcagctcgtagcaaagataacttataatcttctgctgaacaatcaagatggctgctgctatgctttcttaacatgaaaaaccaagagtagccccagtgaaattctatgtttgatttttttttctatgaacaattgtttccgaacaataatatggatcatgcgacacccgtttgtaaatgtaaattatacttatgtattgtaatcacctatatttcttctcattcatcttggcctttc

SEQ ID NO: 96781 - DNA, 653 bp, Zea Mays
gctaaatttacttgtaattggatgctgggactattctttatgttcgttcgggttttcagttaattgtgctatgtttaccttaccaagttaccatactaaccccgcagcaacttgactgcctgtcatgtgtcctggcgtataaccaactagttcatctatctttttcgagcctgtgagtttgaatcgaaatggaagatcgtctcccgaaaaattgcacggaaaagaactgagcttagcatgaagtcagtgttgcaacatcgagaagcagctttgagcagagtggaaacattcatggattgtagccacctaaaaatcaaatggcagtcaagttgagaccatttaatcacttgcactatgcaggtggcaggcatctaacttggagaaacataaccacttaagaatcctcctgtcttctagcagctcgtagcaaagataacttataatcttctgctgaacaatcaagatggctgctgctatgctttcttaacatgaaaaaccaagagtagccccagtgaaattctatgtttgatttttttttctatgaacaattgtttccgaacaataatatggatcatgcgacacccgtttgtaaatgtaaattatacttatgtattgtaatcacctatatttcttctcattcatcttggcctttc

SEQ ID NO: 96782 - DNA, 987 bp, Zea Mays
tgggaagccgccattggggaagtacaagttggacgggctccctcggccgccgccgccgccgccgccgttccctttcctcgcctcaccggcggccaccgcggcagccgccatctcctggccctggtacatgagcgtggagttcatcgtcaggctcaccaagctgtcgtcggcgtcgctcctggggaagttgccgccgccgccgccgtcgcttcccccggcgtcgtcgccggcggcgtcgacgtcgcgcgtggtcaccatcaccgcggactgcacgagctcaaggcagagcctgagcttgttgggctcgatgtgcgtgagccccggcacggcgcccttgaacaggaactctgatgtgaggcctcggagcacgtcgagcggggtgacgccgtcgagcgtcctggcgctggggtcggcgtggtggtcaagcagcacggacaccatatcgggggagaccatctcggcggccaggtgcagcgcggtcttccccgtggggccggcgcgggagttgacgtcggcggcgccgagctccagcagcgccttgacgacgtcgcggccgcagtgctggacagcgtagtgcacggcgagcgcgtcgtcgaggtccagcccctcgcccatgaccatgagcttgacgagctcgatgtcggcggcgtcgagcgcgcgccgcatgcgccggatcttgtggtcgcggtcggcggccgacgacgccgcgttgatggggaggtagtggtgggtgaggaacggcgagcgcggcgcgccggcggggacgggggacttggcgcggatctcctcgatcttggccaccacgtcgatggggaggtgcttggcgagcaggtcggcggagaggcccgagcgcgccaccaggtgggagcaggtggcccacagctcctgcatctcgaacttgcgcgacgccatcagcaccttcatcacgtcgtccaccgacgcctccttcaccatgctctccagctgcttctgcgcagcgcgggatag

SEQ ID NO: 96783 - DNA, 1521 bp, Zea Mays
atggacatgttccaggaggacacgctgtcgtcggccacgtcgtctccggcgtcgtcgctgtgcacgccgtcgccgcacccgcacgggtcgtcgtgggtgcaggagctgagccacgaccagcagggcctgcgcctcatcagcctgctgtaccagtgcgcggcggaggtggcggcgggcgccttcgaccgcgccaacttctaccttgagcagatcacgcagctggcgtcgctggacgcgccgcacacgctgcagcgcctcgccgccgtcttcgccgacgcgctggcgcggaagctgctcaacctggtgccaggcctgtcgcgggcgctgctgcccacggggccgggcagccccgcggaggcgcacctggtgcccgccgcgcggcgccacctcttcgacgtgctgcccttcatgaagctggcctacctcaccaccaaccacgccgtcctggaggccatggagggggagaggttcgtgcacgtcgtcgacctctccggccccgccgccaacccggtgcagtggatcgcgctgttccacgccttccgcagccgccgcggggggcccccgcacctccgcgtcacggccgtgcacgacgccaaggagttcctggccagcatggcctgcgtgctcgccagggaggccgaggcgttcgacatcccgttccagttcagcgccgtggaggccaggctggaggacctggacgcggacgcgctgcggcacctcctccgcgtgcgctccggcgaggcgctggccgtcagcgtggtggggcagctgcaccgcctcctggcggccgacgacgccggcggcggcaggagcagcaggcacgtgcacgtcccgggcagcagctgcctcaccccggtgcagatcatcgcgcgctccagccccagcagcttcggcgagctgctggagcgggagctcaacacgcggctgcagctgagcccggactactcgccggtgctctctatctcgccgcagtcgtcgccggtgcctgggcagcagcagcagagggaaaaggcgccgaagctggggagcttcctgcgcgcggtgcgggcgctgtcgcccaagatcatggtggtggcggagccggaggcgaaccacaacgcgcccacgttcatggagcggttcgaggaggcgctcaactactacgcgtcgctgttcgactgcctggagcgcgcgtcggcggcgcaggcgcaccggtgcgcgggggagcgggcgcgcgccgagcggctggtgctcggggaggagatccgcggcgtggtggcgcgggagggcgcggagcgcaaggagcggcacgagcggctggcgcggtgggcgcgccggatggaggccgccgggatggagcgcgtcgggcttagctacgacggcatgatggaggcgcggaagctgctgcagagctgcgggtggggcggcggcggggacgactccgcgtaccaggtggcgcacgacgccagcgggaaggccttcttcttctgctggcaccgcaagccgctctactccgtctccgcctggaggccggcggcgtag

SEQ ID NO: 96784 - DNA, 2435 bp, Zea Mays
cacggtcatacacgccagcctagcgtccggagactgcagaccaaatgctgcaacgatggcggccggccggccgtccctcgggcctcaccaccgtctcgcgcggcatctactgtctctgtacgctgctgctgctgctgctgccgtccatccacgtccctcgcgcacgctcgctgtctttcgacctcagcttctccaagccccagagccccggcctctcccagctggtcaactgcaccggcgacgcgtacatcaccccggacacgctcgagctgacgaggaaccggcgtgaccagagcagcacgtacagcctcggccgggccacgtacatgcacccggtgccgctgtgggacgcccgcaccggcgagacggccagcttcaccaccaccttctccttcctcatcagccgggacccgagcacgttccccggcgacggcatggcgttcttcctcggccacttcgggtcgagcatccccaccaacagcagcggcggcatgcttggcctcatgccggccttcaccaacggcacgggcgacggcaccgtcgtcgccgtcgagttcgacaccttcctcaaccacgccaacgacgacatcagcggcagccacgtgggcatcgacgtcaactccctcaactccacggcggccacggacaccagcagcaccaggaacctcacgtccggctacgagatggtggccaccgtgtcgtacgagaatgtcaccaggttcctggccgtccagctcaccatctacgacacgtcgtacaacgtcaacgcgaccgtcgatctcaaaagctacctgccggagcgcgtcgcggttggcttctccgccgcgactggaaaaggcggcgagcagcaccaggtgctgtcgtggtcattcacgtccactctgcaggaagcaccagcaccggcaccggcaccgccgccgcgtgctctgacacctggcagcagcacccagcagcccaagaagacatcttcagaaggaacactggtagtcgccgtgctggtgcctctgttgtcgcttctcttggcgtgtgcagcggcagccgtgctggtctggtggaaacgcaggagaaggagaagatcgtcgggaggaattggaaccagcgacgacgacgacgacgacaacggtcaccgagaccaggacggcagcagggcggagctcgagaggggagtggctgccagcgggccccgccggtacgcgtaccgcgacctggccgccgccaccaactacttcgccgaggacggcaagctcggccgcgggggcttcgggagcgtctacaagggcaacctcgtcgtcgccggcgaagcgcgtccggtggcgatcaaggtgttctcgtctgagtcgtcggcgcaggggaggaaggagttcgaggcggaggtgcggatcatcagccgcctcaagcaccgcaacctggtgcagctcctgggctggtgcgacagccgccacggcctgctgctcgtgtacgagctggtggcccagggcagcctggaccggcacctccacagcagcagcggcgacagcggcagcgagagcccctttttggcgtggccggagaggtaccggatcatcctcggcctgggctccgcgctgcggtacctccaccaggagtgggagcagcgcgtggtgcacggcgacatcaagcccagcaacatcatgctggacgacgcgctcagcgccaagctcggcgacttcggcctggcccggctcggcgaccacggcgggcggtggcacaccaccaacgccgtgctgggcaccgcgggctacatcgacccggagttcgtcaacacgcggcacccgagcacccactccgacgtctacagcttcggcatcgtcctcctcgaggtcgtctccggccgggccccggtggtcctgcggcaggacgagccgcccttcgttctgctcaagtgggtgtggggcctgtacggccggaacgcgatcctcgacgcggcggaccagcggctgaggaccggcgacgggctccgccacgaccagtgtatggagagggtgctggtcgtcgggctgtggtgcgcccaccctgaccagagcgagcggccgtccatcgcacaggccatgcacatcctgcaggcggaagacgccaggctcccgccgctcccgccgcagatgtacaagacggcgtcggacctcgccgtcagtggacgtgcctatggagctttgtccgttgaaagctacagtggtggctcctttacgactacgactgcgacgacgatgacgaccaccaccaccagcagcgactctaagatttctagaggcttgtcgaccacggccttgctccgagattcaaaagagagagcctgatagatctctgcatttctttctttcttatttttttttgggaaatgttgaaatggactgcccacggtctatatatggggcttaaatgacatcattactgaccagtataaatttgagctttcgctt

SEQ ID NO: 96785 - DNA, 285 bp, Zea Mays
atgaagcttgttgagttcagttactctaaaatttatggtgctgaggctatgaaatatgttaaggttgtcaatgactctctgcatgagttgtataaggagtatgtggcacaaccactccccttgactcctgcttatgttgaagctaataatgtggctgctaacgcaagtgtgaaccagggaaatccttcttccactggtgatggtcttcttgactttgatatgtacctttctgaaaatagaaacaagtgcaaactaatccaagctacacactacggtactgactaa

SEQ ID NO: 96786 - DNA, 936 bp, Zea Mays
gttgtgactccttgcgggctgcgagcctgcgagaccgaatcgatctgcatcgccccgccccgccccgccccgtgcgccaatgttcctgcggcggctgagaacgtccgccgccgtccgccggggcgcgaccgacggcgcagtcctggccgccgtccgcgccgagctggccctcgagctctcctcctcggctccccctccattccgttccgagctggcgcccgacttcgacaccgtgtctgacgccccgcgcgcgcaggacgtgctcctgcgccgccgggacgggtccgaggaggtcctcgtgtcggcgctgctcgccccgctgcggttcgtgggccgagacccgctgcccagggccgcgctcgtcaaggtcttcgtcagtaagcctggcgcggcgcccgtcctgcacttcgactgccgtgcgtcttgggtgggggaggaggagcgcggcggcggcgctgctgactacgctatcaacgctgtccggtaccactcctctcctggcgccggtggagcagacgagtacgaagggccggcgttcagagatctggatcctcggctacaggctgctttacgagagtatctggtagcgagaggcttcaactccaagctggcaagttcgattcttcaacacctccttcagaaggagcgcaaccagtatgtgaattggctgaagactttggaagaggcgttcgccaaacatcactgacccaatgaaacgattagtggatccttctacatagcctggatttggcactctactatccttcagtgcctcccattggaaaaatccggccagagtgtaaaccttctacgtctattttccatgaccaaagctgtcgtgttctttcccatttaacactagaggtattcgatgactgcgatacagttttgcagagagctcggccaagactcctaaagtttaccgacagaaggaaa

SEQ ID NO: 96787 - DNA, 1305 bp, Zea Mays
ttgtgtcgtcaaagtgcaccttggcaaccaaaagcgctctctcttactatcatattcttatatataaaatatgtatatgtatccctccctgagcaacgtcgatatgtgaagaaccattctatactaaagcaacgcattatcgcgataccgatcgaggagaagagaacgtaaggtaggcgacgtcatgtcgttcggtcgccgttcatggcaaatcctcgccctatccatggtgctcctctccaccgctgccacggccgtgtccaagcggaccggcgagctaacggtgttctggggccggaacaaggaggagggcactctgcgagaggcttgcgacacagggctgtacaacacggtcatcatctccttctacagcgtcctcggccgtggaagctacggggtagacctctcaggccatccgctggacggcgtcggcaccgacatcaagcgctgccagtccaagggaatcccggtcttcctctccatcggcagcggcggcggaggcaacggctactccctctcgtcctccgagtcggcggtagccgtcgcggacaacctctggaacgcgtacctcggcggcggccgcagcgacgtgccccgcccattcggcgacaccgtggtcgacggcatcgatttctacatcgacaaccaccagggtgcccccgacgacctctacgacgagcttgccagacgcctcgacggctacaacagccaagccagcgtgaggaagcgggtgaggctgacggcgacgccgcggtgcgcgttgccgcaagggcgcctggagacggcgatgcagacgggattgttcgagcgcatccacgtccgcttctacggcgacgacgagtgcacccacagcaacggtgccgtcgacaagcactgggacaagtgggcggcgaggtaccccgccagccagctgtacgtggggctcgccgcggcggagagcggcgtgccggaaggcgcggcgccgcccgtcgaggtctacctcaaatacctctactacagtctgctgcccaaggtgcagtcggcgcccaactatggtggcatcatgatctgggacaggttcagtgacaagagaaccagctacagcggggctgtcaagggctgggcgtcatgcagctatgctgggtgtgtttaattatttgacagcttttgcacgaatctatatctaaaagatctaatcctttttatgttcaacacaacagttagatttagtttttactaagactgtaaagtcgtcggtagccggcaagaacagataaactcgtgagtatagatagctaaatagaacatgcctcgtggacccactac

SEQ ID NO: 96788 - DNA, 1736 bp, Zea Mays
ccatcccgatccagtgcagcttcagcttcagcttcaccgagcgagtgtcacacacacacacacacacacccagctgaagcacatctccaagaaaagctttaaagctccagtgctccacacagcagctcgcggtggttcgcgcgccctacccaacatttccgaacacaacacaggcatcgtctgccatgggcaccggcgacgacgacaccaagcccgctgccatggaggtgacctccacctcctcgccgccgtcgctcccctccccggcggcgccaccgccgtcgctgctgcgctccgtgctgctgtcgtacgcgtacgtggggatctggatgagcctgagcttctcggtgatcgtgtacaacaagtacatcctagacccgaagctgtacaactggccgttcccgatctcgctcaccatgatccacatggccttctgcgcgctcctggccacgacgctcgtccgcgtcctccgcgtcgtcgacgtcccgtcctcctccgctcctcaccagcagcagcaggccatgacgccgcgcctctacgcctcctccgtgctccccatcggcgcgctctacgcgctctcgctctggttctccaactccgcctacatctacctctccgtctccttcatccagatgctcaaggcgctgatgcccgtcgccgtctactccctcgccgtcgcgctccgcaccgacgccttccgccgcgcctccatgctcaacatgctcgccatctccgcgggcgtcgccgtcgccgcctacggcgaggcgcgcttcgacgcgttcggcgtcgcgctgcagctgctcgccgtcgccgccgaggccaccaggctcgtgctcatccagatcctcctcacctcccggggcgtcgcgctcaaccccatcacctcgctctactacgtcgcgccctgctgcctcgcgttcctcgccgtcccctggtacgccgtcgagctgcccaggctgcgcgccgccgcgctcgcccgccccgacgtcttcgtcttcgccaccaactcgctctgcgccttcgcgctcaacctcgccgtgttcctgctggtcggcaagacctccgcgctcaccatgaacgtcgccggcgtcgtcaaggactggctgctcatcgccttctcgtggacggtcatcaaggacaccgtcacgcccgtcaacctcgccggctacggcatcgccttcctcggcgtcgcctactacaaccacgccaagctgcaggggctcaaggccaaggaggccgagaggaaggcggcggccaatacggacgatgacacggaggcaggcacgcggctgctgccgccggacagcaaggacggcgccggcgaccacaaaatttgatgatccgatcgagcactggacatgctgtagtacggacgctctctacatttttctttttcttcttcttccccgccgtataggatcgctacaatttcgagttcttcattcaataatacaggaaacgcaaaggatcaagcgagatataactggaaggaattttgtgcatggtgaaaagcttagttcttgtagcatgctgatttaaatgatttagatgttgtaccatcgtttcggttggttaccagagtagcagtcttaattggtttttaattgtactgtactccctttatgtaattcctagtcatgaataattaagttcgcaacaaggtagtcacaagctacgaaatctttaggcttactcaaagtgacacaagggaaaagatcagaaacaaaaaaaaaaaa

SEQ ID NO: 96789 - DNA, 4362 bp, Zea Mays
gtcggcgacctcgttcggctgcatcgtctgcaacgaaaatcaattcaattcatatataagaacacaacagacagacctctgcacaaactactaaacaatcgcacgtcactctaggtagggatagtaatggccaactaattcttcataaaatgttaagtccctaaacaaaaatgaatactctaatcctaatccgacccccttgtctctaggggggaggagggaatagatcagagaggaggcgcgaacacgtaggggcacggacctctgcacgacggagaactctgcaacacagaagcaacatcagctcgtcgcgcatgacgcgaatcaaggagggagggaatagatctcgggacggaaagacatacctgaagcaaccttggcggggcggcgctagggttcgcccaggcccggggacggagtcaagtggagtggagctggagatgacgccgtcggttaatggacaggggaatggattaatgaggagatgacaaaatgggccaaccaatggccggcgattctgtcaaagcccaacaatggcagtttcataatcgcagatttctctccacgatatttccatctccatctccacacccttgagatgcttggggtcgctgtctgggccgagacagcggcgacttgcacatcaggagaaggacgacgactacgaccccccattgtccttgtctagacgcttttaccttgtgtaccaccccatggcggagtcgccgcatcattttgagatatttatgatccccttattaatgggtgaccgtgatgctctggtgtgtgatgcggcaatgggggaggtgtgagatatttatgatccccatggcggagacgctctggtgtgccgacaatatcactattgaccttgaggagcaagaatgaccgccatcaacattcagaacccacgtcttctcatcaaggagatggaggtgggaggagaggtcctggatacgccaaggggagcctacgggacgtccccatggccgatatgctgcgataggatgaaggatggtggggttcttgtaggtggactgaaggaatatctcaaaacaattaggcgctgcagaaaagggtgggttttattttattggttgtggaacaagttacaatgctgccttagctgcaagaccctttttgtggaagaactgactggtattcctgtgactatggaggttgcaagcgacttgctggacagacaaggtcccatctacagagaagacgccgcagtttttgttagtcagtctggagagacagcagataccctccttgcattgctcttgattatgctctagaaaatggacctctccgtgttggcatcacgaaatactgttggaatcacactgtctagaagaacgcactgcggagtccatatcaatgctgattgccggtacaaaggcatatacaagtcaaatagtagcaatggtgatgatggcgttggctatcggatccgaccaataatatatctactcgagctagaaggaaaattatcatcagtggacttaacaacctttcaagtacgtcgaacttactagatccttgtgctatggctgcagtcaagcaaaaaggctgtttctgacgcatgcttcagcaagcagcagtcggtgatccagcagctcctctcgcgcaaggggacgccgccgatagtgatgtgctcgaggggggacgccaccgcgctgctgtatgccccagtggatcctgcagagtcattgaagttccggaggttgcatgttgtctccagccagtgattaacataatcccattacagttgctcgcgtacaatctgactgttctccagggattcgatgtggaccaaccacggaatctggagaagagcgtgaccacgcagtaggtagagaggtggaagtggatgatgagatgcgcgaacgatttgtacccctatgtcgtgttgtgtagggttctaggagagagcaagccggctatagctgttggttagtcattttcttttgtgtaatgtaattattactgttcttgaggtagctagtactatcattactctacgttaaacaagtcgttgtgaaatgcatggtacaaaaggtatcatttgagaaacaagtgtgtttttcataccgattgggcgatataaatctcgtaaacttgtaattctgatctctcaaatttgaggcgtctggcaaaggtacaaaatcaaaaccctcaaaaatctgacggcagaaattttccgacgaacattgtatcagagttttctctccttatttcctgtaagaacatgacggtcatttctttttacagggcattgagccccctgatattccagtacaacagtctaatactccaaattctaaaacaggagctgagatattcatgtatgacatctcgtcggcgtcttcttctgcctcctgtcctccggcctcatctggcctttgctgcggccatacgtattcatgtatgccatatgatcgacggcctccccctgtataaccctccagggctaatcttgctctgggctttcatgtggatttggtgatattgagtcagtttaaatccataataaattaaaatccacctcaatacatctcaatcctataaccgaacaaggcctcatcgttggttgaagctccagctattctctaaaaatcaaatatggtggtaaggatgaagatgaacagttggaacacttttctgaataggtaaaattttcagcccactcatgtgtgagccaccgtcagcattggatcggctgttctttttatatctgtagtagggcctcttatcatttcaaactgatgggtgatctcaaggacctcagggggtagctgagaacacactgacctgaatcttcgacggaagaaacttgaagatatcatagatctgcaaagggcacatgtcagttgaagtcaagcagcttataagctatgaaaagacatctgcatagggcacattgtgccagttaaaggcaaacaacttacatatattagttgaaggcaagtaccttataaggaggaaagaagagttgaaagctggttagatgtatatgattcccaataataaatttgacctgtgcatatcacaatactactaatcaccgaataccatgcataaatgtcgattagttgagatctgcagtttctttcctgattcagcctaggagtacttaacagtttattggaactagtctgattcagccctagagtagcaagggagcctaagccgcaagaaaatgtgtattgtagcaacctgtgcatgtgtcctggtgttagtttcttctgaacggacattgaacttacagtacaaattttcagaattttgcagcaggttcaagcacaagcacgcttcatcatcaacaaattaagtgcaaaccaaccttatttgctgaaaatggataatatggtttacgtatcacaaaccagcaggttgatttgaatttaatttattgtcgatgaagcgtgcttgtgcttaaaactgctgcaaagttctaaaaaattgcactgttaagttcaatgtccgctctgaagaaactaacaccagaacacatgcacaggttggaacaatccacatttttgcagcttaggctcccttgttgctccagtgctgaattagaccagttccaataagccgttaaagtactcctaggctgaatcaggaaataaactgcatacctcaactaatcgatatttatgtatggtacgcgagcaattgaaccaaaaaaacagcagaatttgttcagtgaacagtgaactgtaccaaaaaaaaatatgacaaaacaagcttagacaaacaaacctgtaatgggattatgttaatcactggctggagacaatctacaaactctagaacttgaatgactctgcaggatccactggggcatacagcagaggcgtccccctcgaacacatcactatcaggcgccccttgcgccagaggagctgctggatcaccgactgctgcttgctgcaagacacgaggtggggaaccaaccagcttcagccttcaggggtttcttggtattaagcacaaccaaaactgacgaggcccttttcgaaacatttatttggccaaaacaaaagcatttaagaaagtgggagaattcttcaaaacctagaaatacttgtgcaaattcaattcttgtactttcgaccaaaaacaaaagactttgaaaagtttttatcaaaaaataaaaaacaaatgctaagtgatgcaaataaggtccaaaattttattgttcagactatacacaatttgagttgaattgttcttacctagtatcttatggtcacttaaattattagcaaattacttacatctctaaaagttttgtatttgctttggatgtgttggcatcaatcatcaaaatgaaggagattcaaagcgagatatggc

SEQ ID NO: 96790 - DNA, 2108 bp, Zea Mays
aggaatatctcaaaacaattaggcgctgcagaaaagggtgggttttattttattggttgtggaacaagttacaatgctgccttagctgcaagaccctttttgtggaagaactgactggtattcctgtgactatggaggttgcaagcgacttgctggacagacaaggtcccatctacagagaagacgccgcagtttttgttagtcagtctggagagacagcagataccctccttgcattgctcttgattatgctctagaaaatggacctctccgtgttggcatcacgaaatactgttggaatcacactgtctagaagaacgcactgcggagtccatatcaatgctgattgccggtacaaaggcatatacaagtcaaatagtagcaatggtgatgatggcgttggctatcggatccgaccaataatatatctactcgagctagaaggaaaattatcatcagtggacttaacaacctttcaagtacgtcgaacttactagatccttgtgctatggctgcagtcaagcaaaaaggctgtttctgacgcatgcttcagcaagcagcagtcggtgatccagcagctcctctcgcgcaaggggacgccgccgatagtgatgtgctcgaggggggacgccaccgcgctgctgtatgccccagtggatcctgcagagtcattgaagttccggaggttgcatgttgtctccagccagtgattaacataatcccattacagttgctcgcgtacaatctgactgttctccagggattcgatgtggaccaaccacggaatctggagaagagcgtgaccacgcagtaggtagagaggtggaagtggatgatgagatgcgcgaacgatttgtacccctatgtcgtgttgtgtagggttctaggagagagcaagccggctatagctgttggttagtcattttcttttgtgtaatgtaattattactgttcttgaggtagctagtactatcattactctacgttaaacaagtcgttgtgaaatgcatggtacaaaaggtatcatttgagaaacaagtgtgtttttcataccgattgggcgatataaatctcgtaaacttgtaattctgatctctcaaatttgaggcgtctggcaaaggtacaaaatcaaaaccctcaaaaatctgacggcagaaattttccgacgaacattgtatcagagttttctctccttatttcctgtaagaacatgacggtcatttctttttacagggcattgagccccctgatattccagtacaacagtctaatactccaaattctaaaacaggagctgagatattcatgtatgacatctcgtcggcgtcttcttctgcctcctgtcctccggcctcatctggcctttgctgcggccatacgtattcatgtatgccatatgatcgacggcctccccctgtataaccctccagggctaatcttgctctgggctttcatgtggatttggtgatattgagtcagtttaaatccataataaattaaaatccacctcaatacatctcaatcctataaccgaacaaggcctcatcgttggttgaagctccagctattctctaaaaatcaaatatggtggtaaggatgaagatgaacagttggaacacttttctgaataggtaaaattttcagcccactcatgtgtgagccaccgtcagcattggatcggctgttctttttatatctgtagtagggcctcttatcatttcaaactgatgggtgatctcaaggacctcagggggtagctgagaacacactgacctgaatcttcgacggaagaaacttgaagatatcatagatctgcaaagggcacatgtcagttgaagtcaagcagcttataagctatgaaaagacatctgcatagggcacattgtgccagttaaaggcaaacaacttacatatattagttgaaggcaagtaccttataaggaggaaagaagagttgaaagctggttagatgtatatgattcccaataataaatttgacctgtgcatatcacaatactactaatcaccgaataccatgcataaatgtcgattagttgagatctgcagtttctttcctgattcagcctaggagtacttaacagtttatt

SEQ ID NO: 96791 - DNA, 1955 bp, Zea Mays
acacatccgcccctggtctgcccgtcgcgctcgcgcctccgttctctccccgttcgccgctcggttgcttccgccgccgcttcccctggctgcctcgtgtactggtcgagctcaagcgccccatttcgggctgggtccgggaacctcgaatctatctcctaaccctatcaagctagctagctgcgatgccgagcttccctccgccgggcgccgtcaccatctgcgagatcaaccgcgacctcgttgcggtggatgccctctccgacgaccgcgccaaggacgcatatggggatgtcctcgggatggtgttcgccccgattccgttccagccggaggctcttcttctcgccagccgcgagcctgctgctcctgccgcggaccaagtcgagcctgctgacactgtgcccaccgctggtttggcagccaccatatccgacttcttcaggcggatggtcttccctccactagacccaaatctgctagaagaatttgacacgcagaaagtaagttggaatccatacaagcattgcttagcattcgtgtctgggaagaaccaggttactgtccaagactttgaggactcagatgctaaagaaccatgcattttaacaaatgatcatcaaacggatgttaaggctgttgagtggagaccaaatagtgggaagatgattgcagttgcctgcaaaggagggatatgcctctggtcggcatcatatcctggcaatgtcccattcatgaaatctggggtcacttcttcttcctttagtgccttccctagaggttctggtggtcagtggatacttgtggatgttcttcgtggctcttctgctgagctcgttagtgcactttgttggaaacctgatggaagatacttggcatctgcctcatgtaatagttcatctttcacaatttgggatgtgtctcaagggttgggaactcctatacggcgtggattaagcaatatatcattagtgcggtggtcacccagtggagattaccttctagttgctaaatttgatggtacttttcacttctgggagacaaacacatggacttcagaaccctggtcttcgtctaatggatatgtgtctggagcaaattgggacccagaaggtcgagttgcattattatccttttctaactcgacgacgcttggttcaattcacttctcatcgaagccaccatctttagatgctcacctcctaccagttgaacttccagaaatttcctccctgattgttagccgaggcatagagaaattagcatgggacgcatcgggggaacgtctggcactgtcgttcagagatggaaacgaaatgtaccgtggcctgatcgcgatatatgacgtgcggagatctccactcgtctcactatcactagttgggttcatccggggacctggagaaggagcaaagccgctcgcctttgcttttcatagcaagtttaagcaggggccattgctttccgtgtgttggagcagtggctggtgctgtacgtatccgctgatacttcgtcctcgttgactccagtcgtagcacctcgccggttcaggactgaatgttgctgacgacttggaagaccgaacgcttcgatgtgcctgctaggagaaatgcaaagctcgagttgctgcattgtgacgttgtggctcgagaaatggcgcccttttggacagtcatctccagatgtgtttgattggatatgtatgtatgcttatgctgattttagcggggttttttttccctctggccatacatggatcgcccttttggacagtcatctccagatcgcccacgctagtttttttttattattttagaactccagcaggcagaagcatgccatattgccccacgggttgaaccgaggaggccttctctctaccaccatcaccagatgcaaaatctgggatcgtcagtgctgtcaaaaaaaaattatagcaatctgaaaacttcatt

SEQ ID NO: 96792 - DNA, 1947 bp, Zea Mays
acacatccgcccctggtctgcccgtcgcgctcgcgcctccgttctctccccgttcgccgctcggttgcttccgccgccgcttcccctggctgcctcgtgtactggtcgagctcaagcgccccatttcgggctgggtccgggaacctcgaatctatctcctaaccctatcaagctagctagctgcgatgccgagcttccctccgccgggcgccgtcaccatctgcgagatcaaccgcgacctcgttgcggtggatgccctctccgacgaccgcgccaaggacgcatatggggatgtcctcgggatggtgttcgccccgattccgttccagccggaggctcttcttctcgccagccgcgagcctgctgctcctgccgcggaccaagtcgagcctgctgacactgtgcccaccgctggtttggcagccaccatatccgacttcttcaggcggatggtcttccctccactagacccaaatctgctagaagaatttgacacgcagaaagtaagttggaatccatacaagcattgcttagcattcgtgtctgggaagaaccaggttactgtccaagactttgaggactcagatgctaaagaaccatgcattttaacaaatgatcatcaaacggatgttaaggctgttgagtggagaccaaatagtgggaagatgattgcagttgcctgcaaaggagggatatgcctctggtcggcatcatatcctggcaatgtcccattcatgaaatctggggtcacttcttcttcctttagtgccttccctagaggttctggtggtcagtggatacttgtggatgttcttcgtggctcttctgctgagctcgttagtgcactttgttggaaacctgatggaagatacttggcatctgcctcatgtaatagttcatctttcacaatttgggatgtgtctcaagggttgggaactcctatacggcgtggattaagcaatatatcattagtgcggtggtcacccagtggagattaccttctagttgctaaatttgatggtacttttcacttctgggagacaaacacatggacttcagaaccctggtcttcgtctaatggatatgtgtctggagcaaattgggacccagaaggtcgagttgcattattatccttttctaactcgacgacgcttggttcaattcacttctcatcgaagccaccatctttagatgctcacctcctaccagttgaacttccagaaatttcctccctgattgttagccgaggcatagagaaattagcatgggacgcatcgggggaacgtctggcactgtcgttcagagatggaaacgaaatgtaccgtggcctgatcgcgatatatgacgtgcggagatctccactcgtctcactatcactagttgggttcatccggggacctggagaaggagcaaagccgctcgcctttgcttttcatagcaagtttaagcaggggccattgctttcctgttggagcagtggctggtgctgtacgtatccgctgatacttcgtcctcgttgactccagtcacctcgccggttcaggactgaatgttgctgacgacttggaagaccgaacgcttcgatgtgcctgctaggagaaatgcaaagctcgagttgctgcattgtgacgttgtggctcgagaaatggcgcccttttggacagtcatctccagatgtgtttgattggatatgtatgtatgcttatgctgattttagcggggttttttttccctctggccatacatggatcgcccttttggacagtcatctccagatcgcccacgctagtttttttttattattttagaactccagcaggcagaagcatgccatattgccccacgggttgaaccgaggaggccttctctctaccaccatcaccagatgcaaaatctgggatcgtcagtgctgtcaaaaaaaaattatagcaatctgaaaacttcatt

SEQ ID NO: 96793 - DNA, 1938 bp, Zea Mays
ctggtctgcccgtcgcgctcgcgcctccgttctctccccgttcgccgctcggttgcttccgccgccgcttcccctggctgcctcgtgtactggtcgagctcaagcgccccatttcgggctgggtccgggaacctcgaatctatctcctaaccctatcaagctagctagctgcgatgccgagcttccctccgccgggcgccgtcaccatctgcgagatcaaccgcgacctcgttgcggtggatgccctctccgacgaccgcgccaaggacgcatatggggatgtcctcgggatggtgttcgccccgattccgttccagccggaggctcttcttctcgccagccgcgagcctgctgctcctgccgcggaccaagtcgagcctgctgacactgtgcccaccgctggtttggcagccaccatatccgacttcttcaggcggatggtcttccctccactagacccaaatctgctagaagaatttgacacgcagaaagtaagttggaatccatacaagcattgcttagcattcgtgtctgggaagaaccaggttactgtccaagactttgaggactcagatgctaaagaaccatgcattttaacaaatgatcatcaaacggatgttaaggctgttgagtggagaccaaatagtgggaagatgattgcagttgcctgcaaaggagggatatgcctctggtcggcatcatatcctggcaatgtcccattcatgaaatctggggtcacttcttcttcctttagtgccttccctagaggttctggtggtcagtggatacttgtggatgttcttcgtggctcttctgctgagctcgttagtgcactttgttggaaacctgatggaagatacttggcatctgcctcatgtaatagttcatctttcacaatttgggatgtgtctcaagggttgggaactcctatacggcgtggattaagcaatatatcattagtgcggtggtcacccagtggagattaccttctagttgctaaatttgatggtacttttcacttctgggagacaaacacatggacttcagaaccctggtcttcgtctaatggatatgtgtctggagcaaattgggacccagaaggtcgagttgcattattatccttttctaactcgacgacgcttggttcaattcacttctcatcgaagccaccatctttagatgctcacctcctaccagttgaacttccagaaatttcctccctgattgttagccgaggcatagagaaattagcatgggacgcatcgggggaacgtctggcactgtcgttcagagatggaaacgaaatgtaccgtggcctgatcgcgatatatgacgtgcggagatctccactcgtctcactatcactagttgggttcatccggggacctggagaaggagcaaagccgctcgcctttgcttttcatagcaagtttaagcaggggccattgctttccgtgtgttggagcagtggctggtgctgtacgtatccgctgatacttcgtcctcgttgactccagtcacctcgccggttcaggactgaatgttgctgacgacttggaagaccgaacgcttcgatgtgcctgctaggagaaatgcaaagctcgagttgctgcattgtgacgttgtggctcgagaaatggcgcccttttggacagtcatctccagatgtgtttgattggatatgtatgtatgcttatgctgattttagcggggttttttttccctctggccatacatggatcgcccttttggacagtcatctccagatcgcccacgctagtttttttttattattttagaactccagcaggcagaagcatgccatattgccccacgggttgaaccgaggaggccttctctctaccaccatcaccagatgcaaaatctgggatcgtcagtgctgtcaaaaaaaaattatagcaatctgaaaacttcatt

SEQ ID NO: 96794 - DNA, 111 bp, Zea Mays
ctttctcctcgaaataggttagagacaacacaaattgttatactacagtattatttagagggacacatcacacttaggtcccgtttgtttagttaaaagtgaattctattc

SEQ ID NO: 96795 - DNA, 429 bp, Zea Mays
cgcagtcttggagcagtggctggtgctgtacgtatccgctgatacttcgtcctcgttgactccagtcacctcactggttcaggactgaatgttgctggcgacttggaagaccgaacgcttcgatgtgcctgctaggagaaatgcaaagctcgagttgctgcattgtgacgttgtggctcgagaaatggcgcccttttggacagtcatctccagttgtgtttgattttaccgggtcttcttttttttccctggccatacatggatcttagttgcgcaacgttggtctgggattgtgcacaagtcatcatggacgtttgtggcaaaattctactagcatggatatctggactcgggtactactacgcagacggcagaccttgttgtattgtatctttgcttcacatctctgccacacgttcgaactccaga

SEQ ID NO: 96796 - DNA, 1272 bp, Zea Mays
ctcttgactatcagaaccaatagtagcaagatgatgtgctaccttgttacatattctaggagcaaacaacaccttaacatcattgaaacatgatctatctcataaacatgtacaggaggggcaacggtggtacacttcaccctctcatggcgcccctgggggcgattggcgccgccgccgccagccctggtcgcccgcatccggttcggggggtgctccgtcctttctccgcgggcggggctagcgctcctctccgtggtggcctcgggtcgtccctccacgcggcggactcggtgtccggtcctctgcccaaacctcttctagagccggtaagtgctgagcgctcgttctctggcgggcaaactctgcgcagtgatgtgccccccacgagcgttcaagaccttctcctcctcggttctcctcaaccagatccacagcgggccgttgcgggcggcattgatcacaggaggatttcactttcaagttccagatctgaaaagtgctctacgccggtgctgcctgaagatccgcatagtctgctttcggcgctgcgaatccaggcggctgaatcatccgactgtgatgcagtctgctcgccgtgtttccagtttacctgcgtggaggatgaggcattgaagtcgggcagcgttcggtcccgtcgtcgtgctactgatgactctgctgcgccgcgcgtgagtggaatgcctctccattccgctaccggggtcaacgatgggggatgggaggttgttcggccgcggttttggtggcgcaaggcattgaagaatcctgtgagatctccacgaaatcttcaactggatgtgaagggcaccaatcttttcaaattgaagctcaagggtggatttggttgagcagctggcgaggcatttctctaggcctttgaccaaggaacaaatggaggcaattatggagctggcaactctggggaaggaaaaggaagggatcaagaagaagggcagcaaggtgacgcccctcaaggctcctattatcgaggcttctgagatgctataagttgtaatttgagttgtgggggtagttctagtgcatcatgttgtgtcgctggtgtacttgcctgtgggtcgcccaggttcttttgctggctgtttcgtgtgccaggttgttgcctgggcagcggtgtttgtttctttggttggtattttcggtgtctctatctgtcttagtatctgttgtaagacgctggtcttttgcttctggaagcaagttacggatggtggaatcctggttggctcc

SEQ ID NO: 96797 - DNA, 586 bp, Zea Mays
ggataaatgtgggcaagctgaggatattggtgacaggtctggttcgatgggcgctgttattctggaacctgtgcgcagccctgctacaaccacatgcaaggtggatttggttgagcagctggcgaggcatttctctaggcctttgaccaaggaacaaatggaggcaattatggagctggcaactctggggaaggaaaaggaagggatcaagaagaagggcagcaaggtgacgcccctcaaggctcctattatcgaggcttctgagatgctataagttgtaatttgagttgtgggggtagttctagtgcatcatgttgtgtcgctggtgtacttgcctgtgggtcgcccaggttcttttgctggctgtttcgtgtgccaggttgttgcctgggcagcggtgtttgtttctttggttggtattttcggtgtctctatctgtcttagtatctgttgtaagacgctggtcttttgcttctggaagcaagttacggatggtggaatcctggttggctcctgttcttctctcctatcctgtgttccccatgtgtgacaactttttaattagtggagctgttttggattaatg

SEQ ID NO: 96798 - DNA, 158 bp, Zea Mays
ttcataccaaagaatgtaactgcattgttgtgggtcatgtaggatgtttgacctggtcagccttcaccaatagcaattaacctccacgcgaataacctaaaccaactcacatatttaatctagttctgcgaaccatgagaaaaaagaataatatggaa

SEQ ID NO: 96799 - DNA, 1739 bp, Zea Mays
cagcccaccaacgacgttgattccctcgaggccaagccaggcacaaaaaaaccaaaccaaaccaaaccgaaagctgtcgccaccgctcgccggagaaggagcaaacgttccccaacccaccggagctccctccaaaacccaccacaaggcttgcccaaggcttcccctcgcccatgccacgctcgcgcctccccccgactccacacccgcgggcatgatccgcggcgatggaggactcggcgccatcgtccgccgcacctgaccctcccctttcccctccaccttccacgcccccgcacccgcacccgcacccgcccgaggaggaggggggctgctgggtgctcgttccggccagcgaggtcgagggggcccacgcgcccaaggtcatccactgggacgacctgcagcaggagctcgcgcgcctctggagcctctccgccgcgctccagcccgccgaggaccgcaaggcgcacctcaccgcgcgcctcgagtccgctctacaggttaggcaggcgtttctcgagcaggacaatgagttggctgaaatgaggcagagactgcaagagcgtactgaccgtctgggggatctgaagacgcgcgccaagaagctgtcagaggatgttgtggttcggagggaacagctttgtgtcaagatcagaacgttgtcaggggcaagcaaggctctcgaggctgcacgcagcaatctgaaggaagctaatgaattgctgtcaggggaaaatggttgtgggcgccttaaagatctggaacagcagttacggatgagacagcaatatatggtagcgcaagttgctcagatatatcctgtgaggcctttggatgaacaatcttcagatcacaaacctggatttacttccaacataacgaaaacaagtaatgttgaatcagtgttgccaaatagcccccaaaacagacctttggtcatattgggtctacagttatcaaagctttctgtgaaaaagactggctacttcagtgacaagacagaggttcagaaatcttcgactgttcttggatatgctgctcatgcagtctccctcattgcatcctatctcaatgttcctcttcggtatcctttgcgctttggaggttcacggtcatatgttctcgaccctgcgccttcagttgagccatcatctataacctcagtaggaacgtctgtccctcccagcacaagcatgaggacaacggagttccctctgtttcttgacagccaggagacaacaaggtcatcatatgcgatattcttgttgaacaaggatatcgagcaacttctgaattacattggcgctgaaagcctcgggccaagacatgtcctagcaaacctgaagcagctgacaacgatcatccagtcacaaggatacatttctgatggttagtttaacccagatacagttttggtgctgtgagtttagtccagaagacacaggcacccttttttttaacccccctttgagtcttgagtcttgacacacaagagttggtcgctgtctctgtgctgacacgctcattgtaaatgagcaaaatggagtcactaccaggttgtacaggaaagatgtggatcatactactgtactgtgctatatacgcagcaaccggaggcgcttgttcatgggaaaattatccatgttgtagcgtgtttcttgatgtggatagcgctggtgagaaacacggccctggttcaactgcgcatggctgcggatggtcgtgctgtgatccat

SEQ ID NO: 96800 - DNA, 1677 bp, Zea Mays
aaaccaaaccgaaagctgtcgccaccgctcgccggagaaggagcaaacgttccccaacccaccggagctccctccaaaacccaccacaaggcttgcccaaggcttcccctcgcccatgccacgctcgcgcctccccccgactccacacccgcgggcatgatccgcggcgatggaggactcggcgccatcgtccgccgcacctgaccctcccctttcccctccaccttccacgcccccgcacccgcacccgcacccgcccgaggaggaggggggctgctgggtgctcgttccggccagcgaggtcgagggggcccacgcgcccaaggtcatccactgggacgacctgcagcaggagctcgcgcgcctctggagcctctccgccgcgctccagcccgccgaggaccgcaaggcgcacctcaccgcgcgcctcgagtccgctctacaggttaggcaggcgtttctcgagcaggacaatgagttggctgaaatgaggcagagactgcaagagcgtactgaccgtctgggggatctgaagacgcgcgccaagaagctgtcagaggatgttgtggttcggagggaacagctttgtgtcaagatcagaacgttgtcaggggcaagcaaggctctcgaggctgcacgcagcaatctgaaggaagctaatgaattgctgtcaggggaaaatggttgtgggcgccttaaagatctggaacagcagttacggatgagacagcaatatatggtagcgcaagttgctcagatatatcctgtgaggcctttggatgaacaatcttcagatcacaaacctggatttacttccaacataacgaaaacaagtaatgttgaatcagtgttgccaaatagcccccaaaacagacctttggtcatattgggtctacagttatcaaagctttctgtgaaaaagactggctacttcagtgacaagacagaggttcagaaatcttcgactgttcttggatatgctgctcattctccctcattgcatcctatctcaatgttcctcttcggtatcctttgcgctttggaggttcacggtcatatgttctcgaccctgcgccttcagttgagccatcatctataacctcagtaggaacgtctgtccctcccagcacaagcatgaggacaacggagttccctctgtttcttgacagccaggagacaacaaggtcatcatatgcgatattcttgttgaacaaggatatcgagcaacttctgaattacattggcgctgaaagcctcgggccaagacatgtcctagcaaacctgaagcagctgacaacgatcatccagtcacaaggatacatttctgatggttagtttaacccagatacagttttggtgctgtgagtttagtccagaagacacaggcacccttttttttaacccccctttgagtcttgagtcttgacacacaagagttggtcgctgtctctgtgctgacacgctcattgtaaatgagcaaaatggagtcactaccaggttgtacaggaaagatgtggatcatactactgtactgtgctatatacgcagcaaccggaggcgcttgttcatgggaaaattatccatgttgtagcgtgtttcttgatgtggatagcgctggtgagaaacacggccctggttcaactgcgcatggctgcggatggtcgtgctgtgatccat

SEQ ID NO: 96801 - DNA, 1331 bp, Zea Mays
agatatattactgcatgcagctggaattcgtctggagtgaagagcatgacatgaccgtttccttcctcgaccatgtccctctccagctagcttcctcccctccatgtcgtttcttcttcgtcgtcgccggccgtcgtcaccactttttgacgcgctagcgcctagctgctgctcgttcttccacctcgccagtctccatcaacgcggctccgtcgccctcacgcacgcgcgcatagatataaacataaacgccggctggcactggtagacattcttcactcccacgctagctacgcccactccccccgcgctatgcctatggccgaccgcgtccaccccatgccatctccctcctccccgccgcttccacctccgccagggcgacggcgacctgacgccgaccccgccacggagacgacgccgctgcacccgtccttcttccacgacatcccgctgtcgccgcccccagcaggcacgtacatcgtgcaggtgcccaaggaccaggtcctccgcgagccacccccggaccgcgcgcgccgctacaagaagctcgctggccagcccgcgcggcgccgccgcctccgccgcgcgtgctgcctctcctgcgccgcgctcctcgccatactcctcgccgccgccgccttcgcgggcgccgtctgcctcgccttccgcccgcgcgcgccgtccttctccgtgccctccgcgctcgccatccgcggcctcgccaacgccaccgccaccgccaccggcgccgcagccccgctctcccccgcgctcgacgccgccgtgcgcgccgacaacgggcgcaacgggaaggtgggcgtggagtaccgcgcgggcggcgccgtcgcggtgtcctacgcggggcagcggctggccgcgggcccgtggcccgcgttccgccaggcgccgcggaacgtcacggtggtcgcggccgccatgcggggccagggcgtgcgcctctcggatgcgcgcaggcggcagctcgccgcggaccgggccgcgggcgccgtgccgctcacgctggaggccagggtccccgtgcgcctgcgcttcggcaaggtgctgcggacgtggaccgtccacgtcagggcccgctgcgaggtggccgtcgacaggctggacggggatgccaccgcggtcaacaggggctgcagggtcagggtcaagccgctatggtggtggtggtgatgtgatagccggcgccggcgccggcgatcgtgtgtctatacaacgttgacgttgtgaatgccgcctcaacgtaaacgcctagtaatttataagatctcttattttctcctcattttatatggtatccaagcagctaaaca

SEQ ID NO: 96802 - DNA, 76 bp, Zea Mays
ataggcagccgagaaaagttaggtttggttgtgctaactttttattggcttgcgacggtccgttggtcgttcacga

SEQ ID NO: 96803 - DNA, 628 bp, Zea Mays
gatcaccctgaaatatatcaaggtatggcaccattcaggatcgtttgtacacaaacctcgcaccctcattttcccattttttcctattacaacaaacaaaactacattgtgtctgataaaaaatccatatttaagtatcctgataatttgtttccacaaatcaacaactataacccaaaataatgtattactaatatttagagctactacttctagctttatctagaaacctatatgcatattttgtgaatttgcctggccggacccataaatgctaaaattcttttgcttaccaaacttactccaacaacttatttctttaaagttatcctatcattcatgatttttgtttgaatgctttgaaccttttcttcaaacattacctagatgcagttgccagtgttcttaataaacctgcttgtgtactgctctttccttaaatattgtcataacagtgtgttagattcttagcctcttgatgtaccttattcgagaagcactttaaattttcaattaagttttttgtaacttgaaacttagtacctgcttgccgtaattagagggaaatataaaataaacatgttatgtgtaattgtttctcttctttgaaagaatattatttctttta

SEQ ID NO: 96804 - DNA, 2169 bp, Zea Mays
gctagcctacctacacacacagcgtgtgcctgacggctgacgatgccgggtgccggccgcgccatttgtctatatataagctaattataagctaagcaatcgttcacagctagcttccctcatcttgagaaagaactcctcgtcctcgctccctccccaaccatcaagagcgcgcacgcacacgcacacgcacacgccgcgcgcaagccggccgacgtacggcatggagaagagcgctacaactggcggcggttcaagcggcggcggcggagaggctgcggaggaggcgaaggtgcctctgctgcagccgagggctgcggcggcggcggcggcggccgaggaggaccatggaggaggaggaggatacgacggcaaggcggcgcgcgtgggaggagaacaagaagctgtgggtggtggccgggccgtccatcttcacgcgcttcgcgtcgttcggcgtcaccgtcatcagccaggccttcatcggccacatcggcgccaccgagctcgccgcctacgcgctcgtctccaccgtcctcatgaggttcagcaacggcatcctgctgggcatggcgagcgcgctggagacgctgtgcgggcagtcgtacggggcgaagcagtaccacatgctgggcatctacctgcagcggtcgtggatcatcctgtcggcgtgcgccgtggtgcagctccccgtgtacctgttcacggagccgctgctggtggcgctggggcaggacccggacatctcggcggtggcggggaccgtggcgctctggtacatccccgtgctcttctccttcgtctgggccttcccgctgcagatgtacctgcaggcgcagatcaagaacatgatcatcacgtacctcgccatgctcaacctcggcctccacctcgccctgtcctggctcgccgccgtccacctccgcctcggcctcgccggcgtcatgggctccatggtcgtcgccatgtggatccccgtgttcggccagctcgccttcgtcttcttcggcggatgccctctcacctggaccggattctcgtccgccgccttcgccgacctcggcgccatcgtcaggctctcgctctcttctggtgtcatgctctgcttggaattgtggtacaacaccatactggtgctcctcacaggatacatgaagaatgcggagatcgcacttgacgccctttcgatatgccttaacatcaatggttgggagatgatgatctccataggcttcctggctgcaacaggagtgcgagtggcgaacgagctgggagctgggagcgcgaggagggccaagttcgcgatctacaacgtggtcgtcacctccttcgccatcgggctcgtgctgttcgtgctcttcctcttcttccgcgggagcctcgcctacatattcaccgagagccaggcggtggccgcagccgtcgccgacctctcgcccctgctggccttctccatactgctcaacagcgtccagcccgtgctgtcaggtgtcgctgttggtgccggttggcaaggcgtagtcgcgtacgtcaacgtcacgtcgtactacctgatcggcattcctcttggcgcagtcctaggctacgtggtggggcttcatgtgaagggcatttggatcggaatgctgctcggaacgctggtccagactatcgtgcttctcttcataacagtaaagaccgactgggacaaacaggtggtggccgctcaagagaggctgaagaaatggtacatggaagagaacagaaggatgcaggcctcgagggggaatccttgagccggtccttcaaccaacttcaagcctggcctttgtgggttgctgattgacacaattttatgctaatatttctactattcatcacctcaacatcaaagtgagcccggcattccagatcgtgtgctcctcgagccaagcaatggaaaggcactgtcactgtcagcagcagtaggataaccaaaaaaaaacattgtgttatttgctaagtgcgagtttggctcaattttcgctaagtgagagagagcctatgttggctaagtgcgactttggctcaattttgggcgtatgctaatatgtttcacaacagggcagtgcttgagatttgggatatctgtagcgctataactgactcaattttgggcatatgctaatttgctaagtgcgaacaaattcatgc

SEQ ID NO: 96805 - DNA, 2209 bp, Zea Mays
cacacacagcgtgtgcctgacggctgacgatgccgggtgccggccgcgccatttgtctatatataagctaattataagctaagcaatcgttcacagctagcttccctcatcttgagaaagaactcctcgtcctcgctccctccccaaccatcaagagcgcgcacgcacacgcacacgcacacgccgcgcgcaagccggccgacgtacggcatggagaagagcgctacaactggcggcggttcaagcggcggcggcggagaggctgcggaggaggcgaaggtgcctctgctgcagccgagggctgcggcggcggcggcggcggccgaggaggaccatggaggaggaggaggatacgacggcaaggcggcggcggatgaggagggcagggacgcgtcgtggtcgtcgctgccgctgcggcggcgcgcgtgggaggagaacaagaagctgtgggtggtggccgggccgtccatcttcacgcgcttcgcgtcgttcggcgtcaccgtcatcagccaggccttcatcggccacatcggcgccaccgagctcgccgcctacgcgctcgtctccaccgtcctcatgaggttcagcaacggcatcctgctgggcatggcgagcgcgctggagacgctgtgcgggcagtcgtacggggcgaagcagtaccacatgctgggcatctacctgcagcggtcgtggatcatcctgtcggcgtgcgccgtggtgcagctccccgtgtacctgttcacggagccgctgctggtggcgctggggcaggacccggacatctcggcggtggcggggaccgtggcgctctggtacatccccgtgctcttctccttcgtctgggccttcccgctgcagatgtacctgcaggcgcagatcaagaacatgatcatcacgtacctcgccatgctcaacctcggcctccacctcgccctgtcctggctcgccgccgtccacctccgcctcggcctcgccggcgtcatgggctccatggtcgtcgccatgtggatccccgtgttcggccagctcgccttcgtcttcttcggcggatgccctctcacctggaccggattctcgtccgccgccttcgccgacctcggcgccatcgtcaggctctcgctctcttctggtgtcatgctctgcttggaattgtggtacaacaccatactggtgctcctcacaggatacatgaagaatgcggagatcgcacttgacgccctttcgatatgccttaacatcaatggttgggagatgatgatctccataggcttcctggctgcaacaggagtgcgagtggcgaacgagctgggagctgggagcgcgaggagggccaagttcgcgatctacaacgtggtcgtcacctccttcgccatcgggctcgtgctgttcgtgctcttcctcttcttccgcgggagcctcgcctacatattcaccgagagccaggcggtggccgcagccgtcgccgacctctcgcccctgctggccttctccatactgctcaacagcgtccagcccgtgctgtcaggtgtcgctgttggtgccggttggcaaggcgtagtcgcgtacgtcaacgtcacgtcgtactacctgatcggcattcctcttggcgcagtcctaggctacgtggtggggcttcatgtgaagggcatttggatcggaatgctgctcggaacgctggtccagactatcgtgcttctcttcataacagtaaagaccgactgggacaaacaggtggtggccgctcaagagaggctgaagaaatggtacatggaagagaacagaaggatgcaggcctcgagggggaatccttgagccggtccttcaaccaacttcaagcctggcctttgtgggttgctgattgacacaattttatgctaatatttctactattcatcacctcaacatcaaagtgagcccggcattccagatcgtgtgctcctcgagccaagcaatggaaaggcactgtcactgtcagcagcagtaggataaccaaaaaaaaacattgtgttatttgctaagtgcgagtttggctcaattttcgctaagtgagagagagcctatgttggctaagtgcgactttggctcaattttgggcgtatgctaatatgtttcacaacagggcagtgcttgagatttgggatatctgtagcgctataactgactcaattttgggcatatgctaatttgctaagtgcgaacaaattcatgc

SEQ ID NO: 96806 - DNA, 2134 bp, Zea Mays
caacagtcatgttccaattgctctcttggctgctgcttcctcttcttccctcttggtcttggcggcggcttctttttcccttcttcggcgaagaaaatggccaggcacccaggcgtcgactggtcgacgacggctctgttccaacaagtccgcgtcgtcggcgtccggccgggcgcgctgcaaagtcatgacagaagaaaaaaaacatgcgcgagcgtgacgggcaagaagactccagcagatcgaggttaattgctagtacatttcaactcttggccgcggcacaaacacgtgcttgtccctctgttaattactactatattgctagatttcaactaatataggcgacaaataaaaaagaacggagggagtaattagcatctggaatcaatccatatatataggaggattacatacatatgcatctgcatgcagctgggcatggcgagcgcgctggagacgctgtgcgggcagtcgtacggggcgaagcagtaccacatgctgggcatctacctgcagcggtcgtggatcatcctgtcggcgtgcgccgtggtgcagctccccgtgtacctgttcacggagccgctgctggtggcgctggggcaggacccggacatctcggcggtggcggggaccgtggcgctctggtacatccccgtgctcttctccttcgtctgggccttcccgctgcagatgtacctgcaggcgcagatcaagaacatgatcatcacgtacctcgccatgctcaacctcggcctccacctcgccctgtcctggctcgccgccgtccacctccgcctcggcctcgccggcgtcatgggctccatggtcgtcgccatgtggatccccgtgttcggccagctcgccttcgtcttcttcggcggatgccctctcacctggaccggattctcgtccgccgccttcgccgacctcggcgccatcgtcaggctctcgctctcttctggtgtcatgctctgcttggaattgtggtacaacaccatactggtgctcctcacaggatacatgaagaatgcggagatcgcacttgacgccctttcgatatgccttaacatcaatggttgggagatgatgatctccataggcttcctggctgcaacagggtacgtacgcaaccacatcagtttcttatctttttttaataaccatgcatgcaacctaacaaaacacaacgaaccacctatctttttcagagtgcgagtggcgaacgagctgggagctgggagcgcgaggagggccaagttcgcgatctacaacgtggtcgtcacctccttcgccatcgggctcgtgctgttcgtgctcttcctcttcttccgcgggagcctcgcctacatattcaccgagagccaggcggtggccgcagccgtcgccgacctctcgcccctgctggccttctccatactgctcaacagcgtccagcccgtgctgtcaggtgtcgctgttggtgccggttggcaaggcgtagtcgcgtacgtcaacgtcacgtcgtactacctgatcggcattcctcttggcgcagtcctaggctacgtggtggggcttcatgtgaagggcatttggatcggaatgctgctcggaacgctggtccagactatcgtgcttctcttcataacagtaaagaccgactgggacaaacaggtggtggccgctcaagagaggctgaagaaatggtacatggaagagaacagaaggatgcaggcctcgagggggaatccttgagccggtccttcaaccaacttcaagcctggcctttgtgggttgctgattgacacaattttatgctaatatttctactattcatcacctcaacatcaaagtgagcccggcattccagatcgtgtgctcctcgagccaagcaatggaaaggcactgtcactgtcagcagcagtaggataaccaaaaaaaaacattgtgttatttgctaagtgcgagtttggctcaattttcgctaagtgagagagagcctatgttggctaagtgcgactttggctcaattttgggcgtatgctaatatgtttcacaacagggcagtgcttgagatttgggatatctgtagcgctataactgactcaattttgggcatatgctaatttgctaagtgcgaacaaattcatgc

SEQ ID NO: 96807 - DNA, 1958 bp, Zea Mays
cggtctgatcggcttctcgggcaagcggtactcaggccgcttttttccaatcgttgcggacgggcagccagacgacggccacggcacgagaagcaggaagagaaggctagcccatcgatccaccggctacgcaactgagtctattaaactgacaccatggtcccacgcatctaatggtggtggctgattcatcaggatccgcattttgggcccacacgccagagagaggaggtctggtagtgcgagtaccacccacacgaacaccagttcactaatcactacctctccctctccgtcgcgacacaggccacggcgggcggcggcggaggcttccgtgcggctcttggcggattgaacgcccactcgagctgcgccggctgctgtttcagccgtccttagatagaccctgctttcctcccgggcaaatccaagttgcccaaatgccgacaccagtgaagtcggtgctgcccgtagtgctcctcggctgcggcggcgtcggccgctacctcctccgccacatcgtctcctgccgtcccctccacgccaaccagggcgtggccatccgggtggtgggcgtcgccgatagctcctccctgctcgtcgccgaagatgtccactccaccggcctcgatgacgcgctcctcacccagctctgcgccgccaagtccgcaggctctcccctctcctccctgctcggccgagggcactgtcagctgttcaagaaccctgaggctaggggcaaagtcatagacgccgctaccacactcggaagaacaactggtctggtgctagttgactgttctgcaacttatgacactgttagcctgctgaaagatgctgtggatcatggatgctgtgtcgtattggcaaacaagaaacctcttaccggtgcttatgaggattttcagaagttggtctccaacttccgtcggataagatttgaatctactgttggagcaggtttgcctgtgatagcttctgtaacccgtattattgcatctggagaccctattactcgtattgttggcagtttgagtggtacacttgggtatgtgatgagtgagcttgaggatggaaagaaatttagtgaagttgtaaaaactgccaagtcccttggctatacagaaccagatccacgtgatgatctaggtggaatggatgtcgctagaaaggcattgatcctggctaggcttcttgggcaacagataagcatggagagtatcaatgttgagagtttatatcctagtgaattaggacctgatgcagtgtccacaaaggacttccttgaaagtggtttagtgcaacttgacaagagcatggaagaaagaatcagagcagcatcttcgagaggaaacgttcttcgctacgtctgtgagattgaaagcgcagggtgccaggtaggccttaaagagctcccaaaggattctgcgctgggtagattgaggggaagtgacaatgtggtcgagatatacagcagatgttaccagagctcccctctggtgatccagggcgcaggagctggcaacgacaccactgccgccggcgtccttgctgacataatcgatctccaagacctgttccagacgatggcttgatcgttgatcggcatccacaccagtacaccatcttgatttttgcaaggcaccagagcgtttgatactttgatcggtgccagtggaatccctccactgcccactggtgggcttcgctccttgtcatgtgtgcaatttgttcacgggcatgctctcaggctgagagcctgagacgtctgacattcgaaatgtaattttgagcaggcgtgtgggggatttctttacagtttacataaaggaactttgtttcagtgaaataatgtcgcggtctccacattaaactaataaacagtccgagctatattgccgctatctgatagtgaaataatgtcgctggcagcctgaaaccgtggccagtttgttgcc

SEQ ID NO: 96808 - DNA, 2393 bp, Zea Mays
cctatccgccgatggccgcggccgccgccgaggatgagaaggggctcctgtcgtcggtagtgggcgacatccggtgctactccggctccgaccccctccgcccgtggctccgggggatgcggaggatggagagggcgctgccgccagcgacgctgcgggagaagctgcccaggttcctccagaagtgcgcccaggagttccaggacaactcccgctaccgcgacgacccgcggtacctccgcgtctggatccagctgatggactacgtgacggacgcaaagccattgctcaagacgatggagaggaatggaataggcctcaaaagggcttcgttctatatggcatatgcactgtattatgagaagcacaggagattcaatgatgcagagaagatgtaccgtttgggaatccagaaccttgcagagcctattggggagttgcacaaagcacatgaacagtttcgtttccgcatggattcatacaagaagaaagataaactgcaggaaagaatgcctaggaaagtggggtctagtgctacatctatgaaccaagtcaaaggtgaaagcagacactataaagaactgaaatccaatataaagcaaacatcagaaagcagttctaatccttcattagggccaactaaagttggtgttctctccagaggaaactcaggagcaaacaataatttgccccgttgtaatagtgatgatactgtcgttgtacggtttataggctctgctttggttgggaagtcagagactgaagatgcctgtcaccacggcctagttgagccaactataaacactaaagaggctttggatgccattaatagcatgtttatggagccactggaacctgaaactgttctcaagagacaatcaaagcggcatttggtatctttgttgatgaagatgaacctagtgggcaataatactagcatgctccagaacaacagtatgaagcaaggccatacaaaattgagtcagcaaacaagtggatttgagatctttgttgatgaggatgttcctaatggcagctaccaaaatggaacgcaaaacaggaactcttcaaaggaacagagtgggtttgagatctttgttgatgaggattgcgctaatggcaacaatcaaaatgcggggcaaaacaggaattgtaggaaagaaaacacgaagttaaatcaggaaagaaataagtctgaactctttgttaaagaagatgaggctaatgacactgtccagaatgctctatgccacaagagtaataggtatcctccaaggccattattatctgattcatctaggcatcaaggcgaaagtgacttccagaagccatttgttggagggtttgcgatattgccagatgatgaagaaccatgtgagaaaagttatggtggtgctaatataaattgcagaactgtgcagcctactcataatactaataatttgctctgtccagttcaagatgattcaggaacaaggaatcgtgaaggtcctcattctgtgacttctggacttcaagaagacactgtcattcgtaggtttgttgcatcctctattgatgatgagcccaaggtggaaaatgcatggcaccatgggttagtcgacccaactgttaatctaaaggaagcaatggatgatataaacagcatgtttggaaaaccactaaacttcaagggcgaaaaaacaaagaggaaaactaatgcacactcagatggaaaagcagctccgatttctggtttctctatattagctgatgatgacctaaaagagggctgcaccagtaaagcgagtcagagcaattctttcaaatttggggatgagaatggtctatttgaacccacaatcaccactcgtgatgtcatggcagagatcaacgatatgtttggaatgccactggatttgtaagatgcatgtgtagagtgaactgaataattcaactgctagttggacaactggctttacctttccactctctccttgagaaatatgcagtgtcttgctgacgtgaagagcttggaatcagttctcttatttggtgtataagtgcagaatgttaggattctcaggtcgtcacacttcttgtggagttgcacctgccactgaataatttatcttctcaagtgaagggaagggggagtagtctgtcagaggccaccaggtgattgctgtagtgttgtcacataacgctgatctagtgatgttggctcaagactcaattttttagccagaaaaaaactgagacttgtgtgttttatggaaattgtagcaagcacaggtgcacttgttgctctgttcatcttgtatccatagttgtgctcatcaaaaacccattgtctgatgcccctatcaaattatgaaatgtaatggaataatagaaaggagtaagtgaaagaa

SEQ ID NO: 96809 - DNA, 1190 bp, Zea Mays
attcatgttgttctcgagctacgccggggcattgcatttgccatttggcaagccgcatgcagtcttacaaaaccatgctttggtgttcttggctgcttcttcagattgtatcagaattccattccatctctttcagtcttgagctgctctcagcttagaatgcccaacgagtcaacgacacagtcgcagtgaagtgcagtgcaaaagaaggtctttagtttcaccaagatcggcagatcgccaacatccgtctgcctctcctctccggtgccggcgactgacacaccacagggtcatctgcacaccaatagggtctgcgacaatgtctggacattcattctaacagatgcaaccttcaagagcgctgagattcaagaaacaccgagcaaggagggcataccgcagaaatgatgaacatagtaacaacacttcagaaggataggttcacaccaaggtactatgtggctgcacttacagacaacatgagtcttcagaaggcacaggtctatgaacaatcacttattcagagcaacggaacgaaggctggcgagagcgctcatttcatgcagatatatcgtagtcgtgaagtgggccagtcttatgttacatccatcgcaacaacattgctagccacgctgcatgctatgtggctggtgataagaatcagaccacaagtgatattctgcaacggtccagggacgtgctttcctctatgcatctcggctttcgttctgaaggtgcttggcttgggatggtcatccattttctacattgaaagcatcgcaagagtgaagaaactgtcattgagtggtttactgctgtacaagctacggatcgctgaccagttcttcgtgcagtggccccagctgcagcatgagtatcctcgagcgtgctatgcaggtcgtttgatgtgaaggcttggccaaatctggctctgtcatgcagtgttttccatctcagagattcagaatacggtggcaatctatgcacactttgacaaatgcaagttacttaagaggtaagtctttctgaatgtaagagaatacgagtgtggtgttcctgcacatttgggctaacaggggcagagttcacaccaaaattacctgatgcatttactccataacacaaagggcctgaacaattatatgataaaatttcagttcattattacataaattttcagttgattt

SEQ ID NO: 96810 - DNA, 1344 bp, Zea Mays
attcatgttgttctcgagctacgccggggcattgcatttgccatttggcaagccgcatgcagtcttacaaaaccatgctttggtgttcttggctgcttcttcagattgtatcagaattccattccatctctttcagtcttgagctgctctcagcttagaatgcccaacgagtcaacgacacagtcgcagtgaagtgcagtgcaaaagaaggtctttagtttcaccaagatcggcagatcgccaacatccgtctgcctctcctctccggtgccggcgactgacacaccacagggtcatctgcacaccaatagggtctgcgacaatgtctggacattcattctaacagatgcaaccttcaagagcgctgagattcaagaaacaccgagcaagatgggtctcaatgcggtggtagccgcctgctacgtctttccagtacttgtctctgtgctcgcagtccgcttcttctacgtactgtggcacagtggccaaccagagtcaaggttgtgcgccaccagattgcgttgtctcattgtccttggctccggagggcataccgcagaaatgatgaacatagtaacaacacttcagaaggataggttcacaccaaggtactatgtggctgcacttacagacaacatgagtcttcagaaggcacaggtctatgaacaatcacttattcagagcaacggaacgaaggctggcgagagcgctcatttcatgcagatatatcgtagtcgtgaagtgggccagtcttatgttacatccatcgcaacaacattgctagccacgctgcatgctatgtggctggtgataagaatcagaccacaagtgatattctgcaacggtccagggacgtgctttcctctatgcatctcggctttcgttctgaaggtgcttggcttgggatggtcatccattttctacattgaaagcatcgcaagagtgaagaaactgtcattgagtggtttactgctgtacaagctacggatcgctgaccagttcttcgtgcagtggccccagctgcagcatgagtatcctcgagcgtgctatgcaggtcgtttgatgtgaaggcttggccaaatctggctctgtcatgcagtgttttccatctcagagattcagaatacggtggcaatctatgcacactttgacaaatgcaagttacttaagaggtaagtctttctgaatgtaagagaatacgagtgtggtgttcctgcacatttgggctaacaggggcagagttcacaccaaaattacctgatgcatttactccataacacaaagggcctgaacaattatatgataaaatttcagttcattattacataaattttcagttgattt

SEQ ID NO: 96811 - DNA, 1686 bp, Zea Mays
attcatgttgttctcgagctacgccggggcattgcatttgccatttggcaagccgcatgcagtcttacaaaaccatgctttggtgttcttggctgcttcttcagattgtatcagaattccattccatctctttcagtcttgagctgctctcagcttagaatgcccaacgagtcaacgacacagtcgcagtgaagtgcagtgcaaaagaaggtctttagtttcaccaagatcggcagatcgccaacatccgtctgcctctcctctccggtgccggcgactgacacaccacagggtcatctgcacaccaatagggtctgcgacaatgtctggacattcattctaacagatgcaaccttcaagagcgctgagattcaagaaacaccgagcaagatgggtctcaatgcggtggtagccgcctgctacgtctttccagtacttgtctctgtgctcgcagtccgcttcttctacgtactgtggcacagtggccaaccagagtcaaggttgtgcgccaccagattgcgttgtctcattgtccttggctccggagggcataccgcagaaatgatgaacatagtaacaacacttcagaaggataggttcacaccaaggtactatgtggctgcacttacagacaacatgagtcttcagaaggcacaggtctatgaacaatcacttattcagagcaacggaacgaaggctggcgagagcgctcatttcatgcagatatatcgtagtcgtgaagtgggccagtcttatgttacatccatcgcaacaacattgctagccacgctgcatgctatgtggctggtgataagaatcagaccacaagtggtgtgtgcctagttcaggtatggtggctatttgcagcctgagttcagatactgatgttttatgatactccagatattctgcaacggtccagggacgtgctttcctctatgcatctcggctttcgttctgaaggtgcttggcttgggatggtcatccattttctacattgaaagcatcgcaagagtgaagaaactgtcattgagtggtttactgctgtacaagctacggatcgctgaccagttcttcgtgcagtggccccagctgcagcatgagtatcctcgagcgtgctatgcaggtcgtttgatgtgaaggcttggccaaatctggctctgtcatgcagtgttttccatctcagagattcagaatacggtggcaatctatgcacactttgacaaatgcaagttacttaagagcggtggtgcttgctgtagaactggcgatgtcagcgtcatgaacaagtgcatgagggctgtaactgtaagatggccctctatctcagcaattggtcccgggcttgggggcgctggagtagcttgtgccaggatcagagccgaagctagcatgtccccgtccaccggtggcgtgttcgcatgatgaaacatatggtataaccagtcaaagttaatagtgattgatttaggacaaaacccaaaaaatgggcaaacatgttgatagtttttaagttttaactagtccgaacgacatgcttgtgtcctgaggtagaggcagagctaggggtttgccaaggtatgccctggcatgcataccccacgcgcgtatccgacgtatacaaagtatgtatagaaaaataatttaaataaaaatatctaacataaaaaacgttggattttgttt

SEQ ID NO: 96812 - DNA, 2087 bp, Zea Mays
attcatgttgttctcgagctacgccggggcattgcatttgccatttggcaagccgcatgcagtcttacaaaaccatgctttggtgttcttggctgcttcttcagattgtatcagaattccattccatctctttcagtcttgagctgctctcagcttagaatgcccaacgagtcaacgacacagtcgcagtgaagtgcagtgcaaaagaaggtctttagtttcaccaagatcggcagatcgccaacatccgtctgcctctcctctccggtgccggcgactgacacaccacagggtcatctgcacaccaatagggtctgcgacaatgtctggacattcattctaacagatgcaaccttcaagagcgctgagattcaagaaacaccgagcaagatgggtctcaatgcggtggtagccgcctgctacgtctttccagtacttgtctctgtgctcgcagtccgcttcttctacgtactgtggcacagtggccaaccagagtcaaggttgtgcgccaccagattgcgttgtctcattgtccttggctccggagggcataccgcagaaatgatgaacatagtaacaacacttcagaaggataggttcacaccaaggtactatgtggctgcacttacagacaacatgagtcttcagaaggcacaggtctatgaacaatcacttattcagagcaacggaacgaaggctggcgagagcgctcatttcatgcagatatatcgtagtcgtgaagtgggccagtcttatgttacatccatcgcaacaacattgctagccacgctgcatgctatgtggctggtgataagaatcagaccacaagtgatattctgcaacggtccagggacgtgctttcctctatgcatctcggctttcgttctgaaggtgcttggcttgggatggtcatccattttctacattgaaagcatcgcaagagtgaagaaactgtcattgagtggtttactgctgtacaagctacggatcgctgaccagttcttcgtgcagtggccccagctgcagcatgagtatcctcgagcgtgctatgcaggtcgtttgatgtgaaggcttggccaaatctggctctgtcatgcagtgttttccatctcagagattcagaatacggtggcaatctatgcacactttgacaaatgcaagttacttaagaggtaagtctttctgaatgtaagagaatacgagtgtggtgttcctgcacatttgggctaacaggggcagagttcacaccaaaattacctgatgcatttactccataacacaaagggcctgaacaattatatgataaaatttcagttcattattacataaattttcagttgatttatgcatggcgcattgctcgtatcaatcgacgagttgttgctcatgtcatacgccttcttacggcgccttggatgacgcagcggtggtgcttgctgtagaactggcgatgtcagcgtcatgaacaagtgcatgagggctgtaactgtaagatggccctctatctcagcaattggtcccgggcttgggggcgctggagtagcttgtgccaggatcagagccgaagctagcatgtccccgtccaccggtggcgtgttcgcatgatgaaacatatggtataaccagtcaaagttaatagtgattgatttaggacaaaacccaaaaaatgggcaaacatgttgatagtttttaagttttaactagtccgaacgacatgcttgtgtcctgaggtagaggcagagctaggggtttgccaaggtatgccctggcatgcataccccacgcgcgtatccgacgtatacaaagtatgtatagaaaaataatttaaataaaaatatctaacataaaaaacgttggattttgtttcttttgtactgtttaggcttatggcctcaagatctacctaattaatttttgaggtagccatttagacagacaataggatcatacaatcggcaatctgacgctcatgcatgactcagagataccactggagactagactgctgggtgtaggcttgcgaaaacgacaaaatatatatgtatttgtttgtataatcatgtatgagaactgaggatttatctgtg

SEQ ID NO: 96813 - DNA, 870 bp, Zea Mays
atgggaaggccgccgtgctgcgacaaggcgggggtcaagaaggggccatggacgccggaggaggacatcgtcctggtgtcctacgtccaggagcacggccccggcaactggcgcgccgtgcccgtcagcacgggcctcatgcgctgcagcaagagctgccgcctccgctggaccaactacctccgccccggcatccggcgcggcaacttcacaccccacgaggaaggcatcatcgtccacctccaggccttgctaggcaacagatgggcggccattgcttcttacctcccacagagaaccgacaacgacatcaagaactactggaacacccacctcaagaagaagctccggaagcagcaagccatcggcgccatcttcgcgccacctcgcccctccgaacccaccgccggccatgccgattgccgtcgtcacgacatgacccgctcctccaaggacagccacgctgcttgcccggccgacagcacaccagcggctgatgaggtcgtcacccagctcatcgcccagcagttcgccgccaccgacggcgacacctcgtcgtcgtcgtcctactcgtacgcctccagcacggacaacatctccaagctgctgaacggcttcatgatgaagagcgcctcgccggcgcgggacgacgctaccgacaccatcaagacttcctcggccattgacatcgaccctttcgaccacaagtccggcggggccgcactaccaccacccaagaagcggcagcagcagcagcatctgtcctccatagagaactggttgttcgacgatgccactgagcagctcgttgtccagctgatggaggagatctccggcggctcatgctcagttcccatgctgctttattag

SEQ ID NO: 96814 - DNA, 1907 bp, Zea Mays
gttcacgcgtcctctcctctccccttcctagatcgatccatccggcacggcacgcaaccccacccggctatgctcctccctccgtcgccgcctccagtccagacatgacccgcgctgccccatggcgccccgcggccgcaccctcctcccgctcgccgcggccaccgtcctcgtcgcttccaccatcttcctcttcgccgccgccggtgcgcgctggcggcccgccgacaccgacctccccgtcccgccacacgccttccccacggccgtccccgcggccgtgaccgcttcttcttactccaacgccaccgccggcaaggagctctcctttctcgacgagaacggccgccccgatgacccctcctccgcctcagcatccagctccacctccggcgccaccccggccgctggtgtcgtcagatgtgacccccgcgacgccgtcagggtattcatgtacgacatgccgcccgagttccacttcggcctcctcggctggtcgccgccgtcccctgactccgtctggccagacgtcaccgccgcctccccgccgccgcgctaccccggggggctcaaccagcagcacagcgtggagtactggctcacgctcgacctcctctcctcctcgcccccctgcggccgtcactccgcagtgcgggtctccgattcccgcgatgccgacctcgtcttcgtccccttcttcgcgtccctcagctacaatcgccactaccggcccgtgccgcccgagaaggtcagcagggacagggtcctccaggagaagctggtgcggtacctcgcggcgcggccggagtggaggaggtacggtggtgccgaccacgtcatcgtcgcgcaccaccccaacagcttgctgcacgcccgggcggtgctgcaccccgccgtgttcgtgctgtcagacttcgggaggtaccctccgagggtagctagcttggagaaggatgtcattgcgccctacaagcacatggctaagacgtacgccaatgactcggccgggttcgatgaccggccgaccctgttatacttccgtggagcaatttacaggaaggagggagggagcattcgacaggagctatattatatgctcaaagaagaaaaggatgtttacttttcctttggaagtgtccaggaccatggggccagcaaagctagccaaggaatgcactcatcaaaattttgcctaaatattgctggggacaccccttcttccaatcgtctgtttgatgcgatagttacccactgtgtccctgttatcatcagtgacgacattgagctaccttatgaggatgtgttggattattcaaaattctccatctttgtccgttcgtctgatgctgttaagaaaggttacctgatgagactgctcagtggtgtaagcaagcaacaatggacaaagatgtgggataggctcaaagaggtggataaacattttgagtatcagtatccatcacagaaggatgatgcagtccagatgatctggcaagcattgtctagaaaggtgccatcaattaagctgaaggttcacagatctaatagattttcaagatctaacagaggaaaataaacagaaaggggtgtgtctatcttgtctctattggctaatctaatgtaacacatttcactgacacaggctctcagcctttcccagttgcacaaaatagatagattgtaatactcaggttatctttaggaaaggtttgtaccttaagatttgttggttcagttgaagcatatactgtcaagtcaaaggttgttttgtaaggtatgttaaatgtaatcatgaaagaaagacttggttttgctgtttctggaacattgtgggatgaaaccatattcttctgtggcgtagcagattttattttgcctttaatttattcagtctcaattgccatctt

SEQ ID NO: 96815 - DNA, 463 bp, Zea Mays
atgggtcccgtgctgaagcgcccgaccccgggcacagtgcagtgtttcgggcgcaagaagacggccgtggccgtggcctacacgaagccaggccgagggatgatcaaggtgaacggcgtcccgatcgagctgctccgtcccgagatgctgcggctcaaggccatggagcccgtgctgctggcggggcggtccaggttcaaggacatcgacatgcggatccgcgtgcgcggcggcgggaagacgtcgcagatctacgccatccgccaggccgtcgccaagggtctcgtggcatactaccagaagtacgtcgacgaggcggcgaaaaaggagatcaaggacatcttcatgcgctacgagcgcaccctcctcgtcgccgacccccgccgctgcgagcccaagaagttcggcggccgcggcgcccgcgccaggttccagaagtcctaccgctgagcgccagcgcctg

SEQ ID NO: 96816 - DNA, 111 bp, Zea Mays
gcccgtgcgttgcaacgggagtacgctgggatgagcatcgacacatatctaatcggatcttatatttccttgggggtctagagaaaatttactcgaaaactaaatatgtta

SEQ ID NO: 96817 - DNA, 441 bp, Zea Mays
ttggttacttacacagtaagcaatgcaaaattaaaaggagatgatgggagctgagcaaaacattaaggaacaaaacctaatcaaagatgaaaagcaggacatgcatgcaagggaggatggtggtggagaacacgaccgacggattggcaaaggcgcgaagcaaagggttttttttgcttttcttttttggtatgtagattatgtccagcccactcgccatgcatatcctctagttcgagattctttctggcaagatggtcagcggcaaaaaaaaaaaaaaaatattgaatgtgttttgggtgtcacgctgcgtgattaagggtgaaagcggccggtaacggtcggaacaaacctctcaccattttcgcccgcataaatttttgttcagtccgaatcggtaaacggaaaagtcggaaacggataacggccggtaagtttcgg

SEQ ID NO: 96818 - DNA, 715 bp, Zea Mays
ggagcacatcttgcctgacagccccttcgcatccaccaccaacaaggaggcctcagctccaacggctcagaacgggggcatcagcaatggcagccctcaccatgtggcttcttcgcccctcttcccacctgcacccgccattgagctgcccccgtacaactcctgcttctttcaggcgcccaggttttctcctgggcatgaagccattgggctgtgaatacagagcaaaaaggggtctccttttcctctaatctgggagggctatcgatgaccccatcaagtggaggaaaggagtagaaagctttgattaacaaatactaggtgtatcttcagagagggacaacaacagcagcaacaaaaaagagagagagagagagaaacaagtctaggttgttttagctctaggcctaagtatatgatagtagtcctataatataaataataatagtcttttagtagctcctgccggtatcaagattcaagtgattaaaaccgtagatggcgtagtactagtaaaaactagacagctagtcttggcagccagttgtagtgaagtgacatggctgcatacagacatccaaaggaaacagacttggtgctgctgcagctgcagtgctgctgcacaaggaaaagtgatgagaccgagacgagaggggtgtactctgctgggaccagagcactcacgggtgcagagagactccacttcacctcatga

SEQ ID NO: 96819 - DNA, 1102 bp, Zea Mays
ggagcacatcttgcctgacagccccttcgcatccaccaccaacaaggaggcctcagctccaacggctcagaacgggggcatcagcaatggcagccctcaccatgtggcttcttcgcccctcttcccacctgcacccgccattgagctgcccccgtacaactcctgcttctttcaggcgcccaggttttctcctgggcatgaagccattgggctgtgaatacagagcaaaaaggggtctccttttcctctaatctgggagggctatcgatgaccccatcaagtggaggaaaggagtagaaagctttgattaacaaatactaggtgtatcttcagagagggacaacaacagcagcaacaaaaaagagagagagagagagaaacaagtctaggttgttttagctctaggcctaagtatatgatagtagtcctataatataaataataatagtcttttagtagctcctgccggtatcaagattcaagtgattaaaaccgtagatggcgtagtactagtaaaaactagacagctagtcttggcagccagttgtagtgaagtgacatggctgcatacagacatccaaaggaaacggacttggtaggtgccgtggacaaaatccttggccggacagacttggtgctgctgcagctgcagtgctgctgcacaaggaaaagtgatgagaccgagacgagaggggtgtactctgctgggaccagagcactcacgggtgcagagagactccacttcacctcatgagcaattctgcagggaccccccctctgaatcgtaggagcatgcaccaagcactccttgtcctggtctttcaccttttgctcatcttttcacccttgtagaaaacagcaggaggtagcagacagacagaggaatgggaaaaaaagtatttattagtcgtttatcttgttggtccatgctttttatattttgcttggttcccaaattaaatgaatatatatgtagagttgtcttagctcactattttaagtttgactagcttaagtacataatgaacgtgctttgtttgctttagatgtactttaacagaactggtttttttggttctggactctaaatatgccttaagat

SEQ ID NO: 96820 - DNA, 1569 bp, Zea Mays
cgccgccagcaccgctcgtggcatctgcgtctctgccttctccaaccgccagcaccgctcccgatccaggaccaagaagcgtgtgaggagctttcagctgccacccggtgccaccatgctccggcatctccagcgatccctccgtgccattcactactcacccatcatcggccgtgatgccgcctgcaaccccattcccctccaccggttctgggattcacatatagaggtacacatgtctgcatcctaagtaattctgtttattagtcctaaactagttgcacctctggctcatgtgttttgctcatatctggtaacaagcatgccacccgagatttctctacttccacaagacttacaggacatccaatatatcagcagaatgagttagaaccaactacgcctgtgaaggatactgacataataattgaccgcatacgaaagagcacacggaaattggaggaaggccctgttggaaaaaatctgtcttcagcggagaaaaggaaatttcttgtcaacactgtatgtacagatagtattgatataattcttttaccctgtgcggaaaatattctactacgtctcaaatgatgatgatacacatgctaatgatgtgtttacaactattttgggaattctccttagccttgaagattcaagagaagctgtttatggcacccttgatgcctgggttgcctttgagcaggattttcctttggcttcactaaagcaagcactttcagttcttgagaaggaggaacagtggcatagaattgtccaggtgatcaaatggatgctgagcaaagggcaaggaaatacaatgagaacatatgagctattggcatgtgcactcgagaaggataatagagctgaggaagcacatagaatctggcagaataaagtgggccacgatctgcattcggttccttggcgtttctgccgtcttatgttggctatctactaccgaaacaataggctagacaggctcgtgaagctcttcaaagaactcgaagcttgtggccgtaaacctccaagcaaagacattgtgcggaaagtcgaagatgcgtacgaaacgcttggattactagaagataaaaaggtgttgcttgataaatacaaggatttatacaacaaaccgtctcgggacgatcggaagaaaggctccaaatccaaaaagatcgagtctgataaaccatctgatggtgacagtaaggaaagcaagatggaaacatctgagaaccttgaagaccgctgtttccctgtggatgcaaaaccagatgcctctgcttaggctcatcactgaaccaccgacgtcgccataagatttggccaaaacccggtgctgtcagcattagcgattggcgtgctctcagtacacgtttgctcccctaaccagttagtgttttttctttctctctagacatgttacaagggcatttgtatttgctgttttgcactgacatcatttttgccaagaccctaagcggtataatactgtgcgacggctatgtataatactgtgcgacgttcattactggcagcaatatacacaccccttgttcgatataa

SEQ ID NO: 96821 - DNA, 1388 bp, Zea Mays
cgccgccagcaccgctcgtggcatctgcgtctctgccttctccaaccgccagcaccgctcccgatccaggaccaagaagcgtgtgaggagctttcagctgccacccggtgccaccatgctccggcatctccagcgatccctccgtgccattcactactcacccatcatcggccgtgatgccgcctgcaaccccattcccctccaccggttctgggattcacatatagagcatgccacccgagatttctctacttccacaagacttacaggacatccaatatatcagcagaatgagttagaaccaactacgcctgtgaaggatactgacataataattgaccgcatacgaaagagcacacggaaattggaggaaggccctgttggaaaaaatctgtcttcagcggagaaaaggaaatttcttgtcaacactctccttagccttgaagattcaagagaagctgtttatggcacccttgatgcctgggttgcctttgagcaggattttcctttggcttcactaaagcaagcactttcagttcttgagaaggaggaacagtggcatagaattgtccaggtgatcaaatggatgctgagcaaagggcaaggaaatacaatgagaacatatgagctattggcatgtgcactcgagaaggataatagagctgaggaagcacatagaatctggcagaataaagtgggccacgatctgcattcggttccttggcgtttctgccgtcttatgttggctatctactaccgaaacaataggctagacaggctcgtgaagctcttcaaagaactcgaagcttgtggccgtaaacctccaagcaaagacattgtgcggaaagtcgaagatgcgtacgaaacgcttggattactagaagataaaaaggtgttgcttgataaatacaaggatttatacaacaaaccgtctcgggacgatcggaagaaaggctccaaatccaaaaagatcgagtctgataaaccatctgatggtgacagtaaggaaagcaagatggaaacatctgagaaccttgaagaccgctgtttccctgtggatgcaaaaccagatgcctctgcttaggctcatcactgaaccaccgacgtcgccataagatttggccaaaacccggtgctgtcagcattagcgattggcgtgctctcagtacacgtttgctcccctaaccagttagtgttttttctttctctctagacatgttacaagggcatttgtatttgctgttttgcactgacatcatttttgccaagaccctaagcggtataatactgtgcgacggctatgtataatactgtgcgacgttcattactggcagcaatatacacaccccttgttcgatataatgtgcgcagggaaccgagttacaata

SEQ ID NO: 96822 - DNA, 105 bp, Zea Mays
tactctctcaaaggaaggcctattgatgtatgtagtatggttccctcctgtatatggctagttttggcacttggatggatgatggtggttgaagtggaaccctag

SEQ ID NO: 96823 - DNA, 2853 bp, Zea Mays
ctccaccgctgcctggtgtgtagcgtagcgtagaggcgcggcgcggcgcggctgactggttggttccagttgttctagacaacgctggcttaaccgcgcgaggcccgaggaaagttagcttgtttcttgcagctgaatgcgggaagcaagcaactgcattttactaacctcaccacaccagacccaccactgacttcccggcctccggctctggagcagagcaggtggcagcactagcacggccacgtgcggcatgaaggggcaccagcaccagcagcagtcgtcgtctccgctgctgccgatgccgccgcccagcaagcgccgctgtagcgcgctggcggcggccgtgccggcgctcgtcgtctgctccacgctgctcccgctcgtctacctcctcgccctgcaccgccccgccgggtatggatcggacgaccgcgccgcggtggtcatcagcaccgagctcgccggcctcggggcgcgtggcagccggcatctggagaacgggggcgccatgaagcacaagctgctcaaggatgtttccaaaaaggtgtctggatctgatggggtttccgctgagagatctactagatcgaggtttagccaggatcatgctgccaaatcaaaagcaaagctcaagggcgctttctctttacttggactgaacaatgataccttcaaaggacctcgtacctccaaaaggtttcagttgaaggacctgtcctggagatcaaaggatactactgtcaatgggaaagagaaccatgatcaagagacagtgcatgaggagaataccaagtcctgtgaacatgaatatgggagttactgcctctggtctactgaacacagggaagtaatgaaggatgccattgtcaagaagcttaaagatcaactttttatggcaagagctcattatcctagcattgcaaaattgaagcaacatgaagcatttacacgtgaactgaagcaaaacatccaagaacatgaacgcatgctgagtgacaccatcacagatgctgatcttccaccattttttgcaaagaagctggagaagatggagcacacaattgtgagagccaagtctagtgaagtaggatgctccaatgttgaacggaaacttaggcagctacttgatataactgaagatgaagcttatttccatacaaggcagagtgcatttctatatcatcttggagtgcagactatgccgaaaactcaccattgcttgaacatgagattgacagtagaatatttcaagtctggatcaaatcatgtggatcagttaaatgaccagaagcttgaaagtcctgccttacatcactatgtaatgttttccaggaatgtacttgcagcttccaccactatcaattcaacggttatgaactcccaggattcggaccacatcgttttccatgtattcactgatgcacaaaacttttatgcgatgaagtattggttcgataaaaattcatacttggagtcgactgtacgcgtaactaacattgaggacaaccagaagctctctaaggatgtagattcccttgagatgcaacaattatggcctacagaggaatatcgtgtcacgattcgtaatcattctgaacctttccagaggcagatgaaaactaagtacatatctatcttcggcctttcacatttcctcttgcctgaccttcttcctggcttgaatagagtagttgttctggatgatgatttgattgtccagaaggacttgtcacctctatggaacctcgatatgggtggtaaagtgattggagcagtccagttctgtggagtgagattagggcagctgaaaccttatatagcagaccataacgtcgatgatgattcatgtgtgtggttgtcgggcctgaatgtcattgaattggataaatggagggacaccggcattaccagtttgcatgatcaatcagtccagaagttgcgaaaggacagcctgaaatcacagcgactgcaagcactccctgcaggtctacttgcctttcaagacctgatatatcctttggaagattcatgggttgagtcaggccttggacatgattatggaatcagccatgtcgatatagagaaggctgctactctgcactacaatggtgtgatgaaaccttggcttgacttggggatacttgattacaagaactactggaggaagtacatgaccagtggagagaagttcatgacggaatgcaacattcactaattaacagggcatgaaatgcaccaaacactcattttttcgggcatttggacaacagacttcatgggctttgttcatcatgaaaataaacagaatcacgcctgacctgcaacatccatgatgacacaaattcacccctgacgtgacgagggagtgctcagtccaattccaagaggagaataagatgaaatgctttctgcggaacgttgccataacagcatccacgatgtctgaaggacgctagcacgaaacctgagttatgttgcagagtaccaagatataacgtagaatatttcacactgttcattatggtttgatgagtttttttccctatattcagcttggcattgcaaaagtgcagttccttgctgttcatttttagtataagatctttggtgctattctttttgctcattgtgcaagagcaatactgagggagttcaatgttgacggcggcacatcgtgtataggaaacagcaaaccatgactgaattagcgagtatttccttgtactctttgcagcaagtcgtgtgtttgttatcgtcagatgttgatgtcccattgacgacataccaaatggtggtttgttccgctcaatggcagtctctctcaatctatctgatttgttgggatctttt

SEQ ID NO: 96824 - DNA, 2082 bp, Zea Mays
atgctatcccttcccctacgccgccgccgccgcctccttcgcttctgcgctcgccggaaccctaccttcctgcgcctctccatcgctgcctccgcggctgccctctccaccgcccctaccgtcgcttccgccgtcgtcactcccatttccgaccgcctacgcgtcctccgctccctccacgctgtcgcccctgaccaccttctctcccacccgctcccctcatccgcccatatctgcctcgccgcccacctcgctgcccgcgctcgcctcttcgcgcactcccgccgcctcctctcccgcctgcttggtgctggccaccggccccacctcgccgcctccctcgtcgacattcttcaccgcgcggccctcgcgctggggcctcatcgcagcgcgctaccttccgtctttgacaccctcctctccctgctcgccgatcacggcctcctcgacgacgccgtccgcgcccttgcccgcgtgcggcagctgcgggtgccccccaacacccgtacctgcaaccacattctgctacgcctcgcccgcaaccgccaaggcgggctcgtcaggcggctcttcgaacatctgcccgcgcccaacgtgttcacgttcaatatcgtgattgattttctgtgcaagcagggagagcttgtggaagcgagggcattgttcgtgaggatgaaggcgatgggctgctcgccggacgttgtcacttacaattctttgattgatgggtacggtaagtgcggggagctggaagaggtggagttgttggtgtcagagatgaggaagtctggatgtgcagctgatgttgtgacgtacaatgcattgatcaattgcttttccaaatttgggtggatcgagaaggcctacagctactttggggagatgaagagactgggagtgatggcaaatgtggttacgttgagcacttttgtcgatgcattttgcaaagaagggttggtccgggaggcaatgaagctgtttgcacagatgagggtgaggggaatgatgccaaatgagttcacttatacttcattggtcgatggcacttgtaaggcagggaggctagatgatgccattgtattgcttgatgaaatggtgcaccaggggttggtgccaaatgtggtgacgtacactgttatggtcgatggcctttgcaaagagggtaaggttgctgtagcagatgatgttttgagtctgatggagagagctggtgttaaagccaatgagttgctctacactacacttatccatggacacttcatgaataagaacagtgagagggctctggatttgttgaatgagatgaagaataaaggaatggaacttgatgtctctctctatggcactcttatttggggtctctgtaaagttcaaaagctggatgaagctaagagtttgttgcataaaatggatgactgtggtttgagacctaatactgtcatttatacgacaataatggatgccttctttaaagcaggaaaagagtcagaggctgttgccttactccacaagattccggattctgggctccaacctaatgttgttacttattgtgcattaattgatggattgtgcaaagcaggatcaatctatgaggccatctctcattttgataaaatgagagagttaggtctggatccaaatgtacaagtttacaccaccttaattgatggtttttgcaagattggttccttgagtaaggctgtgcacttgatgaatgaaatggttgacaagggtatgtctcttgacaaagttgtgtacacatctctcattgatgggcacatgaagcagggagatctccagggtgcctttgcactcaaggccaagatgattgaaactggtttgcaacttgatctctattgctacacttgttttatctcgggcttctgtaatatgaatatgatgcaagaagctagaggggttctttcagaaatgattgggactggcattacacctgataagacggcttacaactgtctgataagaaaataccagaaactgggaaacatggaggaagcgtcaagtcttcagaacgaaatggaaagtgttttgagctcttgcacagaagaggatactgcttct

SEQ ID NO: 96825 - DNA, 731 bp, Zea Mays
cggccttggagcatgtggcaagcacatctggagaatgggggcgccatgaagcacaagctgctgaaggatgtttccaaaatgttgttcgtgcctaatgggatttcgactgagagatctactagatcaaattgtaacaaggatcatgctatcaaatcaaaagcaacacttaagggtgctttgtctttaattgcactaaacattgtcagttacaacaggaagatggaaaataggtttcaaacactaagagagctgggatccaaaggaaaaagaagcaacccactggtgcttgaagagttcatgtgggaaaatgaatgggttgaagaaaatgaagatgatggtgacaacaacatatggtatgctgtggatgaggcattaggagcaactcaggctcttcgaggcagaaacgttccttaaatgaaggtttttgcgatgaagtggtcaaatgggccagagtcactgtacgttcttgaatcctgatgtcatcccggtcttagccaacaaagaagaattcaagggagagacatatcacatatgcaatagaggcgcgtgtagctaaaaacaagcccataacttgaagaccatgtagttttttttcagggacagcagcaacttgagagagaaccataacagtggatcttctcttgggtattggcaattccataccaagtggttatatacaggatttatgcaaagaatttgacaatgccaaacatctgccttttggagcttct

SEQ ID NO: 96826 - DNA, 3112 bp, Zea Mays
atggccagcttggcccccaagctgggcgacctgctcatgaaggagtatgtcgtgcacaagggcctcaagcttgacatcgagtccctctccagggagcttgtgatgatgaacaccgccctcgtccacgcatcccgggttccacctgaccagctcactgaggtggaaaagctctgggcacgccacatccgggagctgtcgtatgacatggaggacgccatcgacgatttcatcctgcgtgtggttggtggtggcaactctgctaccgaagacaccaaagtcttcaaggagatccttggcaaggtcagcgccgtgatgtcaatgaagaagttcaaggatcggcgtcagatctccgacaaggtcaaagacataaaaaaactctctaacgagttggctgaactttatgccaagtacacagtaagaggtgcgggtgctgatctcgccgcgagcaccggcattgacccccgtgtcatcaatctgtacaagaaagagtcggatctcgttggcatccaggagtcaagggacaaagttatcaagatgctatctatagggaccaaagatgacgatgtgcaggcgtctgatcagaatctaaagatagtgtctatagtcggagttggaggattaggtaagactactctagccaaaacagtacatgatatgctagagaagcaattcggttgttctgctttcatttctgttggtaggactcctaatctgaataagtcatttaagaagatgctagtggaactcgatcgcaattataagcaagttgacatggccagatgggatctagaccaatttgtaaacgaactgcatgaattcttacagaacaagaggtacttgatcgttgttgatgacatatgggatgatgactcatgggaagcgatcagatatgccttgaaggacaataattgtgggagtagaatagtcatgactactcgtaattccggggttgtcacgaaagaagaagaggtttacagattaaaacctctttctgatgaaaactccaaaaaattgttctacaaaagaatagagagtcaggaaggagaaagccttgacggtgaactatctagtaaaatcatacacaaatgtggcggcctgccattggctatcattgcaatagctagtttgttggctgaaagaccatgtgaggagtggtcaagagtgtatgactcgattggtcttgggaataatggtgacaatacgacaaagatactgtcatacagctactatgatctgccttcttatctcaagccatgtctgttgcaactaagtattttttccagaagactatctcattgatacaaagcgtctgatatggatgtggataagtgaaggcctagtccatcttgagaaagagggtagcctatttgaggttggagaaaggtacttcaaggaacttgtgaatagaagcatgatccagccgatacagggaaaaaatagctggtttgaagaagagttccgtattcacgacgttgtgtttgatctcatccgtaagttgtcgaaagatgaagacttcgtaacccttttggacagcaacagacaacattcatgtccggatagtttaagaagagagaagaaaacaggagtgcctcgttctgattggaagcaacgtcgactggttatcctaaatcaacgtgtgcattccagaggtgttgaggtcagcatggacatgccagaggtgttgaggacacttaacattgtacactgtaacgttacaattatggccccacttcataacttcagagtttgtcgtgtgctatgtctagtaggcagctatgtacccatcagcctaaagcatctagggaagctgttgcatctcaagttcctacagatatctgacacgactgttgatgagcttcctaaggaaattgggcacctgaggtctcttcaggcactgatattaggctatactggactagacgagctaccatcgactgtttcctcgcttactcagttgatgtgcctgacagctagcgggttcaaaaggttgccagctgacaggatggggaacttaacgtccctggaggagctacggttagagagcatagttggtcagtgtgccgcccaatccctagtggcagagcttggcaagctaacaaggttgagggtggtcagcatcaccttttcagaggagctagaagagagtttgcaagaagcactggtcaaatctctgttcaacctgcggggactccaggaactatcgctttcttctaaaatgtggcagcagggaagcactatgtggggagactgggagccaccaaggcagcttcggggcctgatcgttcaaggcattgtcttctcacgacagcctcgatggatcaaccgctcctgcctgccacacctctgcttcttatgtctgatggtgcacgctgttgaagcacaggacctagataacctagggaggttgccagagctccggtacctcaagctagagggtgtcatctggcctccaaggtatgctgttagcctggacaacttcaagaatctaagattttgcgatgtgggtacaacgctcgagtttcatatgggcgccatgccgaggcttgaagagctgcaatttgaagtttatgcagggtactggagttgggaacacaatggtgtgctgttggagcagttcccaacgaaggatgtgatcgaagatcttgacttgggcctggataacttgctttcacttgagcaagtaatagtcaaagtcaactgcttaggtgctactgctgcacaagtgcaggagctggaggctgtggccatgcgtgccgtggaaaatcatgccaaccgtccaaccataaaaatggatcgattatatgaagaaaatatcttatctgatgaaaagctggaggctctgcttcagcagcacattcaactagaaggcggcgtgctccagctgaaggataaacctgacgctttcttcatcagccagctacggttgtatcgacatcttcagaaagccgttatttcctacgactgtgcgggtgccagcatgtgtgaggtgctgaaagtggaagcagcttgtagacatgcagccgaggttcatcctaaccatccaagtattgaactgatcagaacaaataccgatgaaatggcctcctcatctgaccatcctagcacagaggtt

SEQ ID NO: 96827 - DNA, 3553 bp, Zea Mays
atggagctcgccttgggggccatggccagcttggcccccaagctgggcgacctgctcatggaggagtatgtcgtgcacaagggcctcaagcccgacatcgagtccctctccgatgagcttgtgatgatgaacgccgccctccttgacgcgtcccggattccacctgaccagctcactgcggtggaaaagctctgggcacgcaaggtccgggacctgtcgtatgacatggaggacgccattgacgatttcatcctgcgtgtggctggtggtgacaactcagccaccgactccaaactcttaaagaagatccttgtgaaggtcaaggacgtgatgtcaataaagaagctcaaggatcgacgccagatctccgacaaggtcaaagacatcaagaaactctccagtgagttggctgagcttcgtgccaagtacacagtaaggggtgcaggtgctgatcttgctgcgagcatcggcattgacccccgtgtcatcaatctgtacaagaaagagtcggatctcgttggcatccaggagtcaagggacaaagtcatcaggatgctgtctttagggaccaaatatgatgatgcgcatgcgtctcatcaggatctaaagatagtctctatagtcggggttggaggattaggtaagactactctagccaaaacagtgcacgatatgcttaagaagcaattcagcccttctgcttttatttctgttggtagaactcctaatctgaatagaacattcgagaagattctagtggaacttgatgccaagtataagcaagttgacatgaccagatgggatctagaacaatttggaaaagaactgcatgaattcttacagaacaagaggtacttgatcgttgttgatgacatatgggatgttggatcatgggaagcgatcagatatggcttgaagaacaataattgtggaagtagaataatcatgactactcggaattttgagcttgtcacgaaagtagaagaggtttatagattaaaacctctttctaatgaaaactctaagaaactattttacaaaagaatacaaagtcaggaaggagaaagtcttgatgatgaactgtccactgaaatcatagataaatgtggcggcataccattggctatcattgcaatagctagtttgttggttgaaagaccatgtgaggagtggtcaaaagtgtatcactcaatcagtcttgggaatggagacaatacaacaaagatattgtcctacagctactatgatcttccttcttatctcaagccatgtctactgcaactaagcatatttcctgaagactatcagtttgatacaaatgctgcaatatggatgtggataggtgagggtctagtccatcttgagaaagaggagggtagcctatttgtggttggagaaagatatttcaaggagcttgtgaatagaagcatgatccagccgatagaggacaaatatgatcggttggtagaagtattccgtattcacgacattgtatttgatcttatccgtaagttgttgaaagatgaagacttcattacccttttggacagcggtgggcaacattcacctcaagctagtttaagaagagagaagaaaacatgtgtgcctcgctctgactgcaagctacgtcggctggctgtccgaaatcaccatgtgcagcgcttccctgaagacatcatggacataccagaggcgttgaggtcacttaacattatatattgtaatattgcgattatgaccccacttcatagtttcagagtctgtcgtgtgctatgtatagaatacagctatgtaccgatcagcctaaagcatctagggaagttgttgcatctcaagtacctagagctatatggcacgcctgttgatgagctccctaaggaaattgggcatctgaggtctcttcagacactgttattagtcaatactggactagacgagctgccaccggctgtttgctcgcttacacggctgatgtgcctgatggctgaggggttcaaaaggttgccagctgacaagatggggaacctaacgtccctggaggagctacggctagagagcatagttggtcagagtgccacccaagccctagtggcagagcttggcaagctgacgaggttgagggtggtcaacatcaccttttcagaggagcttgaggagagcttgcaagaagcattggtgcaatctctgttcaatctgtggggacttcaggagctagcactttcttctaaatggtcgcagcagggaagcgctatgtggggagactgggagccaccaaggcagctcaggcgcctgattattaaaggtatcatcttctcacgacagcctcgatggatcaaccgctcttgcatggcacacctctgcttcttatctctggcggtgcacgctgttgaagcacaggacctagataacctagcgaggttgccagagctccggtacctcaagctagatggtgtcagctggcctccaaggtatgatactggcccggacgacttcaggaatctgaggttctgcgatgtgggtacaatgctcgtgtttcatatgggcgccatgccaaggcttgaagagctggtgtttggagtttgtgcaggatactggagttgggaacacaatggtgtgctgttggagcagtgcccaacaatggatgtgattgaagatcttgacttgggcctggataacctcctttcacttgagcaagtcacggtcgtagtcgactgttcaggcgctactgctgcaaaagtgcaggaggtggaggccgtggtcatgcgtgccatggaaaatcatgccaaccgtccaaccataaaaatggaacgagtatgtgaaaacttcatcttatctgacaaagagcaggaggatctggtgaggctgttcttgtcgagtctgctaaagaaaatacgttgtcttaattatatatgactatatgttcatgggtactacttacctgtatgtttgtgtacttctcagcttcagcgacgcattgaaaaggaaggccgcttgctcgagttcaaggataaatctgatgctttcttcatcacattcctgcggttgcttcgacatcctctaaaatccgttatttcccacgactgtgcgggtgccagcatgtgcgaggtgcagaaagtggaaccagcttggagacatgcagccgaggttcatcctaaccatccaagtattgaactgatcagaaaaaacaacgacgaaattgcctcctcatctgaccatcccaacacagagctcaggaattgataactcggtatgtccaatccttccaaaccagccgcagctttcacgttgtctcatcccttcctacgggcttggagattttagatgctatatttatcgagtgatctagacgacatgattgagggtctatatatcgtgtgtttatgacttatgtattgtgaggttaaaatttatgagaggacatgtatgattcattatgtgtggtcaagattgcattgtgtgtaattgagatttgtatgtggatgtaaatgaataattgtgtgtttaagatttatgtattgtgtggttaaaatttatgagtgaacatatacgatca

SEQ ID NO: 96828 - DNA, 617 bp, Zea Mays
gtgaatacctaaccccctggtttttaggtagactgagtatgttccacctagcaagacgatattttttcttgtactcgtccccttgacaaataaagcgggaacgaaagaaatccagctttttcagaacgcctctggacgtactaaagaaatacatcaatgagactggtgagtactgcatttaaacaacttgcattttgtaaacgtcatgtaatttaaacagtttgcatttgtaaatagtttccatttgtgcatttttcatttgtaaaaatcatgtaatttaaacaattctcgtttgtaacaatggaatatttttttttctgacattgtcttgtgtccttacatttcagctttcacgttgtctcatcccttcctacgggcttggagattttagatgctatatttatcgagtgatctagacgacatgattgagggtctatatatcgtgtgtttatgacttatgtattgtgaggttaaaatttatgagaggacatgtatgattcattatgtgtggtcaagattgcattgtgtgtaattgagatttgtatgtggatgtaaatgaataattgtgtgtttaagatttatgtattgtgtggttaaaatttatgagtgaacatata

SEQ ID NO: 96829 - DNA, 1054 bp, Zea Mays
ctgctccctcacgtcaatcctatatactctcgcaccaccaccaccacaccttctcttcctcttccttttcctctgcatccatcatcctcagctcctaccatgagtacacggatacacccttcgtcttcggacgctgccggccgtgcccatcgtcgtcgtcgggctgctgctgctgaacgggaacgccggccgccggcggtgtacacggtgtggaagaggtccagcatgggcttccagggcaccgacggcttctgcgtctacgacgacgccggcaggctcgcgttccgcgtcgacaactactcccgccgccgcaagctctgcgccggcgacctgctgctcatggacggccaaggcacgcctctcctctccctcaggccacagcttctcagtctgcacgaccgttggaactgctacacagcaacggaagacgccgtggtcgacaagaaggcgcctcccgcgtcttcggcgcagcagcaggtgttcacgatgagcaggtgctcagctctgcgtagcagcagcgacaacgcggaggtgcacatgtcagcctcaagaccgggatccgctgctgctgcgtcgtcctcgtcctcctctctcagtctcagctgcaacaagcacaacccgcaggccgccgctcccggctaccgggtggagggctccttctcgaggcgaagctgcaagatccggcgcggcagcgatggcagggaggcggcgcggataacgaggaagagcgccggcgtggcgtccaggccggtggccacgctcggggacgacgacgtgttcagcctcgtggtccggccgggcgtcgacgtggccaccgtcatggccatcgtcgtcgtcatggacaggatctgtcgcaggccgtacacgcccatggtgtgcccttcgcagtgcgagtagtaatgagaaacgtgtataagtgttctgattttgacattgcatttgctaattgctagcacctctcctagctagtggtgtgggggaatgaggatacgggatacctgaagacaactactacttttgtcagtgctgcatctcctgatcagcagcatctaat

SEQ ID NO: 96830 - DNA, 122 bp, Zea Mays
aacccatacgggactgctctaatagggtgtttggttaccccaaactaaaatttagcccatgtctcatcgaatgtttgaaccttcgttccgggtattaaatgtagtcggattataaaactaat

SEQ ID NO: 96831 - DNA, 2804 bp, Zea Mays
aagattgtgcctatatcgattgttctagttttgaggcaaataacatcccacggtctatccgttacctatccatttccatgcaagatcattgtgctcagaatttcgaggaacaaatgggaaaactgaaagaaaagatatacattaacaatttgcggagtttgatgatatttggaaaatacattatgttacatctgctcaatattttaagggacacatttaaggaaataagacgtcttcgtgttctatctatattcatatactcccatagttccttgccaaacaacttttcagagcttcttcatctccgctacttaaaacttttgtcaccttattactcagaaatgtcattgccaaacacggtctcaaggttttatcacctgaaatttctagatcttgaacaatggggaagtgatcgttctttgcctaaggacattagccgccttgaaaatctatgccattttgttgtttcggaaaagattgattccaatgttcctgaggtggggaaaatgatcttcttacaagaattgaaagaattccatgttaataaagagagtgttggatttgagctacaagaattgggtaaactagatgagcttggagggaagctcaatatatacgggcttgaaaatgtgagaaccaagaaagaagctaaagaggccaagctgatgtcaaagaggaatttagttgagttgggattaatttggaacatgaaacaagagtccaccgaagatgatatcctagatagtatccaaccacactctaatgttaggagtctttttattgtaaatcatggtggtaccctcggtcctagttggttgtgcagcagcgacaccatatacatgaaaaacttggagactctacatctagagagcgtatcgtgggctaaccttccacctattgggcagttctatcacttaagagagctaaggctgagtaaaattgttggcatatcacagattggacctggcttcttcgatagcacgacagaaaaaagtgtctcacacttgaaggcagttgagtttaatgatatgccagagcttgtcgagtgggttgggggagctaactggaatctgttctcaggaattgaaagaatcaagtgtactaattgtcctaggctgacagggttgctggtttcagattggtctatttcttctatataagacagcactgtatggttccctaatcttcatgacctttacatttatgaatgcccgaagttgtgccttccacccttgcctcacacttcaaaggtatcccgtattcatatgggagacttttcttatgaaggtcgtaccatgttgaaaattaataacccctctagatttgccttcgaaaatctgggtgacctagagacattggtagcttgggatgcactacccttgtcctttatggatcttaaaaagctacattccttgagacgtataaatgtcactagatgtgaggaaacatttttgagaggactggatgatggtgttgtgctacccacagtccaatctctctaccttggacgatttacacctaccaaaaattatttgtcaaaattattcaaatgttttccagcactttcttctttgcatgtgatggcatcaccatcagatgaggacaacgaggaagtggtactgcattttccaccctctagctcgctgagagatgtcaacttcacagggtgtaagaatctgatcctacccatggaggaaggagctggattctgtggcctctcgtcgctcgagtcagtgaccatacacaaatgtgacaggttattctctcgatggtccatcggaggacgagcaactcagactcagagcatcatcaaccctctcccaccctacctgaggaaactcttcctttcttatatggaaactctgcctcaggaagctctgctcatgaatttgacatctcttgagaaactcacactatgtaattgtcttggctgtgagcaaagcaccgagcgaatggctgtactcgcgaatctaacatctcttaccacgctatatttatataattgcagaaatatcacaatggatggattcaatcctcacatcacatccagcctcaagtatctatgcgtgtacaatgagagaaatgatggaactgatccgtattctgtagcagcagatctacttgtagcggtggtgaggaccaaaacaatgcccgacgtttccttcaaactggtgggactttatgtggacaacatctcgggagtgcttgttgctcccatctgcaagctgctctccgctaccctcgagacgttaaacttcagtaatgattggcggacagagaacttcacgaaagagcaggacgaggcgcttcagctcctcacgtctctccaattccttgagttttataactgcagggctctgcagtccctcccccaaggactgcaccgccttccttctctccacggaataactatctatgggcctcaaaacattagatcactgcctaaggagggcctccccgattcactacgaatactacgtataactaactgttgtgctgagatttatgaggcatgccagcaattgaagggaacaaggccagatataaatgtacttgcctccaaagctcgtgtgcaaaattgaatacctgcttctgcatgtcttcacagtcagctctgcttcaacatgcctttcactctacaggttagttgcaaatatatctaaaaacagctcattatgttgagtgatttatgatttcgttgactgcgaaccgaactgtttttttattttttgcatatcgatatgttccatcctcagatgctattgtattacaactgccaactggagccaccattcataattcct

SEQ ID NO: 96832 - DNA, 2210 bp, Zea Mays
aaatgtcattgccaaacacggtctcaaggttttatcacctgaaatttctagatcttgaacaatggggaagtgatcgttctttgcctaaggacattagccgccttgaaaatctatgccattttgttgtttcggaaaagattgattccaatgttcctgaggtggggaaaatgatcttcttacaagaattgaaagaattccatgttaataaagagagtgttggatttgagctacaagaattgggtaaactagatgagcttggagggaagctcaatatatacgggcttgaaaatgtgagaaccaagaaagaagctaaagaggccaagctgatgtcaaagaggaatttagttgagttgggattaatttggaacatgaaacaagagtccaccgaagatgatatcctagatagtatccaaccacactctaatgttaggagtctttttattgtaaatcatggtggtaccctcggtcctagttggttgtgcagcagcgacaccatatacatgaaaaacttggagactctacatctagagagcgtatcgtgggctaaccttccacctattgggcagttctatcacttaagagagctaaggctgagtaaaattgttggcatatcacagattggacctggcttcttcgatagcacgacagaaaaaagtgtctcacacttgaaggcagttgagtttaatgatatgccagagcttgtcgagtgggttgggggagctaactggaatctgttctcaggaattgaaagaatcaagtgtactaattgtcctaggctgacagggttgctgttgtgccttccacccttgcctcacacttcaaaggtatcccgtattcatatgggagacttttcttatgaaggtcgtaccatgttgaaaattaataacccctctagatttgccttcgaaaatctgggtgacctagagacattggtagcttgggatgcactacccttgtcctttatggatcttaaaaagctacattccttgagacgtataaatgtcactagatgtgaggaaacatttttgagaggactggatgatggtgttgtgctacccacagtccaatctctctaccttggacgatttacacctaccaaaaattatttgtcaaaattattcaaatgttttccagcactttcttctttgcatgtgatggcatcaccatcagatgaggacaacgaggaagtggtactgcattttccaccctctagctcgctgagagatgtcaacttcacagggtgtaagaatctgatcctacccatggaggaaggagctggattctgtggcctctcgtcgctcgagtcagtgaccatacacaaatgtgacagaaatatcacaatggatggattcaatcctcacatcacatccagcctcaagtatctatgcgtgtacaatgagagaaatgatggaactgatccgtattctgtagcagcagatctacttgtagcggtggtgaggaccaaaacaatgcccgacgtttccttcaaactggtgggactttatgtggacaacatctcgggagtgcttgttgctcccatctgcaagctgctctccgctaccctcgagacgttaaacttcagtaatgattggcggacagagaacttcacgaaagagcaggacgaggcgcttcagctcctcacgtctctccaattccttgagttttataactgcagggctctgcagtccctcccccaaggactgcaccgccttccttctctccacggaataactatctatgggcctcaaaacattagatcactgcctaaggagggcctccccgattcactacgaatactacgtataactaactgttgtgctgagatttatgaggcatgccagcaattgaagggaacaaggccagatataaatgtacttgcctccaaagctcgtgtgcaaaattgaatacctgcttctgcatgtcttcacagtcagctctgcttcaacatgcctttcactctacaggtaaatactgtgaaaacatcttcctatacgtgagatagttgatcttcatcgattctacagccaggatgatgtcttattggatgatgtgttggtcatggttggcacaaaattcagtagactatgcttcatcgtaatgttgcacagcgttcaaggcaataaacgagaacaagcatgggatgtggaaaattttagaaagtaaagacaagtgaattcttgacgacgttggcttggcaccttagtttgagt

SEQ ID NO: 96833 - DNA, 1945 bp, Zea Mays
caccctaatcttctttgttatgacatttattgtttttttcatgaactacgtacatcttaattttcaattcatctagaatactgaataggtgatgattcatcaccaaattgataagtgaatattaatacatctgaaacctaaaattaaatatatattatataagttgttgttaatgttcattccatttttgaacacttgcatgaattttagttctctgtttcttttgaaaaattctgtgttgcaaaaatataaatttatatgaaaatatattatatggtgatgagaagtttgagtttagtatatggtttcatattagctatacattgttggtactatcggcttgttctctttttgtttgaaaaaaatactatcggcttgttcttaaggacacataaaggactagttcggaagcaagagaattagaggagagatggctaaaatccccttcctaattaaataggaagggaatttgagcaccctcaatcccctctaattcccttgctttcaaactagcccaaagagtgtcactgcatcctctgaattatgatatattgaacatggtgttataattgtgaaccgatgagtataacttattttctccatattctgaacaacccattacttaaacagatttgcatcctactggagacattgctggcagaggaattgagactggcataggagaactcaatatatgcttgtgaataacgcatccagtgaaagatagtagattttcatcaattcactacccaggatgttgtcgcattggatgagaatgacatggaagacggcgaactagaggaagacaacaacctcatctaagctgaaaatgtgttgcctgtggttgaagaaaatctagcagatgaacaacactgccttccctgtcctctctagacctgaatctctctgatggtttggattcgtccatgattgatcctgtacgatgaaggatcagctcgtccaacgtttttcaaggaacgaactcaatctgaggaattaccttttcattggtcacctggggtactacgaggaatgacttcacgatagacgactcggttttgcgacgcaaaccaaacgccatggttaggctcagatgttggatcagatgattcctcgtggcttcgtgacgcaaaccaaacgacatggctaggctcagatgttggatcgtatgatttctcgtggcttcgtgacgcaaaccaaacagcctgtaagtccgcacaccttatctatcatggtcattgttgagctgatcagtaattggagtcgtgtgataagcttaatggacctcctatttgtcgtgatcttcacagatcaacaagtgagcggcctttgcatgctgcatgagatcaagcaagccgccgactggcaatgctccacctgccattcagttcgttggtgaggtattaatcaccagccatgttggcacttggcggcatgcagatggagcagaacatccaggtgaagcggacagatacatgatcgatcatgagttggcgcagacacaggccagacaaccagaggctatattccaattcatacattccatgataagcaaaggaagatccaagacaacacaaatatacaaatagttagttatacaagcaaaaatcctgttgttttgtgcctcccattttctagtccagaattaatatgacaatttttcactgaaactggttggatcagagaccaggaaaaaaagggaaatgacaactacagctgtgttttttttttcaaagaaggcagctgcccgtcgatgatgtgctcacttgaggatttcctctgccttttcagtgacactgcttcatccttttcagagtcaaatgaatctctacctcatttcactgcacatacttccaaactgatttgctgtaacatacttgagtttcggtatgacattaatttttaactcataagagaacaaaatcagaagaaaaaaaaacaacaa

SEQ ID NO: 96834 - DNA, 690 bp, Zea Mays
cagatgttggatcgtatgatttctcgtggcttcgtgacgcaaaccaaacagcctcatgctctagccaaaggcatgatcgtcatcgttctgaaacaaagaaaatgatgtgtattcctttcagtgagcggcctttgcatgctgcatgagatcaagcaagccgccgactggcaatgctccacctgccattcagttcgttggtgaggtattaatcaccagccatgttggcacttggcggcatgcagatggagcagaacatccaggtgaagcggacagatacatgatcgatcatgagttggcgcagacacaggccagacaaccagaggctatattccaattcatacattccatgataagcaaaggaagatccaagacaacacaaatatacaaatagttagttatacaagcaaaaatcctgttgttttgtgcctcccattttctagtccagaattaatatgacaatttttcactgaaactggttggatcagagaccaggaaaaaaagggaaatgacaactacagctgtgttttttttttcaaagaaggcagctgcccgtcgatgatgtgctcacttgaggatttcctctgccttttcagtgacactgcttcatccttttcagagtcaaatgaatctctacctcatttcactgcacatacttccaaactgatttgctgtaacatacttgagtttcgg

SEQ ID NO: 96835 - DNA, 1816 bp, Zea Mays
atcgtttctgtccaggtcggcggcccgatttgttgccgggcgtcgtcctcgcccccgccctgcctgccactcctcgtaggactcggtcctgtccggactcccgctccacctgtcccctcctcgcttccatcgccattgccgccctcattttgcccccctcccgctcgaagccgcctgctgctttggaccgtgccgagcggggcggcgtaaatgcccgcccgtgcagaggatcccagacagccttctccgcccccaaaccccgtccttgtttcccaccaattaggagcaggggaaggttctcgcacgcgtgcccatcctaccaacggccaattccagatgcggagggcgtcctgactccacctgccaagctccggcctctgctctgctccgccccgcaccccacccgccgacatgggcttcttgatctgccgcgtctgcctcctccaactgctgctcctcctcctcctcgccttcacctcctcaccagcgtcagcgcagccggcggcgccgcccggcagcgccagggcgctggacgcggcgctgcaggagtacgcgttccgggcgctggcggcgcggccgcgcacgggcattatctacaacgccaccatcccatccagcctcgcgggcgtggcggcgtccgcgctgcgcctgcgcagcggcagcctgcggcggaagggcgtcgcgggggggtacttcaacttcgcggtcccgcccggcgtcgccacgcggccgcgcgtcgagcgggtggtgctcgtgtaccacgacctcggcaacctgtcggaccgctactacccgctgcccgccgggtacgcctacgtggcgccggtggtggggctgctggcctacgacgcggccaacctgtcggccgccgccgccgccgccggggggctgccggagctcggcctcgtcgccgcgtggggcgccccatctccgtggccttcaacggcggcggcggcggcggcgccgcggcgcggtgcgtggtgttcgggctggacggcgtgccgcggttccgggacctggaggagggaggcaacaacgtgtgcgcgacgtacgagcaggggcacgtctcgatcgtcgtgaactccagcggcgggagcgccccgggtccgcctccgcctccgcctccggctggcgcgatcgccccgccgataccgacggaggagggaggtgagaagaaggggggctcgggctcggcggcgtggaaggtcgccgtcgccgtgggcgtggttgcaggtgcggccgccttggggctggtgggcgcgctgatgctgtgcttggtgcggtacaggagggacaagaagcttgaggccatggagcggaacgcggaggccggggaggcgttgcgggtggcgcgcgtcgggcgggcgcaggcgcgggcgcccgtggcgtccgggacgcggacgcagccggtgatcgagaacgagtacgctgcgtcctagtgtgtgtgtgggggggggggggctttctgaagacttgatggttagcttgtgctgacaggagctatgctgctgctacctgctaatatgagaaaccaggttctggtccgtgaggggtttagggcattcttttgttgatcggaaggttaggttttgataccattcatgttcatagttggttgccgtgttcttgttcatacgtggggaacagttcctttcgtctccaactccaagcaagcaatggagggcaaaatgtctgcagttgcatttctttccttttttttctgcggcatttgatgactgcctagccggttgtagtggctgtgtaaaaacgttcgcttgtctagtgctgtgataattagtctggtaattggtgtgat

SEQ ID NO: 96836 - DNA, 3857 bp, Zea Mays
caagcagcagccagcagctgactgtctgtctgtgagccattgccattccaaggcaccaccaggcatactgacagtggagcaggcggtgtcccctagtcacccggcgattcctcttcccttcctccccccaccgtcgtcgagtccgagtcgcttttctctctctctctctctctctcttgggtttctctctgtctgtctgtctctgacactcactcactctctctctggcccaggccgcgctcagctaatctcgttcctaatcccccccgcgtcaagatcaagacataacacaacacaacacaacagacgatgctctgtcgctgtctgcactctctatcgtcttccttccgtccgctcccctcccagcaggccagcaggctcccagtttgttttgccacgcgccgacgacgacgaccagccgtcattccttggcctcgtccgtttccctcctccagaccagaccagacctccaccgctgagagcatttcagagagagagagagagagagagagagagagaggagagagagagagagagagagagaagaggacgtacgacgaggagggcaatggggatgggcagcgacgccgccgcgctgttccccttctccaccagcaccaccgccacgtcgccgcggctctgcggcgccaccgccgtcagccacaggaggatattctcagacgtcgctgaggacgtgacggtgtcggtggacggccagtcgttcctgctgcacaagttccctctggtgtcccggtgcgggcggatacgcaagatgttggcggactcctccagctccaacagcaaggacgcagacggccaccagaagctggagctggcgaacgtgccggggggagcctacgcgttcgagctggccgccaagttctgctacggcacaaacttcgagataaccgcggcgaacgtggcgcagctgcggtgcgtggcggagtacctggagatgacggaggaccagcacgcggacaacctggtggcgcgggcggaggcgtacctggccgaggtggcgctgcggagcctggacggggcgctggaggtgctgcgcaggtgcgacgacggcgggcccgtggcggagcaggtcgggctggtggcccgctgcgtcgacgccgtcgccgccagcgcgggcaaggagcagctggtctccggcctggcggcgcacctggagacgtgcgactgcgccgccgccgcgcgctgccgggaggactggtgggtggaggacctctccttgctccggatcgaccactaccgccgcgtcatcgccgcgatgcggcggagcggggtccggccggagaccatcggcgcgtccgtggcgcactacgcgcagacgtggctcaagggcgtggacgtggagcagcggcggcgccagcgcgcctgctgggacggatcgggcccgttcgtcggcgacggccagcggatggtcgtcgagacgctcgtcgacgtgcttgccacggagaacgtcgcggccgtcacgctctccttcctgttcggcatgctgcgggtcgccgtcgaggtcgacgccagcctcgactgccggatcgagctcgagcgccgggtcgggatgcgcctggagatggcggcgctcgacgacctgctcgtccccgccgcgcagaccagcgactccatgttcgacgtcgacaccgtccaccgcatactgctcagcttcttgcagaggattgatgaggatagctcgggggacctgtcgtctcccccctgcgggtacgactccgacggcctcaagtctcccagccacggatcggtgctcaaggtcgggaggctcatggacggctatctcgcggaggtggcgccggatccgtatctcaagctgcagaagttcatggcccttattgagctgctcccggattatgcgcgcattgttgatgatggcctctatcgcgccatcgacatatacctcaaggtaaagccattagattacaagtgtcacactttttttttctttttcttctgtagctgtttcagtgaatacagagcagagatcagagttccatattctaagtatctatcttatattcagtcttgatggaactgtgtatatgcaatcaaatggaatgaatgaattctagctggtcgctggaccttgatctgtgtctgcttaaacttttccagatcaatgtatatgcctggagttaagttgcataaaaattgacaaaaaaaacatgatatttgtaggatcaatcagaacaagtttagctgatcaaatagaataagaacatattttatttagtgtcaatgaattccattcctgagcaggcatatttcccatgcaattagatagcatggaaatatgtgtatgcaataaaatactatactctagccgaccactggacttggatttctgtgtggttgaaaacacaattgtctgatcagtcttcaggcctgaaggtaataacatcttgcctgatcaatctttactatgtctgacggtagcctgaagccctttgtaatcaggccaagcgcatcctttgcactagctgtttgctttgtcatttcttgatcggttttgtgtctagagaaagaactcgttggctgaccaaatgttttgctgcgggggggaaaaaaacaaacaaaaacaggcgcatccatctctgacggagtcggagtgcaagcggctgtgcaagctgatcgactgccagaagctgtcgcaggacgcgtcgagccacgcggcgcagaacgaccggctgccgatccagatggtggtgcgcgtgctctacttcgagcagctccgcctcaagtcgtccttctcgggcggcgggtccgggtgcgtcggcttgggcggcgccgacgggtccttctcgcagcggttcgtgtgcagcagcagcggcgtgccgagctcgtgcgtgtccccgcagcgggacaactacgcgtcgctgcggcgggagaaccgggagctgaagctggagatctcgcggatgcgggtgcggctgacggagctggagcgggagcaggggctgatgaagcagcaggggaggatgcgcggcggggacggcggtggcggcggcgggcggggcggtggcggcgagcacggccgcgccttccttgcgtcgctgtcgaggggcatcggccgcatcaccatgttcggcggcgggcctgcggcggccgacaggcggcgcaagaagagcggcggccggagctcccagtgctccgacggcaaggcccgcaggcggcagaaggcgtccttcgcctatgactgaagcttcgctgctggcgtcgacaatggaggcgcggcaggcggcgatcgtggatggatgcggtctcagcgtctggaggatcggtcggagctaaagcagggacggtggctgctgacagctgagtgggtgacgatgatcaagaattcaagactgcggttttagctgttggtgatggcagtccgtcgctcagacgaacaaacaacagggaggaatggaacggatcaggaggagtttattgcaggaaatgctacaggctagcgagagattttttagcatgcaggaacgacgcaggatcagtaaagtagtgtagcaaactgttttagcctgaactctgaatgcctgctttcactggattgcatttgcataatgcatccatgcatcgcagtatcgcacagctttaacgcgcgaaaacggaaactagcgttacgaccacaccgttctggagaacggagatgtgccgttctggtaaattctagagcatggcaaaagacatatttcaccgtttcctcaaagtgtggaattatatttgcgtacatcgctatggttttatataccacatatgtatatcttattcaaattcgatagttatttaaaaatgtttcaaatctttactataaacatgcaaaaaagtcttgagca

SEQ ID NO: 96837 - DNA, 1549 bp, Zea Mays
agaggacgtacgacgaggagggcaatggggatgggcagcgacgccgccgcgctgttccccttctccaccagcaccaccgccacgtcgccgcggctctgcggcgccaccgccgtcagccacaggaggatattctcagacgtcgctgaggacgtgacggtgtcggtggacggccagtcgttcctgctgcacaagttccctctggtgtcccggtgcgggcggatacgcaagatgttggcggactcctccagctccaacagcaaggacgcagacggccaccagaagctggagctggcgaacgtgccggggggagcctacgcgttcgagctggccgccaagttctgctacggcacaaacttcgagataaccgcggcgaacgtggcgcagctgcggtgcgtggcggagtacctggagatgacggaggaccagcacgcggacaacctggtggcgcgggcggaggcgtacctggccgaggtggcgctgcggagcctggacggggcgctggaggtgctgcgcaggtgcgacgacggcgggcccgtggcggagcaggtcgggctggtggcccgctgcgtcgacgccgtcgccgccagcgcgggcaaggagcagctggtctccggcctggcggcgcacctggagacgtgcgactgcgccgccgccgcgcgctgccgggaggactggtgggtggaggacctctccttgctccggatcgaccactaccgccgcgtcatcgccgcgatgcggcggagcggggtccggccggagaccatcggcgcgtccgtggcgcactacgcgcagacgtggctcaagggcgtggacgtggagcagcggcggcgccagcgcgcctgctgggacggatcgggcccgttcgtcggcgacggccagcggatggtcgtcgagacgctcgtcgacgtgcttgccacggagaacgtcgcggccgtcacgctctccttcctgttcggcatgctgcgggtcgccgtcgaggtcgacgccagcctcgactgccggatcgagctcgagcgccgggtcgggatgcgcctggagatggcggcgctcgacgacctgctcgtccccgccgcgcagaccagcgactccatgttcgacgtcgacaccgtccaccgcatactgctcagcttcttgcagaggattgatgaggatagctcgggggacctgtcgtctcccccctgcgggtacgactccgacggcctcaagtctcccagccacggatcggtgctcaaggtcgggaggctcatggacggctatctcgcggaggtggcgccggatccgtatctcaagctgcagaagttcatggcccttattgagctgctcccggattatgcgcgcattgttgatgatggcctctatcgcgccatcgacatatacctcaaggtaaagccattagattacaagtgtcacactttttttttctttttcttctgtagctgtttcagtgaatacagagcagagatcagagttccatattctaagtatctatcttatattcagtcttgatggaactgtgtatatgcaatcaaatggaatgaatgaattctag

SEQ ID NO: 96838 - DNA, 1361 bp, Zea Mays
agaggacgtacgacgaggagggcaatggggatgggcagcgacgccgccgcgctgttccccttctccaccagcaccaccgccacgtcgccgcggctctgcggcgccaccgccgtcagccacaggaggatattctcagacgtcgctgaggacgtgacggtgtcggtggacggccagtcgttcctgctgcacaagttccctctggtgtcccggtgcgggcggatacgcaagatgttggcggactcctccagctccaacagcaaggacgcagacggccaccagaagctggagctggcgaacgtgccggggggagcctacgcgttcgagctggccgccaagttctgctacggcacaaacttcgagataaccgcggcgaacgtggcgcagctgcggtgcgtggcggagtacctggagatgacggaggaccagcacgcggacaacctggtggcgcgggcggaggcgtacctggccgaggtggcgctgcggagcctggacggggcgctggaggtgctgcgcaggtgcgacgacggcgggcccgtggcggagcaggtcgggctggtggcccgctgcgtcgacgccgtcgccgccagcgcgggcaaggagcagctggtctccggcctggcggcgcacctggagacgtgcgactgcgccgccgccgcgcgctgccgggaggactggtgggtggaggacctctccttgctccggatcgaccactaccgccgcgtcatcgccgcgatgcggcggagcggggtccggccggagaccatcggcgcgtccgtggcgcactacgcgcagacgtggctcaagggcgtggacgtggagcagcggcggcgccagcgcgcctgctgggacggatcgggcccgttcgtcggcgacggccagcggatggtcgtcgagacgctcgtcgacgtgcttgccacggagaacgtcgcggccgtcacgctctccttcctgttcggcaaggcccgcaggcggcagaaggcgtccttcgcctatgactgaagcttcgctgctggcgtcgacaatggaggcgcggcaggcggcgatcgtggatggatgcggtctcagcgtctggaggatcggtcggagctaaagcagggacggtggctgctgacagctgagtgggtgacgatgatcaagaattcaagactgcggttttagctgttggtgatggcagtccgtcgctcagacgaacaaacaacagggaggaatggaacggatcaggaggagtttattgcaggaaatgctacaggctagcgagagattttttagcatgcaggaacgacgcaggatcagtaaagtagtgtagcaaactgttttagcctgaactctgaatgcctgctttcactggattgcatttgcat

SEQ ID NO: 96839 - DNA, 2429 bp, Zea Mays
agaggacgtacgacgaggagggcaatggggatgggcagcgacgccgccgcgctgttccccttctccaccagcaccaccgccacgtcgccgcggctctgcggcgccaccgccgtcagccacaggaggatattctcagacgtcgctgaggacgtgacggtgtcggtggacggccagtcgttcctgctgcacaagttccctctggtgtcccggtgcgggcggatacgcaagatgttggcggactcctccagctccaacagcaaggacgcagacggccaccagaagctggagctggcgaacgtgccggggggagcctacgcgttcgagctggccgccaagttctgctacggcacaaacttcgagataaccgcggcgaacgtggcgcagctgcggtgcgtggcggagtacctggagatgacggaggaccagcacgcggacaacctggtggcgcgggcggaggcgtacctggccgaggtggcgctgcggagcctggacggggcgctggaggtgctgcgcaggtgcgacgacggcgggcccgtggcggagcaggtcgggctggtggcccgctgcgtcgacgccgtcgccgccagcgcgggcaaggagcagctggtctccggcctggcggcgcacctggagacgtgcgactgcgccgccgccgcgcgctgccgggaggactggtgggtggaggacctctccttgctccggatcgaccactaccgccgcgtcatcgccgcgatgcggcggagcggggtccggccggagaccatcggcgcgtccgtggcgcactacgcgcagacgtggctcaagggcgtggacgtggagcagcggcggcgccagcgcgcctgctgggacggatcgggcccgttcgtcggcgacggccagcggatggtcgtcgagacgctcgtcgacgtgcttgccacggagaacgtcgcggccgtcacgctctccttcctgttcggcatgctgcgggtcgccgtcgaggtcgacgccagcctcgactgccggatcgagctcgagcgccgggtcgggatgcgcctggagatggcggcgctcgacgacctgctcgtccccgccgcgcagaccagcgactccatgttcgacgtcgacaccgtccaccgcatactgctcagcttcttgcagaggattgatgaggatagctcgggggacctgtcgtctcccccctgcgggtacgactccgacggcctcaagtctcccagccacggatcggtgctcaaggtcgggaggctcatggacggctatctcgcggaggtggcgccggatccgtatctcaagctgcagaagttcatggcccttattgagctgctcccggattatgcgcgcattgttgatgatggcctctatcgcgccatcgacatatacctcaaggcgcatccatctctgacggagtcggagtgcaagcggctgtgcaagctgatcgactgccagaagctgtcgcaggacgcgtcgagccacgcggcgcagaacgaccggctgccgatccagatggtggtgcgcgtgctctacttcgagcagctccgcctcaagtcgtccttctcgggcggcgggtccgggtgcgtcggcttgggcggcgccgacgggtccttctcgcagcggttcgtgtgcagcagcagcggcgtgccgagctcgtgcgtgtccccgcagcgggacaactacgcgtcgctgcggcgggagaaccgggagctgaagctggagatctcgcggatgcgggtgcggctgacggagctggagcgggagcaggggctgatgaagcagcaggggaggatgcgcggcggggacggcggtggcggcggcgggcggggcggtggcggcgagcacggccgcgccttccttgcgtcgctgtcgaggggcatcggccgcatcaccatgttcggcggcgggcctgcggcggccgacaggcggcgcaagaagagcggcggccggagctcccagtgctccgacggcaaggcccgcaggcggcagaaggcgtccttcgcctatgactgaagcttcgctgctggcgtcgacaatggaggcgcggcaggcggcgatcgtggatggatgcggtctcagcgtctggaggatcggtcggagctaaagcagggacggtggctgctgacagctgagtgggtgacgatgatcaagaattcaagactgcggttttagctgttggtgatggcagtccgtcgctcagacgaacaaacaacagggaggaatggaacggatcaggaggagtttattgcaggaaatgctacaggctagcgagagattttttagcatgcaggaacgacgcaggatcagtaaagtagtgtagcaaactgttttagcctgaactctgaatgcctgctttcactggattgcatttgcataatgcatccatgcatcgcagtatcgcacagctttaacgcgcgaaaacggaaactagcgttacgacc

SEQ ID NO: 96840 - DNA, 1462 bp, Zea Mays
gtcgacatacctgggcgaaaaagcaacagcgatagcttgcggtgccggtgccggtgccggtgccggtgcgggcgctagtcttcccttctctctagatctcttcgccattccgcttcggcacctctctagctctcactcctacggcccaccgattcggcaccgctgtcctgtctaacgctcctgtgggcgggcattgcgttgcccctgttgcttgtggttcgtgcaggatattctcagacgtcgctgaggacgtgacggtgtcggtggacggccagtcgttcctgctgcacaagttccctctggtgtcccggtgcgggcggatacgcaagatgttggcggactcctccagctccaacagcaaggacgcagacggccaccagaagctggagctggcgaacgtgccggggggagcctacgcgttcgagctggccgccaagttctgctacggcacaaacttcgagataaccgcggcgaacgtggcgcagctgcggtgcgtggcggagtacctggagatgacggaggaccagcacgcggacaacctggtggcgcgggcggaggcgtacctggccgaggtggcgctgcggagcctggacggggcgctggaggtgctgcgcaggtgcgacgacggcgggcccgtggcggagcaggtcgggctggtggcccgctgcgtcgacgccgtcgccgccagcgcgggcaaggagcagctggtctccggcctggcggcgcacctggagacgtgcgactgcgccgccgccgcgcgctgccgggaggactggtgggtggaggacctctccttgctccggatcgaccactaccgccgcgtcatcgccgcgatgcggcggagcggggtccggccggagaccatcggcgcgtccgtggcgcactacgcgcagacgtggctcaagggcgtggacgtggagcagcggcggcgccagcgcgcctgctgggacggatcgggcccgttcgtcggcgacggccagcggatggtcgtcgagacgctcgtcgacgtgcttgccacggagaacgtcgcggccgtcacgctctccttcctgttcggcaaggcccgcaggcggcagaaggcgtccttcgcctatgactgaagcttcgctgctggcgtcgacaatggaggcgcggcaggcggcgatcgtggatggatgcggtctcagcgtctggaggatcggtcggagctaaagcagggacggtggctgctgacagctgagtgggtgacgatgatcaagaattcaagactgcggttttagctgttggtgatggcagtccgtcgctcagacgaacaaacaacagggaggaatggaacggatcaggaggagtttattgcaggaaatgctacaggctagcgagagattttttagcatgcaggaacgacgcaggatcagtaaagtagtgtagcaaactgttttagcctgaactctgaatgcctgctttcactggattgcatttgcat

SEQ ID NO: 96841 - DNA, 3206 bp, Zea Mays
gtcgacatacctgggcgaaaaagcaacagcgatagcttgcggtgccggtgccggtgccggtgccggtgcgggcgctagtcttcccttctctctagatctcttcgccattccgcttcggcacctctctagctctcactcctacggcccaccgattcggcaccgctgtcctgtctaacgctcctgtgggcgggcattgcgttgcccctgttgcttgtggttcgtgcaggatattctcagacgtcgctgaggacgtgacggtgtcggtggacggccagtcgttcctgctgcacaagttccctctggtgtcccggtgcgggcggatacgcaagatgttggcggactcctccagctccaacagcaaggacgcagacggccaccagaagctggagctggcgaacgtgccggggggagcctacgcgttcgagctggccgccaagttctgctacggcacaaacttcgagataaccgcggcgaacgtggcgcagctgcggtgcgtggcggagtacctggagatgacggaggaccagcacgcggacaacctggtggcgcgggcggaggcgtacctggccgaggtggcgctgcggagcctggacggggcgctggaggtgctgcgcaggtgcgacgacggcgggcccgtggcggagcaggtcgggctggtggcccgctgcgtcgacgccgtcgccgccagcgcgggcaaggagcagctggtctccggcctggcggcgcacctggagacgtgcgactgcgccgccgccgcgcgctgccgggaggactggtgggtggaggacctctccttgctccggatcgaccactaccgccgcgtcatcgccgcgatgcggcggagcggggtccggccggagaccatcggcgcgtccgtggcgcactacgcgcagacgtggctcaagggcgtggacgtggagcagcggcggcgccagcgcgcctgctgggacggatcgggcccgttcgtcggcgacggccagcggatggtcgtcgagacgctcgtcgacgtgcttgccacggagaacgtcgcggccgtcacgctctccttcctgttcggcatgctgcgggtcgccgtcgaggtcgacgccagcctcgactgccggatcgagctcgagcgccgggtcgggatgcgcctggagatggcggcgctcgacgacctgctcgtccccgccgcgcagaccagcgactccatgttcgacgtcgacaccgtccaccgcatactgctcagcttcttgcagaggattgatgaggatagctcgggggacctgtcgtctcccccctgcgggtacgactccgacggcctcaagtctcccagccacggatcggtgctcaaggtcgggaggctcatggacggctatctcgcggaggtggcgccggatccgtatctcaagctgcagaagttcatggcccttattgagctgctcccggattatgcgcgcattgttgatgatggcctctatcgcgccatcgacatatacctcaaggtaaagccattagattacaagtgtcacactttttttttctttttcttctgtagctgtttcagtgaatacagagcagagatcagagttccatattctaagtatctatcttatattcagtcttgatggaactgtgtatatgcaatcaaatggaatgaatgaattctagctggtcgctggaccttgatctgtgtctgcttaaacttttccagatcaatgtatatgcctggagttaagttgcataaaaattgacaaaaaaaacatgatatttgtaggatcaatcagaacaagtttagctgatcaaatagaataagaacatattttatttagtgtcaatgaattccattcctgagcaggcatatttcccatgcaattagatagcatggaaatatgtgtatgcaataaaatactatactctagccgaccactggacttggatttctgtgtggttgaaaacacaattgtctgatcagtcttcaggcctgaaggtaataacatcttgcctgatcaatctttactatgtctgacggtagcctgaagccctttgtaatcaggccaagcgcatcctttgcactagctgtttgctttgtcatttcttgatcggttttgtgtctagagaaagaactcgttggctgaccaaatgttttgctgcgggggggaaaaaaacaaacaaaaacaggcgcatccatctctgacggagtcggagtgcaagcggctgtgcaagctgatcgactgccagaagctgtcgcaggacgcgtcgagccacgcggcgcagaacgaccggctgccgatccagatggtggtgcgcgtgctctacttcgagcagctccgcctcaagtcgtccttctcgggcggcgggtccgggtgcgtcggcttgggcggcgccgacgggtccttctcgcagcggttcgtgtgcagcagcagcggcgtgccgagctcgtgcgtgtccccgcagcgggacaactacgcgtcgctgcggcgggagaaccgggagctgaagctggagatctcgcggatgcgggtgcggctgacggagctggagcgggagcaggggctgatgaagcagcaggggaggatgcgcggcggggacggcggtggcggcggcgggcggggcggtggcggcgagcacggccgcgccttccttgcgtcgctgtcgaggggcatcggccgcatcaccatgttcggcggcgggcctgcggcggccgacaggcggcgcaagaagagcggcggccggagctcccagtgctccgacggcaaggcccgcaggcggcagaaggcgtccttcgcctatgactgaagcttcgctgctggcgtcgacaatggaggcgcggcaggcggcgatcgtggatggatgcggtctcagcgtctggaggatcggtcggagctaaagcagggacggtggctgctgacagctgagtgggtgacgatgatcaagaattcaagactgcggttttagctgttggtgatggcagtccgtcgctcagacgaacaaacaacagggaggaatggaacggatcaggaggagtttattgcaggaaatgctacaggctagcgagagattttttagcatgcaggaacgacgcaggatcagtaaagtagtgtagcaaactgttttagcctgaactctgaatgcctgctttcactggattgcatttgcataatgcatccatgcatcgcagtatcgcacagctttaacgcgcgaaaacggaaactagcgttacgacc

SEQ ID NO: 96842 - DNA, 1866 bp, Zea Mays
atgtctgctgcttccaccgtggatcctcatcctcctcatcagcagcagcagtgcagcgataaggtgtcgtccatggagatggagatccccgccgaccttatcatccggatcggcgagtccgttttccctctccacaagactgacgtgaacaacggactctgctcgtacgagaacactcaggcggtgatggtgcccaagtgcggctacatccgccgggccgtcgaggcggtggcgaccaggcccagcagcaagggcggcgccgacgccgacgccgacccgccggccaccgtcgagctggacctctcggcgctgccgggcggcgccgacgcgttcgacaaggcggcgcgctactgctacggcgccaacttcgagatcacgccgcaaaacgcggcggcgctgcgctgcgccgcggcgttcctggacatgcgccacgcctcagcggacctggccgggcgcgtggacgagttcctggcgcgggcggcgctgcgcgcgctcccgggcgccgtggccgtgctccgctcctgcgaggcgcccggcctgcgcgcggccgccgaggagctcggcgtcgcgcgccgcgccgcggacgccgtcgcgcgcggcgtctgcgccgaggcgctgtccctgtcgtactcgtcggcgtcgcgcggccccgggtggtggaagctggagctggcggcgctgtcgccgcgctcgttcgggaaggtcgtcacggcgctgcggtgccgccgcgccgagccggccgtggtggccgcggcggcggcggcctacgcggagctcacgactgagattcggcgcggaccaccgcgcgctgctcgagtccgtggtcgacgtgctgggaaacaccacgcgcccggcgtcccggcgccgttcctctgccgcctcctccacgccgccgtcgccgccggggcgtccgccaagacgtgccgcgacctcgagctccgcgtcgccgccgtgctcgaccaggccaccgcccaggacctgctcgccgtcgcgctggacgccaccggggagcgcgtcaggaacacggacatcgtgcgccgcgtcgtcgtcgccttcgtcgagcgccaggcggcggtgacgcccgcgggtgagcggaggagccgccgggcgtccatgtccgggacgacggcggcgacggagctcggtgccgccaggcccggcgcgctggagaaggtcgccatgatggtggacgaagtggcggcggagatcgcgacggaggaggcgctgcccatctccaagttcgtcggcgtggccggcgcggtgcccaaggacgcgcgcccgtcgcacgactgcctgtaccgcgccgtcgacatctacctcaagacgcacccggagctggacgagatccagcgggagaaggtctgcagcgtcatggacccgctcaagctctcgtaccaggcgcgcacgcacgcgtcgcagaacaagcggctgccgctgcaggccgcgctcagcgcgctctactacgacgagctcaagctccgcagcgccgcgacggccgacgtggtattggacacgcagtcgtcggccgcggggagggcttgcgcgcaggccagggcggcggacgcggcgctggcgcgagagaacgaggcgctgcggtcagagctggcacggatgcgggcctacctgtcagggatggagcgcagcaaagggggccggtcaacgccgccgtcctcgccgtctcggagggcaaagaaagcaagcttcctgggctccgtgtcccgcactatgagtcggctgaacccgtttagaagtggggggtggatggcgaaggttacgaccagtaacgccgccggtggtggacgccagagcaaaacgatgatgcagcatgtggtgacacccaagaggaggagggcatccataagttaa

SEQ ID NO: 96843 - DNA, 601 bp, Zea Mays
gcgaagcatcatggatggtgccctcctccaccccttcccccacaatggcgccagcagcaaccatcagcgcaacgggctcaaggaaggcagcctccacatctgctacaaacaaggcaggccccgtaccaatcccatcagaccagatttgagcagagaaggtcatatccaaggcaacagatggaatcgggatcaaggaaattacctgctggcgtagagagagccattcctctgtcctctggtgaccgtgttcatctgcaacagcaacaacaggttcagtcgcagcctagaggggggggggggggggatcagatttcaacatcagggtgctcaggtaatgacagatggccagatgggggacatctaccctttactattgatcctggataccatgatctagtctgctataactgcggtgaacctggtcattttgtgggcatttgttcaaaaccaaaaatctgtttcatctgtgggattccgggtcaccatatgaatgaatgccccgcttggaaagtgttgacgccttttcggagcgccaaatactcaagaagatgtaatacccactttgtaagaaaaaaaaatctaaaaggaggaattatatata

SEQ ID NO: 96844 - DNA, 276 bp, Zea Mays
atggcggacctcgaccttgcctgcccatcggctgtggtggcgcctatggatatgggtaccacgacatcgatatggtgccaaggtgcacatgtctcttcaaggggcaagtatggcgatgatgtgtacggaaaaggagatgtgctagggttgtacatctctgtacctcatggggagaggtttgagcttcaagtgtctgaacgacaagggcaagccttttcttgtaaagggcaggatgcacgggctcatattctaggtcagcactggctcatgttctag

SEQ ID NO: 96845 - DNA, 2011 bp, Zea Mays
cgagtacatggcattagaaaattaaagctgcagctagctgcattatacgtgctcgagggaatcaaaagttgagcctctcccatctcaatcaaatctataggggagtagctcttgctcttggcttcgctcgctaacaatcagtgaactgaacaccttccgcctcccggtctcctccctgcccggtgctgaagaaccctgccatccccggaactggatcgatctgccgccaactctgaaaatccatccgatccatctctgtcgtccaagtctactccccgatggacattatttaccaggacagcagttgtcttgccctagagcaggcgctacatgatgaaggcgtgggaccaatcgacctacctttcatgcttctcagggccatcacaaaagatttctctgatactcaactaattggcaggggtgggttcggagaggtttacaagggagtgcttccaaatgggatggtcgtcgccgtgaagaagcttcttgacaagatcgatgtcctagaggcgaatttccaaagcgaggttgcttgtctcatagaggtcaagcacaggaacatagtccgatgtctagggtactcatccgagacgcaacatgtgagggcaccctacgaaggaagatttgtctgggcagacctgcgccaaaggttgttttgcttcgaatacctaagcaaagggagccttgccgattatctgaccggggcatcttttgcacttcagtggagtgtgcgctaccaaataatcaaggggatttgtgagggtgtgggttatcttcaccagcacaatattattcacatggacctcaaacctcaaaatatacttcttgacgataacatggtgccaaaaatcgcggattttggtctgtccaggcgcttaagtgaaaatcagagcaggatcattactaaaacaataattgggacgccgtaggctacctaattacctccgagacatcttttttgatttgtcaacagctcagttgaatacccgttatttgatttaccactcactacatcaatattttttattcttcacgcagggggtatttggcacctgaatttctgagcagcaatgcaatcacattcaaggcggacatatacagtctaggtgttataatcactgagattctgacggggcataaggaatgcaccagtgttgacaaggtgcttgaaagctggacggacatgtttcagacattaggaagccatccgctactagaacaagtagaagtatgcgctgagatagcgataaattgcatgaacgatgacccgagcaacaggcctaccatacaggatattatctccagtatcgatgaaacggacgctcgaagtgtcacaagttcttcaccaggagggcaggttattaccatggccggcagcgaaagcagcagcagtaggagcaggtcgccatgcgcgtcgtgcaggatgctgcgccagcagtgcacacaggagtgcgtgttcgcgccctacttccccgccgaggaacctcacaagttcgccatcgtccacaaggttttcggtggcagcaatgtcttcaagttactgcaggagctgcctgcccaccagagaggggatgcggtgagcagtatggtttatgaggccaacgttcgcaccagggaccctgtctatggctgcgtgggcgccatctccgtgctccagcaacagatctcccagctccagatgcagttctccatggcccgtgctgagatcttaacattgcagcaacagatggatgtcaatgatagcctacccagtcaaaatagctttgacagatatggcaatggtgatctgaaacctgactccccgcccgaaattctttcatcggaggatgaggttgaggaagtttcttccccaatgtctccatagagatttggatttttccattataaagaataggcttcacaaaattgccactggtctcgcatttcatagactcagatagtcagatggacccatcgttcataaactaagtgacaattataatcaaagagatgatctttcgagtggcaaaaa

SEQ ID NO: 96846 - DNA, 1424 bp, Zea Mays
cgagtacatggcattagaaaattaaagctgcagctagctgcattatacgtgctcgagggaatcaaaagttgagcctctcccatctcaatcaaatctataggggagtagctcttgctcttggcttcgctcgctaacaatcagtgaactgaacaccttccgcctcccggtctcctccctgcccggtgctgaagaaccctgccatccccggaactggatcgatctgccgccaactctgaaaatccatccgatccatctctgtcgtccaagtctactccccgatggacattatttaccaggacagcagttgtcttgccctagagcaggcgctacatgatgaaggcgtgggaccaatcgacctacctttcatgcttctcagggccatcacaaaagatttctctgatactcaactaattggcaggggtgggttcggagaggtttacaaggtatgcatggggtatttggcacctgaatttctgagcagcaatgcaatcacattcaaggcggacatatacagtctaggtgttataatcactgagattctgacggggcataaggaatgcaccagtgttgacaaggtgcttgaaagctggacggacatgtttcagacattaggaagccatccgctactagaacaagtagaagtatgcgctgagatagcgataaattgcatgaacgatgacccgagcaacaggcctaccatacaggatattatctccagtatcgatgaaacggacgctcgaagtgtcacaagttcttcaccaggagggcaggttattaccatggccggcagcgaaagcagcagcagtaggagcaggtcgccatgcgcgtcgtgcaggatgctgcgccagcagtgcacacaggagtgcgtgttcgcgccctacttccccgccgaggaacctcacaagttcgccatcgtccacaaggttttcggtggcagcaatgtcttcaagttactgcaggagctgcctgcccaccagagaggggatgcggtgagcagtatggtttatgaggccaacgttcgcaccagggaccctgtctatggctgcgtgggcgccatctccgtgctccagcaacagatctcccagctccagatgcagttctccatggcccgtgctgagatcttaacattgcagcaacagatggatgtcaatgatagcctacccagtcaaaatagctttgacagatatggcaatggtgatctgaaacctgactccccgcccgaaattctttcatcggaggatgaggttgaggaagtttcttccccaatgtctccatagagatttggatttttccattataaagaataggcttcacaaaattgccactggtctcgcatttcatagactcagatagtcagatggacccatcgttcataaactaagtgacaattataatcaaagagatgatctttcgagtggcaaaaa

SEQ ID NO: 96847 - DNA, 1898 bp, Zea Mays
cgagtacatggcattagaaaattaaagctgcagctagctgcattatacgtgctcgagggaatcaaaagttgagcctctcccatctcaatcaaatctataggggagtagctcttgctcttggcttcgctcgctaacaatcagtgaactgaacaccttccgcctcccggtctcctccctgcccggtgctgaagaaccctgccatccccggaactggatcgatctgccgccaactctgaaaatccatccgatccatctctgtcgtccaagtctactccccgatggacattatttaccaggacagcagttgtcttgccctagagcaggcgctacatgatgaaggcgtgggaccaatcgacctacctttcatgcttctcagggccatcacaaaagatttctctgatactcaactaattggcaggggtgggttcggagaggtttacaagggagtgcttccaaatgggatggtcgtcgccgtgaagaagcttcttgacaagatcgatgtcctagaggcgaatttccaaagcgaggttgcttgtctcatagaggtcaagcacaggaacatagtccgatgtctagggtactcatccgagacgcaacatgtgagggcaccctacgaaggaagatttgtctgggcagacctgcgccaaaggttgttttgcttcgaatacctaagcaaagggagccttgccgattatctgaccggggcatcttttgcacttcagtggagtgtgcgctaccaaataatcaaggggatttgtgagggtgtgggttatcttcaccagcacaatattattcacatggacctcaaacctcaaaatatacttcttgacgataacatggtgccaaaaatcgcggattttggtctgtccaggcgcttaagtgaaaatcagagcaggatcattactaaaacaataattgggacgccggggtatttggcacctgaatttctgagcagcaatgcaatcacattcaaggcggacatatacagtctaggtgttataatcactgagattctgacggggcataaggaatgcaccagtgttgacaaggtgcttgaaagctggacggacatgtttcagacattaggaagccatccgctactagaacaagtagaagtatgcgctgagatagcgataaattgcatgaacgatgacccgagcaacaggcctaccatacaggatattatctccagtatcgatgaaacggacgctcgaagtgtcacaagttcttcaccaggagggcaggttattaccatggccggcagcgaaagcagcagcagtaggagcaggtcgccatgcgcgtcgtgcaggatgctgcgccagcagtgcacacaggagtgcgtgttcgcgccctacttccccgccgaggaacctcacaagttcgccatcgtccacaaggttttcggtggcagcaatgtcttcaagttactgcaggagctgcctgcccaccagagaggggatgcggtgagcagtatggtttatgaggccaacgttcgcaccagggaccctgtctatggctgcgtgggcgccatctccgtgctccagcaacagatctcccagctccagatgcagttctccatggcccgtgctgagatcttaacattgcagcaacagatggatgtcaatgatagcctacccagtcaaaatagctttgacagatatggcaatggtgatctgaaacctgactccccgcccgaaattctttcatcggaggatgaggttgaggaagtttcttccccaatgtctccatagagatttggatttttccattataaagaataggcttcacaaaattgccactggtctcgcatttcatagactcagatagtcagatggacccatcgttcataaactaagtgacaattataatcaaagagatgatctttcgagtggcaaaaa

SEQ ID NO: 96848 - DNA, 1368 bp, Zea Mays
atgtttgctgcaggcgactctcaaagaagcctacgcaacaagaagaaaagacgacgctccaaacggggcaaaggatcgttggggtctggtgctggtccaggctctatgtccccggtttcctctgatactgctgacgcctccagaaaggtccataggtcggcgctgaggtctggaggacaaatggagatattcaagaagtcattgccttcttgtgtgttggaattcaccactgagatgacgcgtgaagaggtatttctccgccgtgccctgttcgtaacagttgttgggactaggccggaggtgctaggagttgaagtgttagaagaagtcgcacataattttgaggtccatattgaagccatgcggattcatcaagtccagccagaggatttcctcttgattctacctgatgaagaaactgcctcaagggtgcttaatgatggcaaggcatatagggggcctcattttagtttgaagttcaagcgctggtcgaggtttactcatgcatcttcgacgatcatgtctggtatggtggaggttgagattagaggaatcccagagcacgcttggtttcgttctacggcagaaaacatcttgagagactcttgctggatttcggacgtgcatccggatactttgcaaaagaaagattactcagcctttcgggtcagtgcttggtgctttgatcctggaagactacaccgtgatatggaccttatcatcgtcgagcctggattgcacgcacttgagaagagatgcctcacttacaagatcagtgtgagcgctaccctgtcagagctatctgcggcggacctggggcctccaccgcccccacctccggcgtacgacaggagacctgatggtgatggcggcggcggcgaggaccaggacccccagtctcgtcgttcgaacgggcccctgttccagaggcgaccggttcatcttcgcctgggctcgcagctgccgtcgggacgcggtgcggcaactttggcgcctcgggcggcgtttcccgcggcgtccctgttcctgcggcgctcggttcatcttcgcctggacccacagatgtcgttgggacgcggcgctgcaaccctggcgcctcgggctgtgtttccaccgccgtcaacgacctcgggtagggaaacagcatatccggtgagagatcctgatcgagatgcgctgccttccttgcgcattgaagagacaccggtttccaaggagccccaggaagacagagagactaccgtgacagttatggtgggacagatctccacggggaagataaacagtccccggattgattgcgacaggactgttggaacgtcgtctgtgttgggtgggctcaccccggaacctgattgggccgcctga

SEQ ID NO: 96849 - DNA, 300 bp, Zea Mays
atggccaaaccggagtacttagttgagcttgcctcagcagttgttgtcttgccgagaagaaattttactatgcgatcacgatccctgtcgcgaccgaaaaccttggaagtgggaagtgatgtggttgtgggaacactggtaggtgctgcagctgggcactcgacggtattgccatgtggcaagccaagaagatctcgaagttgttgggcttctgtcaggatagctttgagctcgttcatcttgctaattagccttctgttcccagggagcaagttgcgtgccctgttcatagcagaatga

SEQ ID NO: 96850 - DNA, 283 bp, Zea Mays
gattagcctgcaaaggtggccgtggacgagctccagcgagatacttgcttgctgccttaggaaaggagcttcctctgcttccccaccaaccatgtatctgctaccttgccatccacccgagcacgtcgaagctcaggtgctcaaagtgggcatgccgcaaccacggctcctcgttgtgccacgccaccaagcacactagcttcgtccatctgcgcgatgctaacaatgcttgggcaaagcctcaggataatacacatctgtcagcgcctgatgctcgttgttc

SEQ ID NO: 96851 - DNA, 1422 bp, Zea Mays
ctccaatgccagcgcatccctcttccccctcgtggctcgcggtcgccgctggcgttcctgctccgggccttccacatggtgatgggcgacctgagcacctccgacgacctcgccacgcgccaccacctcacccaccgtccacccatcacctttcctgtaaacctcggcgacctcctcctcaatctcatgatgttgtcctgcaagtctcccccgagccctctcctcaagccctaccacgcccagctaggccacaacagcgccaagatctaggccatgtctccaacttagcaacttattgcagcacaacacgagatctggatggtctgcatcgttgccaccgtggcgcgcaccgagcaggaggacgaggtgccagccctgaccgaccaggcggcccacatagaggtgcgcacacggaggtttactaggtcgacgactacgtctaggtgttcgtcgtggcgtgtactgacctcatcaaccggctccagggcctacgcgagaacctcacgaacgtgaggtctgaggtgtcttcagctaggccctgcagagcatccttgttttctcacgttgccatattcaggccaagtacatccttaatctcgtgttacttagccccaaacaagcaagtacaaccactatgacagaggctgttatgggagttctgaccagcaagcttggtgtggccttagcaaaaggggcagcagcctatgaattgatggataatcactattcaagcactctgctccacagtatcttgtcttggcaccttaacatatgacgacactaattgaagaacaacaaattttgactgaagacgttgacgtggaatcttctgtgccaataggagcaaataaacaaacaggttcgttttctggagtggcctgatgatttggagggttttgttctaaaaggctatggtgagtctgtcattgctcaaggatgttgtccagtcaatggaagaaacaatcaatagctagagaaggccacactacaaaacatcattgagcgcagaaacacgacatggtgctaggtcacaaggtgatgaagacatccacactactgatgcatctataccaatacaagtaccaatttctggtcccattactcgcgctcgtgctcgtcaactcaaccatcaggtgattacactcttgagttcatgtccatcatatttagaccatggagacccgtgcactcttgttttgcttaggaatcagggagaagaccgaaagggaaaaggatttgaacatgctggattcggactgcagaagaacaccaacttgtgacggtcaccacggtcagatgcgggctcggattggaatgttcaagcacaacatggaaagcttatcaagtctactttcatatggatccggaattatagtcatatctgttctgaggccgccgtaatcattgttttcttaccgagac

SEQ ID NO: 96852 - DNA, 1634 bp, Zea Mays
gccgccagctgcggcgagttcgccggctcccaagtggcgttactcagtgtcggagtcggacccagcatccgcgatgaagaacatcaattccaagaatgtgaaggcgaccacaacggtaaaagaccttcaagtctactgtccagccagcgtacagatacggatgccttttcggctcctccaagcgacgggagagttctggaggttgcgacgaggagcctccgtcacactcgacgaaagccaaagcaagtgtagccgcaaggatgcgctgatgcgccgtctgctgctgctggtggctggttccaccctggcgtcgcggctgcgggcgtcttccaagtgcgccacaagttccccgccggagttgaagggggcgccggtgccaacaccaacgcccttcgtgcccacgacggccgccgccacagctgtcgacctcccgctcggcggcctcgacctccccactaacacaaggtgtttggatggatgcatgatgcatccctctttcttgccaccctcctacatgtcggtccactgtttttcagagttcactcttttgaaaaaaggtataatcaacgtattcctctacactttttcatccatgcaacttttttaatgtatgtacgtgctatgcatattatcaatataataataagtagaacttaaatgcatctaatacacataagaaaactttcagctttaagttggtccattgtacagaaacgacacaactaatttttcagagttcatccttttgaaaaaaggtataatcaaaatattcctctataccttttcatccatgcacttttttagagatccaacacttataaaaataccatataatttaaaaatgagtatattttatagaatttagggcaccaacaaaacattctgttccaacagtaaagtctcaagtctagattatagggcagcccactctagtgtaatatatttgagacacttgagagagtgtcctataattttttgaccaatttttataaaatgagacactgttcaagtagtttttcctacataaagtctcatatttcaatttgagtcattgttggagatggtcttagtgtctgtacgtgctatacatattatcaataataataataataataataataataataacaacaacaataataataataataataataataataataataataataataataataataataataataatttgaacccaaatgcatctaatacacataaaataatatcagctttaattgtactacacttaagatcgttgacctgcaactttggatgttgtctctgtgtgtatatttatgtgtatacgcatcattgtcttcctttgttcccactctacctcaagataaatatcacaaatctaatttggtccttcttagttgtgtagcttcagaaactcattacatttttttcgaacttatcgttattttatagtcactaagatcattatttatggctttggtgcatgtatatatccacttctctacgtgtatgtattcatatataattttacttctgtatatctactacatagatcttttaactgtgcagacatatcgatcaaatactcgcgctcgcgttggcgcgagttagttactagtttccaaaatactacagaaaaagacaag

SEQ ID NO: 96853 - DNA, 300 bp, Zea Mays
gcaggaaaatgaactgccttctctattgcattgcctagagtatttatacaatactagtaacaactataaggtacactagtacatgggtgatcttagaccgaactactcctgtatggcttgctgatgcatgccactacatatagatcggcctgttgccatactactacagcaccctgaatgaacaacaagataataaatgccaactccatgctacagcaaaataatcaaggggcgcatcaaattttctcgaatataaattgcagtcagaaaacaaagttcagaaaagaaattagattgcag

SEQ ID NO: 96854 - DNA, 221 bp, Zea Mays
aaaacaatcaaggagagcagcatattatcttacaaggcttctagctcttttatccgattgaaaacactaagttcagagacattatattgcagctcttttatcgaacctagatgcccaccctgtctacaaactacagcagacagctcgacaccagtcctctcggcgtacttgtgaacttgtggttaaggaaaaagaatttcctggagcttgaagctacagaa

SEQ ID NO: 96855 - DNA, 294 bp, Zea Mays
atggccaaacccgagtacttggctgagcttgcctcagcagttgttgtcttgccgagaaggaaatcaactatacggtcacgatctcgatcacggccgaaaacctttgaagtgggatatgatgttgttgtgggaacaacggtagctgctacagttggccactcgacggtattgccatgtggcaaactaagaagatctcgaagctgctgggcttctgtcaggatagctttaagctcgctcatcttgctaattagccttctcttctgagggagaaagttgcgtgccctgctcatagca

SEQ ID NO: 96856 - DNA, 2770 bp, Zea Mays
atcgccaccagcctgagcccaggatgcccctgccgccccacgcctgctcagccggagcggggttcgtcgccaccgccaccttctcccacctctaccagctatgcgccagcgctgggcgctcggccctcaccacgggccaggctgcgcacgcccgtatgcttgtgtccgggttcatgcccaccacgtttgtctccaactgcctcctccagatgtatgcccgctgcgggggcaccgcccacgcgcacggggtgttcgacacgatgccccaccgggacacggtctcgtggaacaccatgctcacggcgtacgtgcacgcgggcgacaccgacacggccgcgtccctcttcggcacgatgccggacccagacgtcgtgtcctggaacacgctgatctcgggctactgccagcacggcatgttccggaactcggtgggcctgtctatggagatgtctcgccgtggtgttgccctcgacaggacgacgctcgctgtcctgctcaagtcatgcggtggcttggacgacctggcgcttggtgttcagatccatgcgctggcggtgaagacgggcctggagacggatgtccgggccggtagcgctctcgtcgacatgtatggcaagtgcaggagcttggatgacgcgctgcgcttctttcatggaatgggtgagaggaattcggtctcgtggggtgcggcgatcgctgggtgtgttcagaacgagcagtacacacgggggatggagctgttcgtgcagatgcagaggttggggcttggagtcagccagccggcttatgccagtgcctttagatcctgtgcagcaatgccatgtctgagcaccgctaggcagttgcatgcgcatgccatcaagaatgtttttagctctgaccgtgttgttgggacagcaattgtggacgtgtatgcgaaggctggtaacttggttgatgcaagaagggcattcattggtttgcctcaccataatgtggagacatgcaatgccatgatggttgggcttgtgcgcacagggctaggagctgaggccatgcaactgtttcagttcatgaccaggtctggtgttgggtttgatgtaattagcttatcaggtgttttcagtgcttgtgctgaggttaaggggtactttcaagggttgcaagtacactgcttagcagttaaatcaggttttgatgtggatgtttgtgtcagaaatgcaattctggatctatatgggaagtgcaaagcattagtagaagcataccttgtattccaggagatggagcaaagagattcggtctcttggaacgctattattgcagctctcgagcaaaatgagtgttatgaggatactatagctcatctaaatgaaatgctgcgctctggtatggaacctgatgatttcacgtacggcagtgttcttaaggcttgtgcaggtctacaatctttggaatatgggttggtggttcatggcaaagctatcaagtctggacttggtttagatgcttttgtttcaagcactgttgttgacatgtactgcaaatgcggcgcgataacagaggctcagaaactccatgatagaattggggggcaagaacttgtttcgtggaactccatcatatcaggtttttcactcaccaaacagagtgaagaggcacagagattcttctcagagatgctagacatgggtgtaaaacctgaccattttacttacgccaccgttcttgacacttgtgctaatctggctaccattgagttggggaaacagatccatggtcagattatcaaacaggaaatgcttggagacgaatatatctccagcactcttgtagacatgtatgccaagtgtgggaacatgccagactcgctgctaatgttcgagaaggcgcggaaactggatttcgtatcatggaacgccatgatatgtggctacgcgctccacggccagggacttgaagccctggagatgtttgagaggatgcagagagcaaatgtggtgccgaaccacgcgactttcgtcgcagttctgcgggcatgcagccatgtcggcctgctggacgatggatgccagtatttccatctgatgacaagccgctacaaactggttcctcaactggaacactttgcttgcatggtggatatactgggacgctcaaagggcccacaggaagccctagaatttatcagaagcatgcctattgaggcagacgctgtcgtatggaagactctgctaagcatttgcaagatccgtcaagacgtcgaagtggccgaaactgccgctagcaatgtcctacggctagacccagacgacgcgtcggtttacattcttctctctaacgtatacgctggatccgggaaatgggtcgatgtttcaaggaccagaaggctaatgaggcagggacggctgagaaaggaacctggttgtagctggatcgaggtgcaatccgagatgcacggtttccttgtcggcgataaggttcatcccaggtcgaaggaggtgtatgagatgctgaatagtctaatcggtgagatgaaactctctggatatgaacctgcatcagcattgtttgctgaggttgaagaagaggagagtacatccgagcaagatgacttggttagagtcgttggtggttaatctgttgttttgtgttgaagtgtcaataccgttatgaagctttgaccttctgtgtaaatttggtagatgctttcaactgagaaggaaaaacatgacactggagtcatattcgtgtgagaactgtatatggcaacgggaggaaactctttatc

SEQ ID NO: 96857 - DNA, 1458 bp, Zea Mays
gcgcactgtgttcttccctgcagggtcctgggctgggctggcgctggcgatggcgctagtattagggcgggaggaggagctcctggcgcagctccgcgcgctactgacgttcctaccacctcctgcgtcgcccccggcgccggcggctcccgttaaggtggagtccatcatgggcactagtggcggcggacgacgactggggagcaagagagaccgggacgacgacagcgaagccgaggccgagcagcacggcgacgaacctgcggctgcgcagcctcactattgtcctcatcctcctcctccctgcaaaaggacgaggaggaggaagaataagaagaagcggcagcagagcaagtgccttgtgacgacagtgcccgacttcgacgggtaccagtggaggaagtacgggcagaagcagatcgaaggtgccatgtaccccaggagttactacaggtgcatacagagcgccaagcaaggctgccaggcaaaacggacggtgcagcgcaacgacgacgacggcgccaccgcacccccagagtacacggtggtgtacgtggcggagcacacctgcacggccaacgacgacgcgctggaggccccgccggtcatcctggagaccaccaccagcgtcgtcgtccgtgcacctgcagcacacaccgatcccgtcgtcgtcgtcgttccggcaacggcaactacgtcagccgccgccgccgcctccgcttgttccaccaccgtcaccacggggactgaatctccggcgatctccggcgacgacgtggcctgctgctggagcagcagcggcagtagcagcagcggttacagctacgccgacgactcctgctgctgctgctgctgcgacgggttgctcgccgctgtcgtccacggtggctgcggcggctcgtgggcccccggaccggcggattcggtttcggtgccgtcgttccggttgcaggagatggaggacttgaccggaccgatccggtcgccggtgcacgttgttccccgcgcctggttggaccgttgacccgctagtccctgtgctgcatgcagctcgttgatgagaatgagatgagccagccgctttgctgctgctgctgctgctgctctttcacctagttggtctccgtatcttttagctctggtgtcgatggacgtgcagtttgtctgtactgtgataatggagttgcctggccaggagaacaaaatcatggtagttttggaaccccatttttttcagaagtttttaattttcccaagtgaaattagttcattttttccagaaattagaaatctcattgaaaattagaaatcccgagggaaattattgttctacttacttagtttttctttattttagagctagtttggcaaccctatttttccaaaaaaattccatttttcaagagaaattagttcattttctcttttgtgaaaataaaaatcccttaaaaaaataaa

SEQ ID NO: 96858 - DNA, 138 bp, Zea Mays
tatacaaaccaatacacggtcgtatgtatatattgcagttacttacaacaaatgtagtagtattacagcggcacgtccttttacattcttcttcgaggaataaaagaaaactagcctttacacttcacttctaaaacc

SEQ ID NO: 96859 - DNA, 594 bp, Zea Mays
atgtccgactcgtcgtcgtcgcctccgccggagcaggagttgctgctgccgactgaccagtcctcgtcctcgtcctcctccgacgacgacggcggcctcatcagcatcccaatcgcaacctaccgccaagcctacggtgaagaaggagtggaacgtcgtcgtcgtgccatcgtggccatgccacccgctcccgcgctgttcgtgccctggatcgccctcggcggcggcggtgaggctccggcgccggcagcgtccatcgaggccgtgcccacggtggaggtgtcggagtccggcgagacctgcgccatctgcaaggaggacctccccctcgcggcggccgctagaaggctcccgtgccgccacctctaccactccccctgcatcgtgccgtggctggagctgcgcaactcctgccccatctgtcgctgccgcctcccctccgagcacgccgagccagcaggggaggtggcgacgccgacgccggcgccggagcaggacccgctgcccgctgctcccgctgatctgcagctccctgactgggctgctgtcggtggtgcagaagtagaagagacgattgtgctgccgtccgtatga

SEQ ID NO: 96860 - DNA, 864 bp, Zea Mays
caaatgaacatccttgaatcttccactcgtagtggctgccaagtggtgctcaacgagattgaacaccaaggggctctcatgagggacctatatgaccttatcctaccaacacttgatccctgtagtaggcaggagaagcttgttcagcaaatctttcaagatatatccagttcctcaggtaaggtcctctcctttctcgaacttggtgataacagtaagaagcaggccaatcttatcaaacatagaagaaaacgtggtaagaatagcggcgtggagagccacatgctgggggaggaagctaaagaaattggaaataaaagaaggaagaatgcacaacacacaggttcaattgtgacacaagcaccgcacttcgatggatataaatggaggaagtatgggcagaagtggatctccaaagcaaagcattctaggagctactatagatgtgccaatagtaaagaccaagggtgccttgcaaccaagacagttcaacagaaggaatcagatggaagcgggacagtgagcttgttcgacgttgaatattacggccaccacatttgcaagaaggatgtcgtcaaccatccgtgtgttgttgacacagcacactattacagtgtgccgattgccaatcagaaccaaagcagtagcagcccaacgtttgttcacaatgatgtctatggaatccaggatgaaagctttgaaaacctgttcatggtgccgagcataccagagtatctgacagatttcacagacattgaaatggcgggggcacttgaggttacctccgagatgatctctgaaaatatatgggcgtacgagatgatctctgaaaatatatgtagacagccattgattgcaccgtga

SEQ ID NO: 96861 - DNA, 1994 bp, Zea Mays
caaatgaacatccttgaatcttccactcgtagtggctgccaagtggtgctcaacgagattgaacaccaaggggctctcatgagggacctatatgaccttatcctaccaacacttgatccctgtagtaggcaggagaagcttgttcagcaaatctttcaagatatatccagttcctcaggtaaggtcctctcctttctcgaacttggtgataacagtaagaagcaggccaatcttatcaaacatagaagaaaacgtggtaagaatagcggcgtggagagccacatgctgggggaggaagctaaagaaattggaaataaaagaaggaagaatgcacaacacacaggttcaattgtgacacaagcaccgcacttcgatggatataaatggaggaagtatgggcagaagtggatctccaaagcaaagcattctaggagctactatagatgtgccaatagtaaagaccaagggtgccttgcaaccaagacagttcaacagaaggaatcagatggaagcgggacagtgagcttgttcgacgttgaatattacggccaccacatttgcaagaaggatgtcgtcaaccatccgtgtgttgttgacacagcacactattacagtgtgccgattgccaatcagaaccaaagcagtagcagcccaacgtttgttcacaatgatgtctatggaatccaggatgaaagctttgaaaacctgttcatggtgccgagcataccagagtatctgacagatttcacagacattgaaatggcgggggcacttgaggttacctccgagatgatctctgaaaatatatgggcgtacgagatgatctctgaaaatatatgtagacagccattgattgcaccgtgaggtgtgacaagaaagagacacgagtatgttatgtgtgtactgtagagagtataatatgtgagacaagaaaagaaaatggacgtgcagagagacagaaattatgtctcaaaagttgtaaatgctgtcccgcatggtagaatgttggtgtgccaatgtctagactttcactttgagttgcaattgtaaccatctcacttccagcagcctctgtaaggcacatcctgcaaagtcttcatagcaggtaaagtgtcctggaatagtagcttataataataatttgttggcatttgacggagagcactagaaacatggggaaacagtaataattagcatgacaaatggcatgccagtcaagaaaacctcgatcttcagtcacaatttctcacattgatatgacacctagcaagctttgctacaccctccatagcgagttagcaacacaggctgctatccggccagttcgtgacttgatccatctgtagctgtactgtactgagccaactctaaactccccccagaaataaataaataaatatctgactgaatataaactggtggttcggaggaaacataaaagcatccaaattccaaaccaacatgaacgaatgaacatctggctgaatatgattggtgaaccggaggaaacatacacatcctcgtcgatttggaatctactcagaattggatggttctgctatacgtggccagaagtatcctgcaaactagaggccccaggtggtctcactgagaggtgatgacgagaggttcacgccgcactggagcgtatggtactgctatgccggtggaatgcggcgcttctgttggcctctggcctctgctgtggccggccgatgtgtgtgtgtgtgtggaacggagaaaacgatggccactctcggtacggttttgccggacagctcagcgcccccggttttttgagactttggcaggaaacccaaaaggaagagacaaaaaagggttgacctggggcttggtggaactgcatctgtcccagtacggtgatcgatcgcccacgaagccacggccgccgtcgccggagccggagccgaagccgaaaaagccctcgatgttttttgttgttgttggtttggactttggaggatggacctggc

SEQ ID NO: 96862 - DNA, 1294 bp, Zea Mays
catcggagtctccgttcctggcttcctgcagccgctgcacgactccctgccgtcggtctctcacctcgtcgttggcctccctcctctcggctccctcttcgccgccgtagcaggggtgccgccctccttgccgccagagcaggagcacctccctcctcgccgccgtagtaggggcgccgccctcctcaccgctagagcagtagcgcctccctcctcgccgtcatatcaggtgaaataatacccgagacttattgggatagccacagcgacagtgcctatggatggagataaatcatttgggaccatcgatgaggaaaatagaaggtttgaactagcattggtaccaccgccgattccatctactaattcatatccaagagtagagccatcaattccatttatagagcagccacctcctttagtggattgggattcaatagcaattcaagaagaaagagaggatgaaggacacatagaactttgtgacgaagcacaagtttatgaacttttaggtttcagacatgaagatgagatggaggaagaaattaatatgcaaaatgatgctgtcccgaattctagtgctgatggagaaagtggttatggaattccaccgatacaaggtgatgaaggtgcacttattccggttgttgataatattccggagatgtcaatgactgagcatgatatgaataatccatctatggaggtaggaaccagatatcctaatatgaaggattttagattggctgttagacaatatgccataaataaagaattcgagttgggtattgaggcgaccaacaagtccaaatacagagggtactgcaagggtgatggatgtccatggtctattgttgggttcaagaaggagggtgaagtgtctgttgtggtcacagtgttgaatgatgtacacacgtgtacatctagcagtaggagaaggacaactacaccttcgtgtaagtgggttgcctccaaggcagtttctatactcagaattttgttaagagatattcgggtgacagcagtggacacatgtggccagcagctagggcatacgacaaacatgtttatgagagccacatggctatagtttatgcggcgctctctagtgctaagagctggttggaaacacatcaagtttgttgggggcaacaaacacaagtcatggacaagtttttttataaagaaagccaaggaaaaatagtaccaaagaatggtttcctaaagagtctacgccggagagagcagaaactacaagagaacaactaatgcaagagagtcctggaataatgac

SEQ ID NO: 96863 - DNA, 1447 bp, Zea Mays
actctagggaggattaagaaacattcagacaatagacaatttacctattcttctgtaccggcggggttaacatttggtaacaccgtagcaggcatccgccgatcctcggctccgatcaatggcgtccaccaacgcaatcgatttccaactcacccaggcccgggcgctgctgtccgaattcgacaaccggctccgcgagattgattccaagtgggagacccgcgtcggcgtcctcgaaacgaaagttgcggactctgctcgaaatctggagacgatctccaaggagatccgcgacggggtggtggcgcagttggcggcggccgaggcgggtgtggatttccggatccgcctgcttgagacggggaccatcattcgcgtcgctgcgctcgagtcgactgcccacgccttcgagctgtggcgtcctcacgtcgacttgtcgatcgacagtctcttctcctccattgacgcggtttgtaccgaggtcgagaaattggggatccaccggttcccaggaccgcgtcccagcgatggcgcagcagcaccggggaccgcgacgcaaccggaaccctcttctcatcggccacgttcatcgcctccgcccgaggtccatgacggcgacgatgacgatgaagaaattgacgatgacgatgacgacgacgacgacgacgacgacgacgacgacgacgacgacgacgacgacgacgacgaggtttgggtttgtttccagcttcacgcgggtctcttggggttgtgtgcgttggcaggttctggatttcttgattcgcggcacccaatttcttggggattaatttctcccgttctgatagaaggcgatggctcatcgactgggtcggtcgtaggctggttttcgtttgaacacgtcctcgatttgattgaccattgggtcgggtttttgattttacggggaaacccagaaaagaaggaaggaaggggaaaccgcaatgccagttattgaatatcgcggagtggtgccatggcaatttcgagtgtccgttttttgtcccgttctggctgattcttgccctctgaagtttttcgtcgctttattcaatcatccgtttacatttttatgtgtcataatttgggcttccttcagggatttgatccatttgcaggatgacttagtttttgtagataggtaaatttagcaaattcgaggtgtgaatcatgtgaagcatttttttctttttccgtttagaattccgcgagaaaactcggtacatgttgagcacattatttggattctttttttacgtgtttttgttgtaaatggacatatcatgataccagaggtcatgccatgacttgcatgtcttctggaaagtttttttagactatggccaatcattcgagtaggataaaataggtgaattactgggattatttcgttgtgctctccctgcttccatttggaaataaaataaaa

SEQ ID NO: 96864 - DNA, 4857 bp, Zea Mays
actctagggaggattaagaaacattcagacaatagacaatttacctattcttctgtaccggcggggttaacatttggtaacaccgtagcaggcatccgccgatcctcggctccgatcaatggcgtccaccaacgcaatcgatttccaactcacccaggcccgggcgctgctgtccgaattcgacaaccggctccgcgagattgattccaagtgggagacccgcgtcggcgtcctcgaaacgaaagttgcggactctgctcgaaatctggagacgatctccaaggagatccgcgacggggtggtggcgcagttggcggcggccgaggcgggtgtggatttccggatccgcctgcttgagacggggaccatcattcgcgtcgctgcgctcgagtcgactgcccacgccttcgagctgtggcgtcctcacgtcgacttgtcgatcgacagtctcttctcctccattgacgcggtttgtaccgaggtcgagaaattggggatccaccggttcccaggaccgcgtcccagcgatggcgcagcagcaccggggaccgcgacgcaaccggaaccctcttctcatcggccacgttcatcgcctccgcccgaggtccatgacggcgacgatgacgatgaagaaattgacgatgacgatgacgacgacgacgacgacgacgacgacgacgacgacgacgacgacgacgacgacgacgaggattatgagggcttcacagacgaagagctggacaaattcgaaagcgccttcggatggggttctacattcttgagtgatcctcaagttctttgtatggactcgagtgatccacaaaacccccctcgtattggccggcaaaattatgagccgctcaccgcacaggagtttttttcactgcgccacaattggcaacagctgctcgatggcaagaagacatacctccgcccaccaaagaacaaccgtgttgccaagcacagttatgctaactgcacctttgtaaccccagaacctcttgagaaggcactacaatgtcaggagccgctatctgattttggtcggaaatatgcagaaaattctatagttcagcaaaagtttaagattcttagtgaacattatgcgcacgtcagacaaatgcgaatggatggatcatctttttacagagctttccttttctcttacttggaaaaccttgggaaaatgcaagctagtcatgctgaggtcactcgcttaatggaatgtgtggcaaggtccagagagaaattttgtcgtttacattggaatgatgcgtacttctcaaatcctgaagcatttttctcaagtgttgtttctgagttcgagcaattggtcaattcagttgccaatgggctaaatgctgatgagctttacaagagaagcctacatgagattacatcatccaggattctttgtttgtttagattgctgacagaggttcatatccgtacacatcatgcggactacccagaattcagtcaggaaacagaagcccttatgttttgcttagcatcggtgcgtccctttgaagctggagctaacattctacaaatgagtgctctatcaagtgcacttggcatcccattgcacctggcatgtacggatgtaaccacgagtgatgatgaaattgtgacagtaaagtgctttgacttgtttcctcaatcagaatcaggagcaagcacaacatcaggagctacgagttcaatcagaagttactctctgtcaagcacaactgataaacacccagagcaaggaagggatgataacaactcaaccatgccggctggaaacttgttttcgtctgatcgcatgcctttagttatcttactgagtaggaagggtcaatatggcattctttatcgcaagtgaacaagttctgactatacggcagcctctggtggacagttctaaccggaactgtttgggttataacatggaaacctattgacaacctactctagtgtgggtgtttgattgtgcatctgcttccaaaatgtatctggttacatttttgcccccgacaaaaaatactccatttgctagatgtgctgatgcatgcagtttatgaaacaaatttggacttggcataaaatctgaggctgggagcagtgggacagatctgttactttttcggtttatttttcttatggatgtttgtaccattgctgaagcatggatggaagattcatatttggtaagaacatatgaaggactagttgttttctgatacagcaggacgtggtttggatcattcaagttcaaggaccaataacaccaaaatttcagaatgaaggcattttttgagagtccttgttactgcaggctctcctgaggacactaaaagttggatgcattctagaaggagcttcaaattattgataatgatgtggactttgtatttttattgtgaaaaatctttgaacacacttcttgtggagaactaggattagcattgacagcagactcaatcaaatgaaaatatagtatgcgagcggtcatttttctgggataaaaaactcatgtgaatggagtactcattcagtcttgcgtatttttgcagcttgcatggcacaaatagggctgttgagtaaaaaatttaaagccttttatgggagagattaaattggaaatacatatttgcttcaagtggaaggttgtggacatacagcgccacctacttgacatgatgaatggttcgtgacattcaaacacagacagacaagtctggttctacctccttaactttattggctggtcatcttcgcgtcacaagggcaggagagaacaataatttcgtcgagtggtgggtcaaaatcaacaaatgggtgccttcaaccttaaaaaagggtctaattccttgataatcctaggctcctggatgatttggaaacaaagaaattagattgttttcaattggaccacacgagtatcctgaggattcttgtccagattgaggaggctcatctgtggtgtcttgcaggagccaaagagctagcccgcgcaactgtagcaccgctacctcttaagtatgtctccttagaccttgttcggttacattaaatcttctggcagtactcatgcagtgcatttgcatcggaggggattgaaagagattaaatcttcttctattcaattttgactagcaagggatttaactccctccaatccggttcaatccactcctaaccgaacaagcccttaattggattacaacatgtactcatgcagtgcatttgcattcagttgtatgccagatatgctacagtggtgcctgacacctgcatgttttagcttctgtggcaggcgaaagccttgcttgacaacgttgtaacccttctcggatctggcatttaacaagcacttgagcagcagcagaagcactgccgttctttacaaaactcctatccaagatgtattctggcaagagtgacatattaggcagctaaggatatgagggagcactggtgttcactaagtcgaggcattaagcgcaaggcgattttgcattgttctggtagagccaagtgatatgctgtaaaaatccttgcactttagtactccaaatgggccaaagtacttcaaagggagcttcacacatggttgggaatttaccatgaccaacctgaaatcgatttggataaccatgcttatcagtctgtatcttcattttgttctgaactcaactcagttcattcttgagatccaaatttagctgcccatagcatcagaactatcggaaagaagtggaggcatagtcctaaagttttttttaaaagagaaacaggagggtagcaagcccctagtgcataatcctataaagttggaaccagagacttataacatgctacatggtttgcggcacaatgaaggttgatatgtgataaattctactaggttatatttgaggcaaacaagatgcatagagctttgaggagtttctagtttcaagtgcaaaatgcggaagcccaagatgctgcaatacaatctcctccacagcgcaaaaagcaattggcttgttgagaaagggaagaacaaagtttacaaaggggcaatccaggtaccagaagaacttcttaagaaactaggagctttatcccctaagtcggaatcttcaagtacagatctctttgaacaatttgcacagatcacctaagcattgatagagcatggacaacaactgaaaaagaaaaaaaaggctagaaaaaccagaaaagcgccagtcgccaatcagatggtctcagcacctcttattgctctctcactaaggaaaatatgaaagccagatggtctgaacacatcttatcgctctctcacttaggaaaatatggaaatcatcaaagccgtgaggaaggaacgctgataattcaacatcatccaaggttctatcagtccagcaagctatctgaacctttctgatccaaggttttccagagttcagacttctgtttgtttattgacaatagcttagctttggtagtaaggacatgtcgcgtgccggcctctgttgttgtaagtggtgctcaatgctaaagcccttagcaagtttttcttgtggttcttttctagacgaagcttttttagccttgtttagtgtgtttctccttagcaagttgagttttagatggttggaggtgagctagatgtgtttgttgtggttatttttttcttttcttgagctagctgtggtggttaacctctacttgtaaggtttttgggcccgtttttcccttaaaagttgggccatgactctccttttctcttctaataaaattagctgcaaaacttttgctgtcatttcgaaaaaaacacacactggttcagcctgcagtctgaatatttttttggagcaagagcat

SEQ ID NO: 96865 - DNA, 2068 bp, Zea Mays
gacaatttacctattcttctgtaccggcggggttaacatttggtaacaccgtagcaggcatccgccgatcctcggctccgatcaatggcgtccaccaacgcaatcgatttccaactcacccaggcccgggcgctgctgtccgaattcgacaaccggctccgcgagattgattccaagtgggagacccgcgtcggcgtcctcgaaacgaaagttgcggactctgctcgaaatctggagacgatctccaaggagatccgcgacggggtggtggcgcagttggcggcggccgaggcgggtgtggatttccggatccgcctgcttgagacggggaccatcattcgcgtcgctgcgctcgagtcgactgcccacgccttcgagctgtggcgtcctcacgtcgacttgtcgatcgacagtctcttctcctccattgacgcggtttgtaccgaggtcgagaaattggggatccaccggttcccaggaccgcgtcccagcgatggcgcagcagcaccggggaccgcgacgcaaccggaaccctcttctcatcggccacgttcatcgcctccgcccgaggtccatgacggcgacgatgacgatgaagaaattgacgatgacgatgacgacgacgacgacgacgacgacgacgacgacgacgacgacgacgacgacgacgacgaggattatgagggcttcacagacgaagagctggacaaattcgaaagcgccttcggatggggttctacattcttgagtgatcctcaagttctttgtatggactcgagtgatccacaaaacccccctcgtattggccggcaaaattatgagccgctcaccgcacaggagtttttttcactgcgccacaattggcaacagctgctcgatggcaagaagacatacctccgcccaccaaagaacaaccgtgttgccaagcacagttatgctaactgcacctttgtaaccccagaacctcttgagaaggcactacaatgtcaggagccgctatctgattttggtcggaaatatgcagaaaattctatagttcagcaaaagtttaagattcttagtgaacattatgcgcacgtcagacaaatgcgaatggatggatcatctttttacagagctttccttttctcttacttggaaaaccttgggaaaatgcaagctagtcatgctgaggtcactcgcttaatggaatgtgtggcaaggtccagagagaaattttgtcgtttacattggaatgatgcgtacttctcaaatcctgaagcatttttctcaagtgttgtttctgagttcgagcaattggtcaattcagttgccaatgggctaaatgctgatgagctttacaagagaagcctacatgagattacatcatccaggattctttgtttgtttagattgctgacagaggttcatatccgtacacatcatgcggactacccagaattcagtcaggaaacagaagcccttatgttttgcttagcatcggtgcgtccctttgaagctggagctaacattctacaaatgagtgctctatcaagtgcacttggcatcccattgcacctggcatgtacggatgtaaccacgagtgatgatgaaattgtgacagtaaagtgctttgacttgtttcctcaatcagaatcaggagcaagcacaacatcaggagctacgagttcaatcagaagttactctctgtcaagcacaactgataaacacccagagcaaggaagggatgataacaactcaaccatgccggctggaaacttgttttcgtctgatcgcatgcctttagttatcttactgagtaggaagggtcaatatggcattctttatcgcaagtgaacaagttctgactatacggcagcctctggtggacagttctaaccggaactgtttgggttataacatggaaacctattgacaacctactctagtgtgggtgtttgattgtgcatctgcttccaaaatgtatctggttacatttttgcccccgacaaaaaatactccatttgctagatgtgctgatgcatgcagtttatgaaacaaatttggacttggcataaaatctgaggct

SEQ ID NO: 96866 - DNA, 1153 bp, Zea Mays
cagaaatacacaagtcctaaaaataaaatgtgggcaactttttttttgtggtaaatatggtagaaccaagctaacgaatactattttcccatttacaaatagctctctttattctgcatttgtggctttggtaacagttttgcttagcatcggtgcgtccctttgaagctggagctaacattctacaaatgagtgctctatcaagtgcacttggcatcccattgcacctggcatgtacggatgtaaccacgagtgatgatgaaattgtgacagtaaagtgctttgacttgtttcctcaatcagaatcaggagcaagcacaacatcaggagctacgagttcaatcagaagttactctctgtcaagcacaactgataaacacccagagcaaggaagggatgataacaactcaaccatgccggctggaaacttgttttcgtctgatcgcatgcctttagttatcttactgagtaggaagggtcaatatggcattctttatcgcaagtgaacaagttctgactatacggcagcctctggtggacagttctaaccggaactgtttgggttataacatggaaacctattgacaacctactctagtgtgggtgtttgattgtgcatctgcttccaaaatgtatctggttacatttttgcccccgacaaaaaatactccatttgctagatgtgctgatgcatgcagtttatgaaacaaatttggacttggcataaaatctgaggctgggagcagtgggacagatctgttactttttcggtttatttttcttatggatgtttgtaccattgctgaagcatggatggaagattcatatttggtaagaacatatgaaggactagttgttttctgatacagcaggacgtggtttggatcattcaagttcaaggaccaataacaccaaaatttcagaatgaaggcattttttgagagtccttgttactgcaggctctcctgaggacactaaaagttggatgcattctagaaggagcttcaaattattgataatgatgtggactttgtatttttattgtgaaaaatctttgaacacacttcttgtggagaactaggattagcattgacagcagactcaatcaaatgaaaatatagtatgcgagcggtcatttttctgggataaaaaa

SEQ ID NO: 96867 - DNA, 943 bp, Zea Mays
gttgatatgtgataaattctactaggttatatttgaggcaaacaagatgcatagagctttgaggagtttctagtttcaagtgcaaaatgcggaagcccaagatgctgcaatacaatctcctccacagcgcaaaaagcaattggcttgttgagaaagggaagaacaaagtttacaaaggggcaatccaggtaccagaagaacttcttaagaaactaggagctttatcccctaagtcggaatcttcaagtacagatctctttgaacaatttgcacagatcacctaagcattgatagagcatggacaacaactgaaaaagaaaaaaaaggctagaaaaaccagaaaagcgccagtcgccaatcagatggtctcagcacctcttattgctctctcactaaggaaaatatgaaagccagatggtctgaacacatcttatcgctctctcacttaggaaaatatggaaatcatcaaagccgtgaggaaggaacgctgataattcaacatcatccaaggttctatcagtccagcaagctatctgaacctttctgatccaaggttttccagagttcagacttctgtttgtttattgacaatagcttagctttggtagtaaggacatgtcgcgtgccggcctctgttgttgtaagtggtgctcaatgctaaagcccttagcaagtttttcttgtggttcttttctagacgaagcttttttagccttgtttagtgtgtttctccttagcaagttgagttttagatggttggaggtgagctagatgtgtttgttgtggttatttttttcttttcttgagctagctgtggtggttaacctctacttgtaaggtttttgggcccgtttttcccttaaaagttgggccatgactctccttttctcttctaataaaattagctgcaaaacttttgctgtcatttcgaaaaaaacacaca

SEQ ID NO: 96868 - DNA, 816 bp, Zea Mays
gtgggagatggggctggcacgttgttttggcaagacagatggattcagggtcactcactttcagttttggcaccatccctatgcaggctggtcccttctaagttcaagcgaggaagaacggtgtaggaggctttggttgatggtcgttgggtcagagatatcaggggtgttctggatgctcaagttctcatggagtaccttcaactctgggatgtcatggaaacggttagtctggcgccaggggttagtgaccagcacctctggaccccatcatcctatggacaatactcttcaagatcggcttaccggaggttctttatatgctccgtcgcttttgaacccgcccataggatttggaagtcctgggcccctctgaagtgcaagtttttcctttggttagcgagtctcaatagatgttggacagtggtccgtttggcgagaagagggctggaacatcctgactgttgtgtgctctgtaatcaagaagaggaaacaattcaacacctgctggctggctgcatcttctctaggcaagtctggttccaggttctttccgcctgcaatcttcaacacctgtgccccttccctggggaggacaacttccaagtctggtggcagcaggcggagcaaaacgtaccaaagcagcggcgaaaggttttcaactcggtggtctgcttggttgcttggtggttgtggaagcatcgaaattgctgtgtgttcgatggtggggctgctgatatcgctaaagtggtgcgggagatttgtgaagatgccacttactggcgccttgctggagcccctagggttgtgggctga

SEQ ID NO: 96869 - DNA, 2014 bp, Zea Mays
tgcaaacacaaactagcggaatggcagaaaaggcaccgccacctccaccgaaaaaggcactccccagcgcgggaagcagcgcaggtggcggagccggaggcggtgcagcagcagcgccccccgcgccgggacaggagccctcatcttcgccaccacggtcaccgtcgcctcccgaaccgttcacgtacaacttcggcgcaggaagtaccggaggcggaggcggcgacggtgcagcagcagcgccccccgcgccgagacaggagccctcttcgccgctacggtcaccgtcgcctcccgaaccgttcacgtacaacttcggcgcgggaagtaccggaggcggaggaggcgacggtgcagcagcagcgctccccgcgccgagacaggagccctcttcttcgccgccacggtcaccgtcgcctcccaaaccgtttacgtacaagcagaaggcggtgtggcgctggcgctggaagaggcagagggggcgcggcgcgggaagaggcagaggcggcgcgacgggaccgaaactctcttatttgccgtcgccgctttcacggccgttctccggtgacgaggttgatgatgaaaagccggacgaatttgaaaaagaaaacggatggggttctctgttcatgagtgaccctcaagttctttctatgcacgatccacaaaatctccctcgttatattggccggcaaaaatgtgatccgatcagcacacaggagttttttgcactgcgccacgattggctacagctgctagatggcaagaagacatacctccgtggtactgccgactccaattatgccgactctaacttcgtaaccccaaaacctcttacggtcgcagtattatgtcaggagtcactatcatatttggttcttagaggtgcaagaaaacctatcacccagcaaaagttcaagatacttaatgaacattatgtgtgcttcagaccaatgcgaacggatgggtcacagttttacagagcgttccttttctcttacttggaaaatcttgggaaaatgcaaggtagtcaagctgaggtgactcgcttaatggaatgcgtggcaaggtccaaagtgaatttctgtcgtttagaatggaataaagcatacttctcaaatccaaaagcatttttctcaagtgttgtttctgaatttgagcacttggtcaattcagttgcaaatgggctgaatgctgatgagctttacaagataagcgtacaggagaattcgtcatccaggattctttgtttgcttagattgctgacagaagttcatatccgtacacatgaagtggactacaacagagaactgagtcagaatcggaaagaaaaaataaaagcacttttgcactgcaaaaaatctgtgcgtccctttgacgctgatgccgaccttttagaaatgaaggctctatcacaagctcttggcattcccttgcacctagcagctgtggacgataaccccctgcccgacagaactgtgcaagtaaagtggattgacttcattcctcgaccaggacctctcggttcaatcagagaatactacctaggacctctcggttcaatcagacaatactacctacccagtgcaactgataaacatccagtcttgccagctgaaaactttcttttgtctggtcgcatgcctctagtcaccatattaaggactgtccgtgctactgccattctttatcgcaagtgaacagattctgagtatgcagcaggcagcagcctctggttgatggttgtaacaggcagtttatgaaataatttggacttggcatagtatgagaggcactgtttcttacagtaggaagaataccttaaggtgggagcagtggaatatatcagttagatttttttttgcttatggatgtagttccctgttgcttaagcagttggatggatgattgacattcgctaagagcatatgaaggactagttctttcctgatacagagatatgtggtttggagcatccatcttcaaggaacaatataataccgagatttgcagc

SEQ ID NO: 96870 - DNA, 1994 bp, Zea Mays
atggcagaaaaggcaccgccacctccaccgaaaaaggcactccccagcgcgggaagcagcgcaggtggcggagccggaggcggtgcagcagcagcgccccccgcgccgggacaggagccctcatcttcgccaccacggtcaccgtcgcctcccgaaccgttcacgtacaacttcggcgcaggaagtaccggaggcggaggcggcgacggtgcagcagcagcgccccccgcgccgagacaggagccctcttcgccgctacggtcaccgtcgcctcccgaaccgttcacgtacaacttcggcgcgggaagtaccggaggcggaggaggcgatggtgcagcagcagcgctccccgcgccgagacaggagccctcttcttcgccgccacggtcaccgtcgcctcccaaaccgtttacgtacaagcagaaggcggtgtggcgctggcgctggaagaggcagagggggcgcggcgcgggaagaggcagaggcggcgcgacgggaccgaaactctcttatttgccgtcgccgctttcacggccgttctccggtgacgaggttgatgatgaaaagccggacgaatttgaaaaagaaaacggatggggttctctgttcatgagtgaccctcaagttctttctatgcacgatccacaaaatctccctcgttatattggccggcaaaaatgtgatccgatcagcacacaggagttttttgcactgcgccacgattggctacagctgctagatggcaagaagacatacctccgtggtactgccgactccaattatgccgactctaacttcgtaaccccaaaacctcttacggtcgcagtattatgtcaggagtcactatcatatttggttcttagaggtgcaagaaaacctatcacccagcaaaagttcaagatacttaatgaacattatgtgtgcttcagaccaatgcgaacggatgggtcacagttttacagagcgttccttttctcttacttggaaaatcttgggaaaatgcaaggtagtcaagctgaggtgactcgcttaatggaatgcgtggcaaggtccaaagtgaatttctgtcgtttagaatggaataaagcatacttctcaaatccaaaagcatttttctcaagtgttgtttctgaatttgagcacttggtcaattcagttgcaaatgggctgaatgctgatgagctttacaagataagcgtacaggagaattcgtcatccaggattctttgtttgcttagattgctgacagaagttcatatccgtacacatgaagtggactacaacagagaactgagtcagaatcggaaagaaaaaataaaagcacttttgcactgcaaaaaatctgtgcgtccctttgacgctgatgccgaccttttagaaatgaaggctctatcacaagctcttggcattcccttgcacctagcagctgtggacgataaccccctgcccgacagaactgtgcaagtaaagtggattgacttcattcctcgaccaggacctctcggttcaatcagagaatactacctaggacctctcggttcaatcagacaatactacctacccagtgcaactgataaacatccagtcttgccagctgaaaactttcttttgtctggtcgcatgcctctagtcaccatattaaggactgtccgtgctactgccattctttatcgcaagtgaacagattctgagtatgcagcaggcagcagcctctggttgatggttgtaacaggcagtttatgaaataatttggacttggcatagtatgagaggcactgtttcttacagtaggaagaataccttaaggtgggagcagtggaatatatcagttagatttttttttgcttatggatgtagttccctgttgcttaagcagttggatggatgattgacattcgctaagagcatatgaaggactagttctttcctgatacagagatatgtggtttggagcatccatcttcaaggaacaatataataccgagatttgcagc

SEQ ID NO: 96871 - DNA, 631 bp, Zea Mays
aaaacgatagtagtctaccagagagggcacatgtgcctcaattggcctatagcatagcggctcattatccttccaccgctggtggcgtgcggtactcgctgctctgtgaagccagcctcacgcaatgtctgccactttaggtgttgggatgcaaaggctttcgccaaggcacccgaaacccactacacaacttggaatgggtggtccacagtttgtagcactagacctaggcacatgcaccacaattgacatccacactaccttattgcccccgctcgggttacaagcaatcgctacatgctcagcgagtgagggggttcaggactacctatttaagatggtgttgtactctatgagccggcggtgtggtatttaccaactacaaatagtgtcatgcatgtgacttgctagttgacaaagtctgttgtcgagctagatatgggctatggctgaagcacattaggatatagtaggcctatttttgtttttgttgtttttgggccactatggactttatgttggtgttgtaaaattttttcttgtgtttcctcttcctatgaagtggaaagtggctgcgtcatagaagaaagaaagagtggcaagcattgattttacgtcatcccattgagac

SEQ ID NO: 96872 - DNA, 1142 bp, Zea Mays
aatttattccaagatgcagaacaaaaacgtgatactcgtaatggttacataggaacaaaagtagataagaaaaatagcaaaaagatagtggtctaccagagagggcacatgtgcctcaattggcctatagcatagcgactcattatccttccaccgctggtggcgggcggtactcgctgctctgtgaagccagcctcacgcaatgtccgccactttaggtgttgggatgcaaaggctttcgccaaggcatccgaaacccactacacaacttggaatgggtggtccaaagtttgtagcactagacccaggcacatgcaccacaattgacatccacactaccttattgcccccgctcgggttacaagcaatcgctacttgctcagcgagtgagggggttcaacactacctatttaaggtggtgttgtactctataagccggcggtgtggtatttaccaactacaaatagtgtcatgcatgtgacttgctagttgacaatgtctgttgtcgagctagatgtgggctatggatgaagcacattatgatatagtaggcctattttgttttttgttgtttttgggccactatggactttatgttgatgttgtgaaattttttcttgtgtttcctcttcctacgatgtgtaaagtgggtgtgttagagaagaaagaaagagtggctagcattgattttacgtcataccattgagaacactaatcagaagcagaagcaacaatatttcatacatatacaacacttgtaatccatataaacaactttcctttaaaatataatataaaccacatgatttatatcctgggtcggctatctccacaaagggcaagaaaacgctccaagtttgtagtatagaactaaaagtgtcgattctcacgatttcttcccgacatatacaaactagacagtaatcacataaaataaagaaatatgtgttaacacgaacttatagcatgtatttcaacatatagattgttgattattatggtagattatataaaataggggttcccaaagaaatacataaaacaagagcattaaaatttccttttcagatctggctatctggtaaaaggagttggagtaactgagtttccaaatttgtgacgtagctctatagaaggaatat

SEQ ID NO: 96873 - DNA, 158 bp, Zea Mays
agctcttgtcttatatctagttctatgtccgtgcaatcacgtctcattgaatgtttttctcccggtcctgcgtctacatttctgtctctatctttttccatgtgcaaccaagccttgtggatgcataatgtgtcgctgcaatctaagcccagttagag

SEQ ID NO: 96874 - DNA, 239 bp, Zea Mays
gtgccctctctggtagaccaatatctttttgctatttttcttatctacttttgttcctatgtaaccattacgagtatcacgtttttgttctgcatcttggaataaattaaattttgatctcagatactacaactccattcatgcttagtgtgcacaagaaaatttagttccttttttctttaactcttgtcttatatctagttctatgtccgtgcaatcacgtctcattgaatgttttt

SEQ ID NO: 96875 - DNA, 168 bp, Zea Mays
cccccacttatttatccatgccttgcgaaaaaacaagtttgtcatatatttattttttctacatcaagacaccaaatttggaaaactctcatactaattaccttggtgtcttcgtgtttcttgtctcaagttttgtgaccatgtgaccaaagcctcattgagtttttc

SEQ ID NO: 96876 - DNA, 226 bp, Zea Mays
atgcatcctaatgttgttgcctacagttactgggggtatagacataatgcccggaagacaaacaaaggttggcgcctggattactttcttgtgtccgaatcaatcgcagaaagagtgcatgtttcatatattattccggacacctctgccagtgatcacagtccccttggtctcgtgctgaagctgtaggctgtatcacaggctatgccaaacattcagtctgaag

SEQ ID NO: 96877 - DNA, 540 bp, Zea Mays
atgcatgacacacacgtagctaggacatctctgctacgacgacgactgcatgctgctgatggccacgtacgctgccatccaacgagcgagctacctccactatggttccatcgatcagttgatcttggtgcagtcgacggtggggctgatgggcacgccgacggagacgccgcacttggaggggatgttggcggcgttggccatgctgacgccgccgccgagccggcccgtcatgctcttgaggcagttgcaggtggcctgccggtccgccgtcgacgacgcgcggctgttgagcgagcgcaccccgctgcagcacgccgcggagggcgacgccgcgctgcccatcgcgtacccgaggcacggcgccaccgacgacgtcacctcgccgcagctcaccgccgccgacgccgtcccggcccccgccgccagcagcagcagcgccgctgccaggaccgccgccgccgcgaccagctgcggctgggaggaggaggagcgagcggccattattgcaggagagaaagagttgctagctggtgttag

SEQ ID NO: 96878 - DNA, 1962 bp, Zea Mays
gtatctcaactccgccaagccaagctcagcgaaaactcaggcgatcggacgacgccccaaggaacaagtgcagcggaacgaagcttcggcgtcctcgtcgtcccgtcgcaagtgcagatcacaagtccataacaagaaagacaacaaaactatgctgaaagatgtgcttgcatagaagagacttctgcagcaacaccaccaagggcctggtggttcttgcgcaaggtccgcaggcctgctcgtctcttgacttgagcggcggtcaccttgcctgcatctactccacgcccttcagactccgacgccaccgacccataaggcgcagtccacctgattgacaacagaaagctagccctgtgcgtgatcacatagtttttatggagataaaagatatgaagaccagagggaagactttgacggagcggtacgagatggggaagctgctggggaaaggcgcgttcgggaaggtgcactatgcaagggacctcgagtccaaccagggtgttgctatcaagatcatggacaaggacagggtgctcaaggccgggctctcggagcaggtaaagcgtgagatcacgactatgcggctggtggaacacaaaaacatcgttcgtctccatgaggtcatggcgacacggaacaagatctacatcatcatggagtatgccaaagggggtgagctcttagacaaggttaagaggagcggcaggctgacggaggctgacacacacagatacttccaacagctcattggcgcactggatcactgccacagccgaggcgtgtaccaccgggacttgaagcgtgagaatctgttgttggatgagaatggggaccttaaggtgtctgactttggactgagcgcgttttcagagtcgaggaggacagatgggctgctccatactgtctgtgggacaccagtgtatatagctccggaggtgatcaagaagacgggatacgatggtgcaaaatcagacatctggtcttgtggtgtcgtcctgtttgttctcgctgctggctacctccctttccagggcccaaacatgatggagatttatcgaaagatacatgatagtgatttcaggtgccccagttggttttcacacaaactcaagaggctgctatacaagattctgaaccccaaccctagcatgagaccttcaattcaggagataaaagagtctacctggtttcgaaaaggtcctagggagatcagtgcagtgaaggagaaagttcttagcgagaatgccaccgccacaaatgctgccccagtgcttgctgctaggcgcaaggagattgctcacgaagataagaccctggttgccacaaaactcaatgcctttgaaatcatcgcgttctcagcagggttggacctttctggtctgtttatcaaggagtgcaggaaggagacacggttcacttcagataagcctgcattggccatcatctcaaagcttgaagatgtcgcgaaagcactgaatctcaggataaggaagaaggacaacaacactgtcatcattcaagggaggaagcatgggggcaatggtgtccttcagtttgacacgcagatctttgagatcacaccatcctgccatctcgttcagatgaaacaaactagtggcgatctacttgagtaccagaaactgttggaagagggcatccgaccagggctgaaggacgttgtctgggcttggcatggagatgatctgcagcagaagtaggagtagcttcagctgtctcccgtagattatgttctacattccattccttattttttagcaacaacattcccttttttgtattggtggtgatatgaaccattaggctatgttttgtttgagcaataattgttgtggagttgagttgttgtgttacattctgaagattgttacagttttgtaatggctgtcaatatcagtaatgaaaataaatgttgttgatccttaaaaagggtcgagcttt

SEQ ID NO: 96879 - DNA, 1873 bp, Zea Mays
gttgtttcttttcctttgtgcagtgcagatcacaagtccataacaagaaagacaacaaaactatgctgaaagatgtgcttgcatagaagagacttctgcagcaacaccaccaagggcctggtggttcttgcgcaaggtccgcaggcctgctcgtctcttgacttgagcggcggtcaccttgcctgcatctactccacgcccttcagactccgacgccaccgacccataaggcgcagtccacctgattgacaacagaaagctagccctgtgcgtgatcacatagtttttatggagataaaagatatgaagaccagagggaagactttgacggagcggtacgagatggggaagctgctggggaaaggcgcgttcgggaaggtgcactatgcaagggacctcgagtccaaccagggtgttgctatcaagatcatggacaaggacagggtgctcaaggccgggctctcggagcaggtaaagcgtgagatcacgactatgcggctggtggaacacaaaaacatcgttcgtctccatgaggtcatggcgacacggaacaagatctacatcatcatggagtatgccaaagggggtgagctcttagacaaggttaagaggagcggcaggctgacggaggctgacacacacagatacttccaacagctcattggcgcactggatcactgccacagccgaggcgtgtaccaccgggacttgaagcgtgagaatctgttgttggatgagaatggggaccttaaggtgtctgactttggactgagcgcgttttcagagtcgaggaggacagatgggctgctccatactgtctgtgggacaccagtgtatatagctccggaggtgatcaagaagacgggatacgatggtgcaaaatcagacatctggtcttgtggtgtcgtcctgtttgttctcgctgctggctacctccctttccagggcccaaacatgatggagatttatcgaaagatacatgatagtgatttcaggtgccccagttggttttcacacaaactcaagaggctgctatacaagattctgaaccccaaccctagcatgagaccttcaattcaggagataaaagagtctacctggtttcgaaaaggtcctagggagatcagtgcagtgaaggagaaagttcttagcgagaatgccaccgccacaaatgctgccccagtgcttgctgctaggcgcaaggagattgctcacgaagataagaccctggttgccacaaaactcaatgcctttgaaatcatcgcgttctcagcagggttggacctttctggtctgtttatcaaggagtgcaggaaggagacacggttcacttcagataagcctgcattggccatcatctcaaagcttgaagatgtcgcgaaagcactgaatctcaggataaggaagaaggacaacaacactgtcatcattcaagggaggaagcatgggggcaatggtgtccttcagtttgacacgcagatctttgagatcacaccatcctgccatctcgttcagatgaaacaaactagtggcgatctacttgagtaccagaaactgttggaagagggcatccgaccagggctgaaggacgttgtctgggcttggcatggagatgatctgcagcagaagtaggagtagcttcagctgtctcccgtagattatgttctacattccattccttattttttagcaacaacattcccttttttgtattggtggtgatatgaaccattaggctatgttttgtttgagcaataattgttgtggagttgagttgttgtgttacattctgaagattgttacagttttgtaatggctgtcaatatcagtaatgaaaataaatgttgttgatccttaaaaagggtcgagcttt

SEQ ID NO: 96880 - DNA, 242 bp, Zea Mays
cttccatattattgtgttctgatacttgagacttttattatgactatgtatgagatattgtcttttattagtactggatgatgagatgtgtcttattatgactatggatgagacttttgtgatgtaattgatgagactatggatttaaatattgttatgtgattgtgtgtgagatgttttatgcgaaaatatgttgtgctatatagctgttgatatatttgttatgttgtggaatgtggtgt

SEQ ID NO: 96881 - DNA, 1969 bp, Zea Mays
tctcaactccgccaagccaagctcgatcagcgaaactcaggcgatcggacgacgccccaccgaacaagtgcagcgcccggcggccctcccccccggaacgaagcttcggcgttctcgtcgtgccgtcgcaagtgcagatcataagtctataacaagaaagacaacaaaactatgctgaaagatgtgcttgcatagaagagacttctgctgcaacaccaccaagggcctggtggttcttgcgaaaggtctgcaggcctgctcgtctcttgacttcagcggcgatcaccttgcctgcatctactccacgcccttcagactccgacgccaccgatccataaggcgcagtccacctgattgacaacagaaagctagccctgtgtgcatcatcacacaattttcatagagataaaagatatgaagaccagagggaagactttgacggagcgatacgagatggggaagctgctggggaaaggcgcgttcgggaaggtgcactatgcaagggacctcgagtccaaccagggtgttgctatcaagatcatggacaaggaaagggtgctcaaggccgggctctcggagcaggtaaagcgcgagatcacgacgatgcggctggtggaacacaaaaacatcgttcgtctccatgaggtcatggcgacgcggaacaagatctacatcatcatggagtatgcgaaagggggtgagctcttggacaaggttaagaggagcggcaggctgacggaggctgacacacacagatacttccaacagctcattggcgcactggatcactgccacagccgaggtgtataccaccgagacttgaagcctgagaacctgctgttgaatgagaatggggacctcaaggtgactgactttggactgagcgcgttttcagagtcgaggaggacagatgggctgctccatactgtctgtgggacaccggtgtatatagctccggaggtgatcaagaagacgggctacgatggtgcaaaatcagacatctggtcttgtggtgtcgtcctgtttgttctcgctgctggctacctccctttccagggcccaaacttgatggagatttatcgaaagataaatgatagtgatttcaggtgccctggttggttttcacacaaactcaagaggctgctgtacaagattttgaaccccaaccccagcatgagaccttcaattcaggagataaaagagtctacctggtttcgaaaaggtccaagggagatcagtgcagtgaaggagaaagttcttagcgagaatgccaccgccacaaatgctgccccagtgcttgctgctaggcgcaaggagattgctcatgaagatatgaagcccctggttgccacaaaactcaatgcctttgaaatcatcgcgttctcagcagggttggacctttctggtctgtttatcaaggagtgtaggaaggagacaaggttcacttcagataagccagcattggccatcatctcaaagcttgaagatgtcgcgaaagcactgaatctcaggataaggaagaaggacaacaacactgtcatcattcaagggaggaagcatgggggcaatggtgtccttcagtttgacacgcagatctttgagatcacaccatcctgccatctcgttcagatgaaacaaaccagtggcgatcttattgagtaccagaaactgttggaagagggcatccggccagggctgaaggacgttgtctgggcctggcatggagatgatctgcagcagaagtaggagtagcttcagatgtctcctgtagattatgttatacattccattccttattttttagcaacaacattctcttttttgtattggtggtgatatgaaccattaggctatgttttgttgagcaataattgttgaggagctgagttgttgtgttacattctgaagattgttacagttttgtaatggctgtcaatatcagtaatgaaaataaatgttgttgatcctt

SEQ ID NO: 96882 - DNA, 275 bp, Zea Mays
gcttccatgttattgcattctgatacttgagacttttattatgactatgtatgagatattgtctcttattagtactggatgatgagatgtgtcttattatgactatggatgagactttttgatgtaattgatgagactatagatgagacttttatgatgtaattgatgagactatggatttaaatattgttatgtgattgtgtgagatgttttatgcgaaaatatgttgtgctatatagctgttgatatatttgttatgttgtggaatgtggtgt

SEQ ID NO: 96883 - DNA, 803 bp, Zea Mays
gatttcaattgcaagtaatgttcaaatcagggcttgtttctctatattcgcagttgttgctattgttgtgtatcctgcaactagcagccctcaatctttatcacaggatatattcatcatagtaatccagcaacactatttttatatagcaacttgtttgtcacttgccaaagaaagttattagtcaaagggagggttttactatatgttgataatgggcatttggctgtgcgtcactattttcatatagctatctctgtagccaaagttttagacctactacatgtacctttttattgtttctacacttgaaagattaaatgcctgtttggtttgtgtctaactatgccacactttgcttaaatgcctgtaatttttatttcctaaatatgtctttttatgctaatttgaatacgctattacgcccaattactagatcgcgcgtatgctcctctttgtaaacacgtagaccactaatcttacattgtttttgttcttccttttgtgcttttacgatgatttgagttggtccttttcagaacaatgcaaccccagtacctagtccactctagagcagtatacgacagatacgtccagtacccccaaatgatggacaaggtacaccatgacagtagatttttttacactctggttatcttgttttaattcatcttttatgcgctccaattattttggtgaatcttagcatagaacttgaccttctattattttgtatgtttggtttgcatgggataatctggcatgggatgtatttatgaacattgatatcgttttttatgctt

SEQ ID NO: 96884 - DNA, 324 bp, Zea Mays
atgcagaggcaggggcgccctgggggatcccgactcgtcggcgtcggcgtcggcgtcgaactggtccggctcggcgttgagccccctgacgaggaagaagcccgcgacggtggcggagaggaagatgaggatgacccgcagcgggcacatctcttgctgacttctccgggcccggggtccctcccccgaccgaggaatcgagcaatcgaccaatatggcgtggacggagggcaagcggttcagaaaagtcggcacctttgccttttattgcttgctccgagctgggggcggggggctctgggcgtctggcgacggggagaatag

SEQ ID NO: 96885 - DNA, 687 bp, Zea Mays
atgggcaggtacatcatgcgcacggggtccaccggcttgggcagcatcttgttcacgtccccgaggatgacggggcacaggcaccgaaggatgcggtcgtcgccttccgccgccgagctggagctgttgaggaacgccccgagacccgcgcagcactcgctctgcggcgtgggggtctccggctcgctccccgtcaggaacgtcccgcacgtcatcagccccgcgagcggggtcacgcagtcggtcggcgacgacggcgtggagccgccgcccacgctgcccgccggcaggccggggaagcccggcagctgcggcaccaccgcgccaggcctggcgcagggcgccggtgacactggacccgacgacgacggcaggccgggcatgggtgacggcaccaccggggaggacgagccgctggacaccggcggcgacggcctcggtctcgggtaccccgggaacacggggttacgcggcctgctgcccgggcggcccgggaaccggagcgcgtcggcgtctgccgggttgctcgccgccaccgatggctgcaccgacgtgagcatggccgcgacggcgagcatggtggcaatgcacttggccatggatgctgctgtcgcctccttgctactgatgatggcttgcattgctgtgacagttcagatcaaccacaggaccggagcgagcagatga

SEQ ID NO: 96886 - DNA, 167 bp, Zea Mays
atgaaaacaatgcagggcacaagacacgtcttcatgcattcatatgacaattatatgtacaaacacggcacttggacacactatttccaaccactgctaaacgctttgcgtgttcttctccaaccttcaagcgtcactcagcaacaaggctcccttcaagactgagc

SEQ ID NO: 96887 - DNA, 123 bp, Zea Mays
aagaaaagtggaggcaaagagaagggcctagttgtattcaccttgattgcttctttccagaaggaagaagtgggttttgagcatcaggctgcaatcatgcctgatgttcctccgccagaacag

SEQ ID NO: 96888 - DNA, 2455 bp, Zea Mays
ctctagcagtctcttgcacaagcaccccaaccagccagccagccagccattactcggaagcttgcttgctgctgctggctgctgaaggcgcagcagagctagcaaaggctttcccatccaaaggcggggcgggggagcgactctctcaggcaaaaataaaagcttgatgtgaagccgcttgctctgcgattgctggttgcggcgggctgcagcgttgtctgaggtgcgtggtcaagtcgaggcgaagatgagcaaggaggacgtgctcaaggtgcagacttgcgtgctgaaagtgaatatccactgcgatgggtgcgagaagaaggtcaagaagatcctccacaagatcgatggcgtgtaccagagcagcatagatgcggagcaggggaaggtgacggtgtccggcctcatggatccggccaccgtcatcaagaagctcaacaaggcgggcaagccggcgcagctgtggggcgccaagcctggcgtggtgagccagctccagaagctgcagcttggcggcggcggcggtggcggcggtggcaaggacaagcagcccaagggtggcgacggcgggggcaagggtcagcagcctaagggtggcgacggcggcgggaagggccagcagaccaagggcggcggcggcggaggaggaggaggaggcaagggcgggaaagatgcgaacatggtgctgccgcagccgacaccacagcagatgcagcagctgatgcagatgaagggcatgaagctgcctcctgagctcctcatgggcatgggcggcagcaagatgccgccgttcccgtcgcccgcgcctgcacccggcccgccgccgccggcggccaaggaccccaagcccgccaagttcagctaccccgaggacgacgagttcggggacgaaggcagcgagttcgacgacgagttcgatgacttcgacgatgaggacgacttcgaggacgacggcttcgacgatgacgacctgtacggtgaccccaagatgatggcgaagcccgtggccatgccgccggccgccggcaagaaaggcgggaacggtggcaagaagggcggtggcggtgggaacgagatccccgtgcaggtgaaggggaacgcgcacaacggcggcggcaagaaggactcgggcgcgaagcagaaccagggaggcgggaagaacggcggcggcggcggcggctcgcaggcgccgcagaacggcaagggcggcgggaacgggaaccagcagggcaagaagggcggcggcggcggcggtggtgggccgcctgccggttctggcgccccgatgatgggcagcatggcaatgccagcgccgcggccgccgctgccgcagcagcaacagccgggcccgggcatgatgatgaggccgccgaacatgatgggcggcgccggtttccccggtggtggcatggggccgggcatgggccagatgggcggcgcgccgatgggccaccctcaccacccgcacccgcacccgcaccagcacatgggtgcgggtggcaatggcatgcagatgcagcctggcggtggcggtggcggtgccgtgcatggcatgccagccggcgccatgccgggacatgctgctgggttctaccaaggcggcggtggtgcagccggcggcggcatgccgtccgggccagagatgctgcaggcggccgggaaccccatggccatggcggcgcagcagcagcagtacatggcgatgatgcagcaacagcagatgatgaatggtcacggcgccggcggcgccggcgggtacccggcgatggggtacgggtacggccggccggcgatgcagtacccaccgccgccgccgtactactaccacccgatgccgcagcggcacccgcacgacaacatgttcagcgacgagaaccccaacagctgcacggtgatgtgatcatgtccctgtcatgcatgcgaggaggcaaaggtcgctgcggcctgtcgaagctttttctcctgctgcctgctattcttccggaggagggagagaccgatcatgggtcagcgtcaccatggttggaacaaagtccccggattggattggattggatctcagtatacatgagacatgcatgagaagcccccccctaccccttttttcttctttttttttctttttcactactactactagtatttctcttttttttctagcttgtttttcacctttactttctttggacaaagagggggaaaaagaagcaacttccttgaaggcgaaggtaggtatagtagtaattatcaatagtggtgggcataagacatgatggtggtggtggttcatggggtttatagtaaggagtagctcaagaagggtggctctcatggctccccccttcttgttgctccacaatgtgatgatggtatggaggtggcatggtagaaaagcttggtgaatctcaatgtgctttcgagtgccgtgtctgtccctagtggaatggaatgt

SEQ ID NO: 96889 - DNA, 2449 bp, Zea Mays
ctctagcagtctcttgcacaagcaccccaaccagccagccagccagccattactcggaagcttgcttgctgctgctggctgctgaaggcgcagcagagctagcaaaggctttcccatccaaaggcggggcgggggagcgactctctcaggcaaaaataaaagcttgatgtgaagccgcttgctctgcgattgctggttgcggcgggctgcagcgttgtctgaggtgcgtggtcaagtcgaggcgaagatgagcaaggaggacgtgctcaagacttgcgtgctgaaagtgaatatccactgcgatgggtgcgagaagaaggtcaagaagatcctccacaagatcgatggcgtgtaccagagcagcatagatgcggagcaggggaaggtgacggtgtccggcctcatggatccggccaccgtcatcaagaagctcaacaaggcgggcaagccggcgcagctgtggggcgccaagcctggcgtggtgagccagctccagaagctgcagcttggcggcggcggcggtggcggcggtggcaaggacaagcagcccaagggtggcgacggcgggggcaagggtcagcagcctaagggtggcgacggcggcgggaagggccagcagaccaagggcggcggcggcggaggaggaggaggaggcaagggcgggaaagatgcgaacatggtgctgccgcagccgacaccacagcagatgcagcagctgatgcagatgaagggcatgaagctgcctcctgagctcctcatgggcatgggcggcagcaagatgccgccgttcccgtcgcccgcgcctgcacccggcccgccgccgccggcggccaaggaccccaagcccgccaagttcagctaccccgaggacgacgagttcggggacgaaggcagcgagttcgacgacgagttcgatgacttcgacgatgaggacgacttcgaggacgacggcttcgacgatgacgacctgtacggtgaccccaagatgatggcgaagcccgtggccatgccgccggccgccggcaagaaaggcgggaacggtggcaagaagggcggtggcggtgggaacgagatccccgtgcaggtgaaggggaacgcgcacaacggcggcggcaagaaggactcgggcgcgaagcagaaccagggaggcgggaagaacggcggcggcggcggcggctcgcaggcgccgcagaacggcaagggcggcgggaacgggaaccagcagggcaagaagggcggcggcggcggcggtggtgggccgcctgccggttctggcgccccgatgatgggcagcatggcaatgccagcgccgcggccgccgctgccgcagcagcaacagccgggcccgggcatgatgatgaggccgccgaacatgatgggcggcgccggtttccccggtggtggcatggggccgggcatgggccagatgggcggcgcgccgatgggccaccctcaccacccgcacccgcacccgcaccagcacatgggtgcgggtggcaatggcatgcagatgcagcctggcggtggcggtggcggtgccgtgcatggcatgccagccggcgccatgccgggacatgctgctgggttctaccaaggcggcggtggtgcagccggcggcggcatgccgtccgggccagagatgctgcaggcggccgggaaccccatggccatggcggcgcagcagcagcagtacatggcgatgatgcagcaacagcagatgatgaatggtcacggcgccggcggcgccggcgggtacccggcgatggggtacgggtacggccggccggcgatgcagtacccaccgccgccgccgtactactaccacccgatgccgcagcggcacccgcacgacaacatgttcagcgacgagaaccccaacagctgcacggtgatgtgatcatgtccctgtcatgcatgcgaggaggcaaaggtcgctgcggcctgtcgaagctttttctcctgctgcctgctattcttccggaggagggagagaccgatcatgggtcagcgtcaccatggttggaacaaagtccccggattggattggattggatctcagtatacatgagacatgcatgagaagcccccccctaccccttttttcttctttttttttctttttcactactactactagtatttctcttttttttctagcttgtttttcacctttactttctttggacaaagagggggaaaaagaagcaacttccttgaaggcgaaggtaggtatagtagtaattatcaatagtggtgggcataagacatgatggtggtggtggttcatggggtttatagtaaggagtagctcaagaagggtggctctcatggctccccccttcttgttgctccacaatgtgatgatggtatggaggtggcatggtagaaaagcttggtgaatctcaatgtgctttcgagtgccgtgtctgtccctagtggaatggaatgt

SEQ ID NO: 96890 - DNA, 2998 bp, Zea Mays
ctagcagtctcttgcacaagcaccccaaccagccagccagccagccattactcggaagcttgcttgctgctgctggctgctgaaggcgcagcagagctagcaaaggctttcccatccaaaggcggggcgggggagcgactctctcaggcaaaaataaaagcttggtaagcagtaagcacccgtctctgtacgtgtaggcagagctgagttgggtccggccggcgcgcgtctcttcttcctcttcctcctcccgcctcccatcacgaactcttcttcctcctccacctcctctggaccacaccgcagggcgcaggcgcaggcgcttggatcgcaagcgtcgctcatggctttctggccgacgacagggatctgcttcttctctctctgcattcactcttctctgagtgagtgagtgagtgagtgactgagtgagtggagtgagtgcgtgtatgtgtgtgcaaggacggtgttttactgcgcgccattaaagtcctctgtgtctctcactcacgcgcgcgcgctactgaatgagagccgtcttctccgacacacacccactcccccccacacccccacacacacactcacacacaccggccgccgggaaatgttgctgctgttcgtgttcttctcccgccgctgatcccagcgtttccgaaccagatgtgaagccgcttgctctgcgattgctggttgcggcgggctgcagcgttgtctgaggtgcgtggtcaagtcgaggcgaagatgagcaaggaggacgtgctcaaggtgcagacttgcgtgctgaaagtgaatatccactgcgatgggtgcgagaagaaggtcaagaagatcctccacaagatcgatggcgtgtaccagagcagcatagatgcggagcaggggaaggtgacggtgtccggcctcatggatccggccaccgtcatcaagaagctcaacaaggcgggcaagccggcgcagctgtggggcgccaagcctggcgtggtgagccagctccagaagctgcagcttggcggcggcggcggtggcggcggtggcaaggacaagcagcccaagggtggcgacggcgggggcaagggtcagcagcctaagggtggcgacggcggcgggaagggccagcagaccaagggcggcggcggcggaggaggaggaggaggcaagggcgggaaagatgcgaacatggtgctgccgcagccgacaccacagcagatgcagcagctgatgcagatgaagggcatgaagctgcctcctgagctcctcatgggcatgggcggcagcaagatgccgccgttcccgtcgcccgcgcctgcacccggcccgccgccgccggcggccaaggaccccaagcccgccaagttcagctaccccgaggacgacgagttcggggacgaaggcagcgagttcgacgacgagttcgatgacttcgacgatgaggacgacttcgaggacgacggcttcgacgatgacgacctgtacggtgaccccaagatgatggcgaagcccgtggccatgccgccggccgccggcaagaaaggcgggaacggtggcaagaagggcggtggcggtgggaacgagatccccgtgcaggtgaaggggaacgcgcacaacggcggcggcaagaaggactcgggcgcgaagcagaaccagggaggcgggaagaacggcggcggcggcggcggctcgcaggcgccgcagaacggcaagggcggcgggaacgggaaccagcagggcaagaagggcggcggcggcggcggtggtgggccgcctgccggttctggcgccccgatgatgggcagcatggcaatgccagcgccgcggccgccgctgccgcagcagcaacagccgggcccgggcatgatgatgaggccgccgaacatgatgggcggcgccggtttccccggtggtggcatggggccgggcatgggccagatgggcggcgcgccgatgggccaccctcaccacccgcacccgcacccgcaccagcacatgggtgcgggtggcaatggcatgcagatgcagcctggcggtggcggtggcggtgccgtgcatggcatgccagccggcgccatgccgggacatgctgctgggttctaccaaggcggcggtggtgcagccggcggcggcatgccgtccgggccagagatgctgcaggcggccgggaaccccatggccatggcggcgcagcagcagcagtacatggcgatgatgcagcaacagcagatgatgaatggtcacggcgccggcggcgccggcgggtacccggcgatggggtacgggtacggccggccggcgatgcagtacccaccgccgccgccgtactactaccacccgatgccgcagcggcacccgcacgacaacatgttcagcgacgagaaccccaacagctgcacggtgatgtgatcatgtccctgtcatgcatgcgaggaggcaaaggtcgctgcggcctgtcgaagctttttctcctgctgcctgctattcttccggaggagggagagaccgatcatgggtcagcgtcaccatggttggaacaaagtccccggattggattggattggatctcagtatacatgagacatgcatgagaagcccccccctaccccttttttcttctttttttttctttttcactactactactagtatttctcttttttttctagcttgtttttcacctttactttctttggacaaagagggggaaaaagaagcaacttccttgaaggcgaaggtaggtatagtagtaattatcaatagtggtgggcataagacatgatggtggtggtggttcatggggtttatagtaaggagtagctcaagaagggtggctctcatggctccccccttcttgttgctccacaatgtgatgatggtatggaggtggcatggtagaaaagcttggtgaatctcaatgtgctttcgagtgccgtgtctgtccctagtggaatggaatgtctctggtgtccccccgttcattttttttaatctttatggctttctg

SEQ ID NO: 96891 - DNA, 2553 bp, Zea Mays
gtaagcagtaagcacccgtctctgtacgtgtaggcagagctgagttgggtccggccggcgcgcgtctcttcttcctcttcctcctcccgcctcccatcacgaactcttcttcctcctccacctcctctggaccacaccgcagggcgcaggcgcaggcgcttggatcgcaagcgtcgctcatggctttctggccgacgacagggatctgcttcttctctctctgcattcactcttctctgagtgagtgagtgagtgagtgactgaatgtgaagccgcttgctctgcgattgctggttgcggcgggctgcagcgttgtctgaggtgcgtggtcaagtcgaggcgaagatgagcaaggaggacgtgctcaaggtgcagacttgcgtgctgaaagtgaatatccactgcgatgggtgcgagaagaaggtcaagaagatcctccacaagatcgatggcgtgtaccagagcagcatagatgcggagcaggggaaggtgacggtgtccggcctcatggatccggccaccgtcatcaagaagctcaacaaggcgggcaagccggcgcagctgtggggcgccaagcctggcgtggtgagccagctccagaagctgcagcttggcggcggcggcggtggcggcggtggcaaggacaagcagcccaagggtggcgacggcgggggcaagggtcagcagcctaagggtggcgacggcggcgggaagggccagcagaccaagggcggcggcggcggaggaggaggaggaggcaagggcgggaaagatgcgaacatggtgctgccgcagccgacaccacagcagatgcagcagctgatgcagatgaagggcatgaagctgcctcctgagctcctcatgggcatgggcggcagcaagatgccgccgttcccgtcgcccgcgcctgcacccggcccgccgccgccggcggccaaggaccccaagcccgccaagttcagctaccccgaggacgacgagttcggggacgaaggcagcgagttcgacgacgagttcgatgacttcgacgatgaggacgacttcgaggacgacggcttcgacgatgacgacctgtacggtgaccccaagatgatggcgaagcccgtggccatgccgccggccgccggcaagaaaggcgggaacggtggcaagaagggcggtggcggtgggaacgagatccccgtgcaggtgaaggggaacgcgcacaacggcggcggcaagaaggactcgggcgcgaagcagaaccagggaggcgggaagaacggcggcggcggcggcggctcgcaggcgccgcagaacggcaagggcggcgggaacgggaaccagcagggcaagaagggcggcggcggcggcggtggtgggccgcctgccggttctggcgccccgatgatgggcagcatggcaatgccagcgccgcggccgccgctgccgcagcagcaacagccgggcccgggcatgatgatgaggccgccgaacatgatgggcggcgccggtttccccggtggtggcatggggccgggcatgggccagatgggcggcgcgccgatgggccaccctcaccacccgcacccgcacccgcaccagcacatgggtgcgggtggcaatggcatgcagatgcagcctggcggtggcggtggcggtgccgtgcatggcatgccagccggcgccatgccgggacatgctgctgggttctaccaaggcggcggtggtgcagccggcggcggcatgccgtccgggccagagatgctgcaggcggccgggaaccccatggccatggcggcgcagcagcagcagtacatggcgatgatgcagcaacagcagatgatgaatggtcacggcgccggcggcgccggcgggtacccggcgatggggtacgggtacggccggccggcgatgcagtacccaccgccgccgccgtactactaccacccgatgccgcagcggcacccgcacgacaacatgttcagcgacgagaaccccaacagctgcacggtgatgtgatcatgtccctgtcatgcatgcgaggaggcaaaggtcgctgcggcctgtcgaagctttttctcctgctgcctgctattcttccggaggagggagagaccgatcatgggtcagcgtcaccatggttggaacaaagtccccggattggattggattggatctcagtatacatgagacatgcatgagaagcccccccctaccccttttttcttctttttttttctttttcactactactactagtatttctcttttttttctagcttgtttttcacctttactttctttggacaaagagggggaaaaagaagcaacttccttgaaggcgaaggtaggtatagtagtaattatcaatagtggtgggcataagacatgatggtggtggtggttcatggggtttatagtaaggagtagctcaagaagggtggctctcatggctccccccttcttgttgctccacaatgtgatgatggtatggaggtggcatggtagaaaagcttggtgaatctcaatgtgctttcgagtgccgtgtctgtccctagtggaatggaatgt

SEQ ID NO: 96892 - DNA, 335 bp, Zea Mays
taaaaaacaatctataatatcttgtagttgtagtttatatattttatatgatatggaaatattgtgaaaagatacagtagactagacatagcttaacaatattgcgtacgtgatcgaaacggacgtgtcgtcatcgtcgtgtgtccccatcccgtcccgtcccgttggctgcactggctcgcacaagtctcttcctctacctgcctacgaacattatccaacaaacaaaacaaaacaaaacaaaaaaccagtaatatgctagagcatggagtggtgccgtgttccgtccgtctccacgatcattggcgacggaaacaaaataaaataaataaaaa

SEQ ID NO: 96893 - DNA, 331 bp, Zea Mays
ggttttttttttttttttgctgctggtgttggtgtgcgtgacccgtggactgggtgagtgagtggcagggagaatctagccccatgtggtggtgtggcctttctgaattcttctggtttagcttctccctccctccccggccgggtcgtggcgtcgtgctcttgaagcttaatcagtggtccaggtgcgctgcagaggaatcaagcaggggtgatcaaggcaaggactgtcttcttcggctgctggcccccccatctactaagtgcttggacgacttggcatcttcgaggacgttgccatagtgccactgcagattgttcttccttggaat

SEQ ID NO: 96894 - DNA, 2334 bp, Zea Mays
tctttttgttcttttttatttgtcaccgtttcgttaaaaaataaactagtaaacgacaaatatttacgatattacagacatgtatatgctgttaattgaaaaataaaaacataaccatgtctaaataaatatgttatttaaataaattaaactatacaaatattcgagcaactattaccgaaggaagcgaagcagcaagtcagcaaccgtttcgcttgccccacttcttccaatcataaatcctggcggccaccgtctacttccccgcagcagtccgtaccggcaggtcccggtcccggtcccggtcattgcaagtttgcaacacggtcccgcaccgctctcctatcgtctcgtctcctcggaccacccagtgggcacggcacgccagttgccgacgcgcctcctgccacgggcgctcccgcgggatttcagttaccggccgcttcgtccccggagccaggcaggcaggcaggcggcggcaatgctgctgggctcgcccgtgaagcgcctgctgcggcgggcggccaagcggcggctggagaaggccgagctggcgtggctggccgccgcggcgctgctgctgctgctgctcctcctcctcggcgccgcctcgctccgctgctcggccgccgcgctggtggccgcgcacgggaggctgtgggccggcggggtctccatcgcggcatcggcggacgcggacgcggaccaccggcccgtctccgcgcctcgtgctgcggcggcggggagtggtggcggcggtgaggccgccgccgccgccgacgacgaggaggaggaggagtgcgacctgttcgacggggagtgggtctgggccggcgccggcgccggcggcgggtacccgctctaccactccagcgactgcccgttcctcgacgtcggcttccgctgcgccgagaacggccgacccgacgcgtcctacaccaagtggcgctggcagccgtcgcgctgccatctcccccgatttgatgccaaaggcatgctggagaagctacggaacaaaagagtggtttttgtcggtgattcaattggaaggaaccaatgggagtctctactttgcatgctctctagcgctgttcataacaagagctctatctatgaagttaatgggagtcccatcacaaagcacatgggtttcttgattttcaactttagtgactacaattgcacggtggaatactacagatccccttttatagtccttcaaggccgtgcgccagcaggagcccctgagattgttaggtacagtattcgagtggatgcaatggattggatgtctgaccgcggcaagtggaaggatgctgatgtattgatcttcaacactgggcattggtggaacaatgagaaaacaatcagagggggtgcctactttcaagtaggagatgaggtcaaaatgggcatgaatgttgcagatgcttacagaagatcgatacagacattgtccgattggcttcgcaaagaagttaacccaagcaagactcatgtcatctaccgcacatatgctcctgtgcatttcagaggtggtgactggaagaccggtgggagctgccacttagaaactcttccagatgtgatgccagtgaagtccctggacgaatgggccgacttgcttcagcccgtggacgatttcctagggagcaacctcagatccaagctggctggattagacctgcttaacgtgacgagaatgacggcgcagagaaaagacggccacctctcagtatacctgagcccctcaggacctgtgccccgctacaaacaggattgcagccactggtgcctgcccggagtccctgatgcctggaacgagcttctctacgcccttgtcatgaggaggcataagaagatgggtcagaatgcttcccttgctggcgctaggacacccaacactgaagagggagatggagatgtcttcagccgaccatcatgacaaaacgagcttcatagccatcctgggcgatgggttgggacacaccagttagtataggatgccagagtggcgaaacacaattttggaccatgggtgttgtttgcaggaagctgcgtaccgccctgttgtgtgctgtgtttgcatatggtgaggttagtgaatcgctgagctagaggccagtggtagtatagctttgtgtggtggaggcaaattgtatggctcgtggaattggcattggcagtgtacctagctagctagggttactacagcgaatggtgtaaatatgtagctgcggaagtgggggggtggttttaactgagacctcacagcagttacgaggtgcatgttcatgtgattcaataatttctaagctgtacaattgttgctca

SEQ ID NO: 96895 - DNA, 182 bp, Zea Mays
gtgacaattccttggtagtatcaaagatgaaccttagcctgttacacttggggtggttggaaatcagtaaagtttgctctgattatttatacatcggtttcagaaatcaagtaacaataggatataatggacaagaattttcaaggttttcttaacaaccattttgaaaaatggtcaggggt

SEQ ID NO: 96896 - DNA, 1671 bp, Zea Mays
atgcgcaagctgagcgcgccccggggcggcggggagaagctgggcgtgctgggcttcgaggtggcggcgctcatgtcgcgcgccgcggggctgtggcgcgcgctggacgaccaccacctggcgcgcctccgaggggaggctatccgcctggagggcgtgcggcggctcgtggccgacgacgacgccgcgctcctggcgctcgcgctcgccgagatggccgccgcctgccgcgacctgtcgcgcgccgtcgcccgcctgtccgcgcgctgcgccgacccgctgctccgccgcttcgacgccctcttcgccgcgctcctcaagcgccgcgccgccgacccgcacgggctgcgctacgccgcgcgcgccaagatggaccgcaaggcgcgcaagatgcagcgcctcgtggccgccacggcgcacctgtgccacgagctcgacgtgctcgccgacctggaacagcagcagcagcagcaggccgggaccggggccgggaccagcaacagccgggccgagcgcgcgcgccgcgtcgccaggcagaggcaggaggtggagcggatccgcgccgcgtcgctctggccgcgcaccttcgactacgccgtgcgcctgctcgccaggtcgctcttcaccatcgtcgccaggatcatcgaggtgttcgacctggactacgccgtggacgacgacgaggaggaggaggaggagacggcgtcgtccagggcctcgcggctctcgtggggctcctcgttcgtcagcggcagcatgcacatggtgtacccttccgacgtcgtcgtcgccggcgccgacgcgcctcggacggcgctgcgacgtgcgaggtccgggaagactgctgccgccgctaccggcagcaagagccacatgtccaggagcaagagcctgaggcagcagctcaggtggccggcggcggccggcaagcacctcatcggctgcgtcgtcgtcacggggagcagcaggcctcagggcagggacgggtggatcccgcagagcttcagctacgtatccgattccgacgaccactccagcggcgccggcatcatgagcttccactccctgggcgacggcaggcaaccaccaccaccaccaccaccgacgacgacgacgtccgtgttcgacgcctcccgcgacgcgctggcgcacccgccggaggcgtctctgggcggcgccggtctcgcgctgcactacgcgaacctgatcatgttcatcgacaggctggcggcggcgccgcaccacatccgcgccgacgagagggacgcgctgtacggcatgctgacgggcagcctccgggcgtccgtgggcgcgcggctgaggccgtcgttcgccgccgccgcgccccgcgccgaccccgcgctgtgggcggacacggtgcggcggaccctcgcgtggctcgcgccgctcgcgcgcaacacggcccggtggcaggccgagaggagcttcgggcagcggagcgtcgcgccttgtggcagcggcggcggcggcgccgccgccgtgctgctgctgcagacgctccacttcgcggaccgggggaagacggaggccgcggtcacggacctgctcgtgggactcaactacgtgtggcgagacggggctgctgagctcgacgcgaagctcggactcggatcggagtcagccgcggggcggcggcggcggttacgatga

SEQ ID NO: 96897 - DNA, 6067 bp, Zea Mays
atggacgccgagccccgccgggagggttccgatcgggcgcccgccgccgactcctccgcggcgccggacggtgacgaggcgatggcccgtggcgtcgctgctgcggagaagcctacagcggccagtgaggcgggggctggtggagacgtcgcggcggcggagcgtgggcgtgacggggagacgccggctggagatccgggggtggtggctgacgaaggcggtgctgtgggcgaccagtgtcctgcggcgcctcaagcgagcgaggtggacgagggtggcgccgcgggcaaggagcggtctgatggtggtctggcgaatggggcagttgagggcagcagcattgcgggggaagtgccagatgtggctcctgtggtatctgaagcacggatggacgaggacgggggttgctccacaggcaatgagtactctgaaatgaagatggaggtggatggcggctgcgtagcagaacgagagggcgatggtcaggaacaggaacaagagtgcactgcagctgctgtggaaagcgaggttaagacgggggaaggtgacggcggagtggtgaatcaagggactacggcacatgctgggggtcttcaggttaaagaggaggtgggggaaggcttggtgggccgctacattggacgtagcgctccagggcgcacgaggattcttattgggaaggttgtgtcctatgatagcacagctggggtctacagcctggtgtttgaggacggacacgctgaggagctggggcttcctcagctccaggagcttctcatgtcggatgataatggtgcattaggcatgaaggtgagctgccggaagaggaagctagacttgctggtttcatcagggagcgccttggaggtcaaagagccaccaagtactaggcagagggttgatggatgcgagatgtctgccaggcctgatgagctgcagcatagtgcgtctggctcggatatgtctgaggatgttgagtcttcgagcaattcatcagatttcactagagaagaaacatctgagccatgccctcctgtacaggctgtggagttgcctccgtcgtcaggcgacattcctgtgccagaagagtccataagttctctcctctctgtttataacttcttgcggtcgttcagtgtgcagctgttcctgagtccatttggactggacgattttgttgcggccattaattgcagcgtgcagaataacttgttggatgctgtgcacgtctcgctactgcgggctctgaggcggcatcttgaatctagatctgcagaaggatctcgatcggcttcaaattgcctgaagtacgcactctatcaacacactcttaaccacagggggaagagctttggtagaagccttctagtcgccgaatactataaacttcctgttaccatgaagttgagggtgctgcaaatactctgtgatgatgtcattgaatcagaagaactcaaaactgaactggaaaatcgagtaggctacaatgaggagatggagtatgagatagaatctagtgcatttttggaggctggttcaagatcagtctcaactagagcagcaaaggcctcagcttgcaaaaacacgaatgatttccataatcttctcgaaagtgctccaaatgtaacaaatcccgaaactgctccagcagtcctgtctcaggatggcaatagtgatgattgccgaatatgtgggatggatggaactttggtatgctgtgatggctgcccgtgggcatatcattcaagatgtattggtcaaaacaaagctttccttcctcagggtgactggttctgtccagaatgtatggttaacaagcttggcccaacttcctcaagaattgagcgtggtgcaagaggagctcaaatgtttggcattgatatgtgtgggagactattcttaggaacttgcaactatttgctggtgatcgaaacagcttcagatgcagagtcttatgcaagatattacaatcagtatgatgttgccaaggtcctccaaagccttgctgtctcagatgcatatgtggacatatgcaagcaaataaaggactactggaaacatttacttggtataattcataacgagagatcaacaacaggtaaagaagttggtgcgaaagtagcacttcctcaaacaaacgcgcagcagaaatttgtggctaatcagagcgcaatgtgctcagtcgaatgcctggaggaacaaaaatgcaagtcaagcttaggtgttgtcactgagaaaaatgctgaagttttcaagcaaactgtgtcagctcagaacaacatacataatgcacacagaaatggagcttttggaccatctgtggtatcctcagtttctcatcagaatggatccattgtaacaggtgggtctaacatagcacaggcgcagccagctcagagtattttccatccagacccatccaccgtttctgtgacgtcaggatcattttgtccatcttctctaggtaaacaccaccttcagatgtttccggaaagatctggaaacatgagtggtgtcaaggcagcaaaattgtcttcttttaaaccacaagcttacatgaacctctacaatcatggcaatattgcagcatctgctgctgccaatatagctgttattacatccgatgacagtaaagtttcagcatcccaactgactgcgaaacaccggaagaaaatggctgcagacaatgctctacaattgaaagcattttcttcagcagccacacaatttctttggccgagtaccgaaaagaagcttatggaagtcccaagagatagatgtggttggtgccttgcttgtagaagttcagcaattggaactaaaaaggcttgttttcttaacatggccacttcaaatgctgttaaatgctctgctcgaattcttagtgtaatgcgtgtaataaaaaattctgatagccactttcctagtattgttgcttatttagccaacatggaggaaagtttgcgtggcctcttggttggttcactacaagatatgcagcagaaagaaaggtggcatcagcaactacaagaagcttcgaactgcagaactgtaatacccctcttgcttgagttggaaagcaatatccgtggagtagcattttctgcaagttggttgaagccaatagacgattggcctttggaatctcctggtccatcaacgggcgcatctcgtcctgcacaataccaaaaacgtggggttggtggaaggcgtggcagaagacgttcggttgcatctgaatctggtactgctactgctactgatgaggacaacagctggacttggtggactggaggaaatatttcaaaacgtactttgcagaggggggctcttctacattcaaccagaagaaaagctgctcgccaaggtggtaaacagtggatagcaggtttatcttaccatgaaggttccaaatttccaaggcgatctcggcagtttgtctggagaggatgtgttggaataagccagacttcatctcaacttgctttacaggttagatatcttgatgcccacatcagatggaaggatttcatccctccagatcatattccctcagatggaaaaagttatgatgctgatttttctgctctcagaaatgctgtagtctgtgataaaaaaataattgataataagataagatacgcacttaagtttcgcaaccaaaagcatcttcctgtgcgtgtgacaaaaaatatcttggaatcagaaggtgatcaggatgaaaatagcaaattgtggttttctgaaaaccatgtgccattgtacatgctgcgagaatttgagctgcacgctggggataactccttgcctactccaggaatttcagactctaactgttttaccaatttgtacccacgacgagtaaaagcatatgctggagatgtcttttcctatctttttcacaagggagaagtctatccctgcacctcatgcaagaaggatgtcatctacagggatattgttaaatgcaacacttgtcaaggtaattgtcataaagagtgtacatcaagttctgttgttagcaaaggaagcagtgctacttccagtttgatatgcaagttatgccttcagaagcggaatcttatgcttactagctacaatacaaatgcaagctatatccagcctcaacaaaagggtaatggccaacaaccagtgaccgctctcagagttaagtttaaggttagttcttcccattctgcacagccatctgcgaaggtggaagctcagtcgagtatgaatgtgaaagcccggccagttgtaaacgtgaaaacacaaccatttgcaaaggtggaagctcagccaattatgaatgagaaagtccagccaactgcgaagatggaggtgcagccactcgcgaagatggtaactcagaacatcactggtgtccaagctctgccaaagacaaaagctaaaaagtcaaagtcagaaaaagaaaagaaacctaaaaaagttcaagcgatcacatattttggtctcgtatggaagaaaaataagactgacaaggatgatggaagtgagttcagggcaaatgatgtaatccttaaaagcaaggatagtataggttcatcaataagaccaacatgctgtctctgtgacaaagcttattctccggatttcttgtatgtacgctgtgagaggtgccggaattggtttcatggtgatgccttgcaacttgaagaagaaaggattggtgagttggttgcataccggtgctgtaggtgccgaagaagagccataccacattgtcctcattctgatggttatacaaagcctgaaccagaattaagtgaacaaacagttgctgcatcatctcagtcaactatgctatctagtgaggacacttatgctttagcagatcaggacccactgcttgcttcttacgggatagttgaaccgattggtgatgatacaatggatgttggtttgtcaatgaacatgtcaagctttgcccctggaagtaaccagaaactgtctataagaagagcacaagcaaaaagtactgaatacattgaccaaggtggaagacctgtgagtgagtataatatccaaaatcaacctccagggattggaaacatcaatctcagccacacgaatgaaatttctttttcagaggtagacagtgttgatgcttcagagctattggggtgggatttaccccaaggagctgcatatgctacacctcttgatttcactgctaatcaccagtcgaatgacacttgctgtggcagctttggaatggacgagtatgagccccagacttatttctcgttcaccgagttacttgaagctgatgatacacagcttgacaatgcctttgggatgtctgctggtctgcaaggtgattgcaatggcacaggaagctttgttcaacaaggagatggtttgtctttcatggtagaagatggagcttcaaatatgaacttcccaacaaatgatcccacccccgatgaggtagcgtgcagcaagtgcatgcatactcagccaccacctgatctcaaatgtgctgtctgtgacctgcacatacacaggcagtgctcaccgtgggatcaaggtgaagaacctgttgacagcagcaattggagctgtggtggttgccgggagtggcgatgattgacttctgaacttcattgcatctgttaatagtgccagctgccggctgttatcacaaggtgggaggtacatcgcgaagtgcgacgtggatctgtaggaaaaatctccaccaagctgttacgcagtgctaattgttgttcggatgctggggttggttatttgaccaaagtttaaccatcatacagttacaatagcaatgactcctgcgatatttacactgtacatactaaagaatgggtcgacgaagaccttttgtcattctttaggctgcttgtgtgtgtgttggtggggggggggggggggggggcgtagagataagggaggatgttgttatcaccatgtgtgtggttctgaaaaccatattcatgaagctgtgttaccttgaattctcgtgctgtctttcagatagaagtgtcttggtcagaggccatttctacgcatatgcatctttgttcga

SEQ ID NO: 96898 - DNA, 1285 bp, Zea Mays
caccagtccaccgcgccacaggctccaccctcccctctcggcccggctcgatggggtccggcgtgtcgtcgagcatggcgctggcgctggcgggcttctgcttcagcgtcctcttcatcgtcttcgtctgcacgcgcctcgcctgcgcgctcgtccgccggcgccggcgccaggcccgcgcccgcctcgcggccgccccgccgctcccgcactacgcccacggctacgccgaccccgaccctttcccgtcgttccgcgccgcccgccaccaccaccacgccccgggcctcgatcccgccgccttccccacccgcgcctacgccgccgcacaagcctccgactccgacgacggctcccagtgcgtcatctgtctggcggaatacgaagagggagacgagctccgcgtgctgcctccctgcagccacaccttccacacgggctgtatcagcctgtggctggcgcagaactcgacgtgcccggtctgtagagtctcgctgctcgtgcctgatactagtactacccctgaaagcgaacactctgcaccccatcctcctcctcctcctcatcatcatcatcatctgtccagcatagtgataataagcccaccaagctcccccgaaccgtcgagatcggacccgtgccgatgcctgttcgccagcggtggtgggcactcgtcaagggcggcagaggctcctcctcctcctcctcctcccagacacgagcccgaccaggtcgtatctggtccaccaccggcagcagatggggctagcggctacagctcgccgttgcctgaagttattcaccccgctcctgctcctgaaaccaacgggcagacagtacggaagcaggcgggcagcagatctactaccccgctaggcccctgcaaatagcggccgctcactctgtgtgggtgggtggggtgaacaggtggtgcgtggtaaaagcgaagtagagagaaacaagcgacttgaagaggcctgggttcgttcgtgtacatacgatcgagaaatcgtttcaggtcattcattcatccattcattcatccatgggcacatactgtggtattacggagtattacggtgtacgtgtagtgtgccgcaggagagacgacgcgacggcagcagtgcgttttccatatgcgacgggacgggagcattcgaggagatgatggcaatggcatggttttgtgtactgtacggtaacatttgtcgctgggaattaataataaaaaacccgtggctggctgatgcagcagcagctgtcttattatccagccacgcatgtg

SEQ ID NO: 96899 - DNA, 1006 bp, Zea Mays
tgtgtgcccaaatgatccagtccacagactcaggctcaggctctaggacgagtgatgagctctgcagccagtgacccctgtcggcggcggtagcttaaattggccaccatgtcgccacgatccatcggactcctctgcaaataaagccatcgggggagtgagtaagtgagtgggtgtgaggagagctttgaggggaggggagctagctagctactggaggagggcttcctccggcgccggacatgggggaggtgaagcacctgtgcctggccaagttcaaggacggcgtcgtggtggacgacgtgctcaagggcatgaccgacctcgccgccgggatggacacggtcaagtctttcgagtggtacacactacacacccacccgtttcttctccactcttgaccttccatcatccttccttccttcattgcttcccttctgtgaaagcaaaatccgccgaacaaacgcgtgcgtgcgtgcaggggccaggacgtgctgaaccaggagatgctgacgcagggcttcacgcacgtcttctcgctcaccttcgcctccgccgccgacctcgccgcctacatggcccacgacagccacaccgccttcgccgccaccttcatggccgccatcgacaaggtgctcgtcgtcgacttccccgtcgtcgtcgccaagcctccgccgccggcatgacccgctggccgctctcgcatccgccggccactgtacgcctccccttctcaggtcgcgcagcagatccacgtgtgcctgcggcggcggtgctggtagtagtactagtactgtctattgcctgttatttatgttctatctatctatctatctatctatctacgtcacgtacgtacctactattattgtttggttatcttcggaataaattttcggtcacttttatggtagcgtatatctagcggctagctgcttgcaatacaccctttccgatgtttatgatggattgtcagattcctaatcgacttttagttttcttgtta

SEQ ID NO: 96900 - DNA, 907 bp, Zea Mays
tgtgtgcccaaatgatccagtccacagactcaggctcaggctctaggacgagtgatgagctctgcagccagtgacccctgtcggcggcggtagcttaaattggccaccatgtcgccacgatccatcggactcctctgcaaataaagccatcgggggagtgagtaagtgagtgggtgtgaggagagctttgaggggaggggagctagctagctactggaggagggcttcctccggcgccggacatgggggaggtgaagcacctgtgcctggccaagttcaaggacggcgtcgtggtggacgacgtgctcaagggcatgaccgacctcgccgccgggatggacacggtcaagtctttcgagtggggccaggacgtgctgaaccaggagatgctgacgcagggcttcacgcacgtcttctcgctcaccttcgcctccgccgccgacctcgccgcctacatggcccacgacagccacaccgccttcgccgccaccttcatggccgccatcgacaaggtgctcgtcgtcgacttccccgtcgtcgtcgccaagcctccgccgccggcatgacccgctggccgctctcgcatccgccggccactgtacgcctccccttctcaggtcgcgcagcagatccacgtgtgcctgcggcggcggtgctggtagtagtactagtactgtctattgcctgttatttatgttctatctatctatctatctatctatctacgtcacgtacgtacctactattattgtttggttatcttcggaataaattttcggtcacttttatggtagcgtatatctagcggctagctgcttgcaatacaccctttccgatgtttatgatggattgtcagattcctaatcgacttttagttttcttgttactggctcctggttaaacaaca

SEQ ID NO: 96901 - DNA, 192 bp, Zea Mays
aacaaaactcatacgtgttgatagtttctcctgcaacaacaatgggataaaccctgagtatggaaatactcagcaagactgacccgactaaagaaaaagactttcaaggatatgctagttgttgggaatcaaggtaaggcttaccaaatttcaaagactcagttttgcagaaaagcttactagtagtggatc

SEQ ID NO: 96902 - DNA, 1658 bp, Zea Mays
atgcgtacgccggcggccggcgggtggcggctgcacccgcggggcagcagcagcagcaagctgacgaggcggatcatcagcaacgtcaagatcaccctcctctgcgccttcgtcacgctcctcgtcctccgcggcaccgtcggcgtcaaccgccgcctcgtctacatcgccggcagccccgacaaccgcgcggactcggccacggccacggccacgggcagcgccagacccgtcgaggacgtcgagcgcatcctccgcgagatacgcgcagactccgacgacgacccggacgctggccctgacgacaacgacgaggcgccgacgtcgaccagctcgtctgcggccacggggcaccactacgaccgcggcgccgcgtggacgacgacgaactacaggctgcagccgcgggtgacgcggtggaacgccaagcggcggcggtggctgcaccagaacccggggttcccgtcccgcgacgcgcgcggcggcccgcgggtgctgctggtcacggcgtcgccgcaggggccctgcggtagctccgacggcgaccggttcctgctccgggccaccaagaacaggctcgactactgccgcctccatggcgtcgagatggtgcacgccacggcgcggctggaggaccccgagctgcggtcggccggcgacggcaacgggtgggccaagctcgcgctgctgcggcgcctcatgctggcgcatccggaggtggagtggctgtggtggctggacgccggcgcgctcgtcaccgacatggggttcgagctcccgctggcgcgctacgagggcgcccacctcgtggtgcgcggcgactcgtaccagctcttccagcgccgagcctgggacgccgccagcaccgccagcttcctgctccgcaactgccagtggtcactggacctgctcgacgcgtggaccgtcatggcgcccaggggccgcgcccgctacgacgccggggcgctgctcacggcgacactggcgggtcggcgggctggcgaggccgacgaccagtccgcccttgtacacctgctcgtcaccgagaaggagcggtggatggaccgggtgtacctcgagaaccagtactacctacacggcgtctggacggcgctggtcggcaagtacgaggaggccatggagaagcaccacccggggtacggcgacgaccgttggcccttcgtcacgaacttcgccggctgtaatccttgcgacgacggcaagaattgcagtgacgagtacccgctggaccggtgcgccagcggcatggagcgcgccttcaacttcgccgacaaccaggtgctcaggctctacggcttccggcacgagtcgctggcgagcgccgaggtcaggcgcgtggcaaaccggtcgacggacccgctggaggccaaggaggaggctctcgctttcttgaagaagcccaatgagccggatctatggagcaacgatgtgcgcaagaatagaaagcgtaagggaaagggagatttagattctgttcttgcaagaatcctgaggagactgggatggcgatccaagtgttgaattgttttttccttctttttttgtgtttgtgtgtcttggttgttcttggattgcggttttgtactatggaaggggaacatatatacatcaagcgaattgctgttgcttgctggctc

SEQ ID NO: 96903 - DNA, 1628 bp, Zea Mays
gccagattcgtacgtacctgacacgacgagcggaaacacacgtaagaacaatgcgtacgttcatcattcagcgtacctcgtcggctgatgtgtatccatcgagctggccgctgggtgtggccggctggccgccgcctcgcctcgtgctgtgctgtgcttataaatgcctgcccgtgaggccgtgaccatccccgtccagggccagccattccaatttcccacatcctctttccatttccgcttgcagcagaaggatcgagagcaggttgctgctgtgccaatcaatggccacggcggcgctggcgctggcgctcctcgtcctcgcgctgccggcgtccctcgccgtgacgtctacgtacgtgcggccgccgccgagggccacgctgtcgtcgctgctcgaggacgacgccggcgccgacgggcagacgccgcagcaggtgcacatatcactggtagggccagacaaggtacgggtgtcatggatcaccgcggccgacgcgccggcgactgtcgactacggcacggacccaggccagtacccattctccgcgaccgggaacacgacagcctactcctacgtgctctaccagtctggcagcatccacgacgccgtcatcgggccgctgcagcccagcacaaactactactaccgctgcagcggcagctcctcgcgggagctctccttccggacgccgccggccgcgctgcccttccgcttcgttgtcgtcggggacctaggccagacggggtggacggagtccacgctcaagcacgtcgccgcggccgactacgacgcgctgctcctcccgggcgacctgtcgtacgccgacctcgtgcagccccggtgggactcgtacggccgcctcgtcgagccgctggcgagcgcgcggccctggatggtgacgcagggcaaccacgaggtcgagcgcctgccgttgctggagccgcgacccttcaaggcgtacaacgcgcggtggcgcatgccctacgactatgccgccgccgacagcgtcgccgccgcgccgccgtcggacgacaacctcttctactccttcgacgtggccggcggcgccgtgcacgtcctcatgctgggctcctacgccgactacgccgcagggagcgcgcagctccgctggctccgcgccgacctcgcggcgctccgccgccgcggcaccccgccggccttcgtgctggcgctcgtgcacgtgccgtggtacagcagcaacgaggcgcaccagggggaaggcgacgccatgcgggacgccatggaggcgcttctgtaccacggcgcgcgtgtcgacgcggtgttcgcgggccacgtccacgcgtacgagcggttccaccgcgtctacgccggcaaggaggacccctgcggccccgtctacgtcaccataggcgacggcggcaaccgggaggggctggccaacaagttcatcgacccccagccgtcgatctcggcgttccgtgaggccagcttcggccacggccgactcgaggtggtcaacgccacgcacgcgctctggacgtggcaccgcaacgacgacaaccaaccagtggttgctgaccaagtgtggatcaacagcctcgcggccaacccaacttgcaaccgaagcatcaagatgatgtag

SEQ ID NO: 96904 - DNA, 108 bp, Zea Mays
ggcaacctgacggatgtgaacgacctgaaagtatcaagttgaatgtgttgaccctagctgctacggaaaggttgccttcccagctattgaaggaatatcgaatggcgg

SEQ ID NO: 96905 - DNA, 225 bp, Zea Mays
atggagcgagcggagaacgagcggctgcggagggtggcgcggcagctggaccaggggaacaccagcctgtgcctggagaacctgctcatcatgcaggagaacgaccggctgcggaggaaggcgcagcagctggaccaggagaacaaggccctcctcgccgagctcaagcagcgcgaacaaggcacttcagcttccgcatccaccaacctgaagcagcccaagtga

SEQ ID NO: 96906 - DNA, 1674 bp, Zea Mays
gaataagtgagaaaaagattcgcttcctacgcgacgcctcgacctcgattccccattcccttcccttttcccctcccgcgcctctgcctctctctctctctcgtcgtcttctaccggcacggcgcagcacggagcatggagatggacccgccgccgccgccacccctgcacgccgaccgccgcctccgcttccgcgactacctgctcgcgctggaggaggagcgacgcaagatccaggtgtttcagcgcgagctgcccctctgcctcgacctcgtcacacagactatcgagggaatgaggagtcacatggacagcgtcgtcgtcggcagcgaggagacggtgagcgaccacggcggccccgtgctcgaggagttcatgccgctcaagcccacaaccctctcgtcctcctcctcccagccccagtcccaggacgatcacgacagcgcccactaccttgaacaccgtcgcgctgccgccgccacggccaacgacgttgtcgatgccgacaaggacgacgaggcgctgggagatccggagacggcagcagccagcagcagcaggccgttgccacatccggagacgaagaaggcgatgccggactggctgcagtccgtgcagctctggagcaaccaacaacagccctccgtgtccccaccgcagcaccaggatgagctgctgctgccgtgcaggccggtggcgctcaacgcctgcaggaagtccgggggcgcgttccagccgttcgagaaggagaagaagaaggaggacaaggaggagaagcagcgcgccgagctggagctgccgctgccggccgcggcgagctcggccgtggtcggggacagctgcgacagggccggcgccaccgacaccgacaccgacacggccgagaacaataaggctagcagcaccaaaggcggcaaggacaaggaggctcagctgtcgtcgcaggcgcccagccggaaggcgcggcggtgctgggccccggagctccaccgccggttcctgcaggcgctgcagcagctcggcgggtcccacgtggcgacgcccaagcagatccgggagctcatgaatgtcgacggcctcaccaacgacgaggtcaagagccatttgcagaagtatcgtctccacactcggcgtccgaactcggcggcggcggcggtccagagcggcggcaccagcgtcgttgcgccgccggccgcaccgcagttcgtcgtggtggggggcatctgggtgccaccgccggagtacgctgcggcagccgcagcgcagccgcagcaggtgcacgtgcacctagccggcgacgcgtcgggaacgacgacaacagccgccgacaaggtgtacgcgccggtggcgacgacgttgacgcccgcaccgcgaccgcgaccgcgtccgggtccggagaggcagtcgagcagctgctccggcgcgcggcgcaatggggacgcctgctctggctcgccggccgtgtcatcgtcgtcgtcgcagaccgcctctgcctaatgaaacgccgtcggtcggtccccagcttggcttctaattttagctgcttacgtccggaggtacagacagtcagacgtacacacgtggatatgctagcttgaatacgatgtgatccagcattttgctctctgttttttgtgattaaagataaaagaaagaagagtgataaaaaaaaaa

SEQ ID NO: 96907 - DNA, 2164 bp, Zea Mays
cacacgcattttcctctcctcggcttctccctctcgcctggcgccgccgacccgctccctgtgtgtccagttgtgcactagctaattctagacggcaagccggcaagaagaggaagaaggaagaccccggcgaggcgccatggaagcagcagctgatgcctttccctgggcagcgcagtgcgcgggcatggccctcctcgcctcctcgctctgcgtggtggcgctggccctggtgcttctgctcctccgccgctggccgtggtgcagctgccacgtctgccgggcgtacctgacggggtcgtgggcgcgggacttcaccaacttgggcgactggtacgcgcacctcctccgcgagtcggccacgggcaccgtccacgtccacgtgctaggctgcaccgtcacggccaacccggccaacgtggagtacatgctcaagaccaacttcgacaacttccccaagggcaagaccttcgcggcgctcctcggggacctcctcggacgcggcatcttcaacgtggacggccacgcctggcgccaccagcgcaagatggccagcctggagctcggcagcgtcaccgtgcgctcctacgcgttcgggatcatcgcgcaggaggtggaggcccggctcctgccgttggtcgctagcgccgccgacgccggcgcggtggtcgacctgcaggacgtgttccgccgcttcgccttcgacaccatctgcaagatctccttcggcctcgacccgggctgcctggagccggagatgcccatgtccgagctcgccgacgcgctcgacaccgctacgcgcctcagcgccacgcgcggcgccgccgcggcgccgctgctgtggagggccaagcgcctgctcaacgtcggctcggagagggagctcagggcggctatcaaactcgtcgacgagctcgcggccgccgtcatccgggagcgccgcaagctgggcgtcgccgccagtggccacgacctcctgtcccgcttcatggcctcagccggggccgacgacgacgacaggtacctgcgcgacatcgtcgtcagcttcctcctcgcggggcgcgacaccgtgtcctccgcgctcacgacgctcttcatgctcctgtccgagaacccgggcgtggcggccgccatgcgcgccgaggccggcgacggtggcccggcgccgccgctcacctacgagcacctcaagcgcatgcactacacccacgcggtgctgtacgagaacatgcggctgttcccgccggtgcagttcgactccaagttctgcgtggggccagacgtgctccccgacggcacctacgtgccgggcggcacgcgcgtgacctaccacccctacgccatgggccgcatgccgcgcatctggggcgccgaccacggcgccttccgcccgggccgctggctcaccggcgccggcggctcgttcgtccccgagagcctgtacaagtacccggtgttccaggcgggccttcgcgtgtgcctcggcaaggagctcgccgtcaccgagatgaaggcggtcgcggtggccgtcgtgagggcgttcgacgtccacgtcgtcggggacagtggcagcgccgcctgcaagccgaagttcgtgtcggggctcaccgcgtccatcagcggcgggctcccggtgaggatcagtagacgagttcgaagctagagattcttgtcttcttccttacaaaaaaaagaaagaaagaaaaaaaaacaagtagaggctagctagatcggtagattgttagctcggtgttcacgagaaggctgtgtgaactggcagtgccaatggtacggtttggcctttcagaatcagataagaaggtgacctgaatgccaagttcaaggaggcaccaatcagtaatccaacaggccagccatcattacagccgtcctaactaaatgagcacacacgctccttgcttattatcggggaaaaaagcatcatcattcaaacgagcactcaagggcctgtttgtttcagcttatagataatataatctgaattataatctaaattatataatctaaatcataatctagatagattataatttacatgtagctgtttggtagtccagattatacaaatttagattattcataaagacaacaatatccttatttgtttatttgatatgagaaagaaggatgacatatattgtaa

SEQ ID NO: 96908 - DNA, 391 bp, Zea Mays
aatacctttcccagtggttcatttttctgcaattaatatatagtcaagaggtgctggagcactggtcatcaagttcgcgaagaggataagagcaaattggttggcaacgtgttcagcagcgtggcttccagctacgacctcatgaacgatctctcatgagtgtcggtctacataggctgtggaaggacaggcttatttccaagctgaacccctttccggggatgaagcatctcgatgtgtctggtggaacaggtgatgttgctttaagtgtactggaaagagttaagagtgtgggtcacagagctgtgcagggtactcttactgaaacgaagaaggcacccatatttatgtctgtgacattaatccaaatatgctaaatgttgggaaaaag

SEQ ID NO: 96909 - DNA, 1618 bp, Zea Mays
ccctgtcccagcgatctagagagaagcacgtgcagggtgcaccgctgcatcggaacgaagaactagcagcatgggggtggccgccggcggtggggtgcggctgcgtgccagcagcgccaagaagcagcggcagcggaccctgaacaacatcaagatcacgctcctctgtggcttcatcaccgtgctggtcctccgcggcacggccggcttcaacctgctggtcagcagcggcgacctggacggcgcggcggcggacgccaaggtggtggaggacgtggagcgcatcctggccgagatccgctccgactccgaggcggacgacgtggtggtggtggtcgagggcgggtcgtcgtcgtcgtcgtcgccgcgcaacgcgacggcggccagcttcggcaacttctcggcgtcggcgacgctagtcaaggtgcgggagtacagcctgggcccgcccgtgcggggctgggacgcgcagcggcgggactggatggcccagcacccggagttcccgcgcctccacccgcggggccgcccgcgggtgctgctcgtcaccgggtcgccccctggcccctgcgacaaccccgccggcgaccactacctgctcaaggcgaccaagaataagatcgactactgccggctccacggcatcgacgtggtgcacaacatggcgcacctggacccggagctgacggggtactggtccaagctgccgctggtgcgccgcctcatgctggcgcaccctgaggtggagtggatctggtgggtggacagcgacgccatcttcaccgacatggcgttcgagctcccgctgtcccgctacgacggcagcaacctcgtcatccacggctacccggacctgctgttcgagaagcgctcgtggatctcgctcaacgccggcatcttcctgcttcgcaactgccagtggtcgctcgacctgctggacgcctgggtgcccatggggccccgcggcccctcccgcgtcgaggccggcaagctgctcacggccagcctcacgggccgcccgcccttcgacgccgacgaccagtccgcgctcatccacctgctgctggtgcagaaggagcggtggatggacaaggtgcacgtggagacggagttctacctccacggcttctggacggggctggtggacaggtacgagcagatgatggaggacaaccacccgggcctcggcgacgaccgctggcccttcatcacccacttcgtcggatgcaagacctgcggcaggtacgaggactacccgctcgaccgctgcatccggggcatggagcgcgccttcaacttcgccgacaaccaggtgctcaggctctacggattccggcaccgctcgctcacaaccgccaaggtcaggagggtcaccgaccccgccaccaacccgctcgaggcgaaggaggccgcgctcaacatggacgccaagttcacctagaaaacatcagttatacttacttatacgtacgagttttgatcagttctttctttgcgttttcttttgatttgtcttattagctttctggtttgcagaagctagaaacgttgctgttatatgtctgatgctctcggttggattcagaaaaaaaatggaactgggcagaagagtagtagt

SEQ ID NO: 96910 - DNA, 766 bp, Zea Mays
atggcagcgaaggctgccgccgccgtcaccaccatcgcccacgttgtcgtcgacgaggacgagctgttcgagctcgacatcgcactcctggacggccgcgaccacgaccaccgccgcggcggcggcggccgccgtagtagtcctgctgccggtgccgacgccgacgccgacgcggggcacgccctgctggctaactgcctgctgccgctgcggtcggtgagcaacgcggtgccggtggtggcgacgagcggcaggctgtcgtcgtcccccttcttcggtcactacagctccagctccaggaggctcttcacgccacgcagcagcaggaggttccttttccttggacggtccgctgggagttcttcggcgaggctttgcttctcgagcaggggcttcgaagccatggggagctacttccagagctgtggccactcaatgtcaatgggtgcgtgttcgaggaaatgtcaatggttactgaggagcagtccaatcatactgccaaatgaggctctggttggtttgctttcgttatcatatatgaaaatataaaacattttacctgttgaacatactttcatcaggagagacatgaataccgattgtttgaaagtttgcaccatacatttgtgaattcgtaagataagttagaagtctaaaatgtgaacagttattttatgctgggtgttaatcttcaaattgggcggacatttttttcgcatatttttgtatgtctatatcaattatgtgataatttcttaatagttct

SEQ ID NO: 96911 - DNA, 610 bp, Zea Mays
agatgtcgactgtcgactcgggtatgaggttcttgggagcatggtcgaggcgttcaaaaaatctttatggttttccccaagtgggggagccaagctagctagggtagtggaacctggtagttgctccaaccaatggcgagctcctataattgcaccattgatgggcagatggcgatgtttctcggttgctgtcataagctgctgcccgacacctcggctaaaaggagccgtccaaccgagccttttgtccccgaacacgcaggtgagatgagtggtaagtaaccaacctgagtgacagggaggatcatggcatcaagaatttagaggggaggaaggccacgatgcaggctgcagcggatctctccatggatcaaggtgtccgcgcatgattgagcacgaggcagagtccaagcacactacgtacgataacacttgtcgaaagctgctattatgggcgtttctgtgtgggatttgggcagtcaacgccacgagatttcctacgaaaactgactggctcaggggtttcatgcatacgctgcttcttttattattattattagtattattgttgttgttgttgttgttgttattattattgatattattgttg

SEQ ID NO: 96912 - DNA, 541 bp, Zea Mays
aatcgcatgatgtggaactttgtttgtgtgacagctgagtcagttgccacacttccttttgagacatcaaggccaaggtccttgagagctttcatctgcaaacataatgcccccaaacgatctccaaaacttagctgcacaatggttgcatcacggtctgagtcttgatctatctggacaactgggactgggattgcctcatcagatgtctggggacgagcagagcacgacggcactggaacggaccccgcggggatcagatcgctcacctccgggagcggggcagaggtcgcgcggcgcggaagcgcaggtgcccccgcgacggggtacgggtggcagcgggggtgggggcgacgggcaggaggcggtggtgggaggcggcgagcgccatgggtgagtgagtgggcgagcacagcaatctggagcggggcggaatcgagagtcgtgccactctgcccaccgtgaccgtctccacctcctcgcttcggcttactggagtggcgttggcgttggcgccggccggggacggaacggaaagcgg

SEQ ID NO: 96913 - DNA, 3590 bp, Zea Mays
agccttcacccctgctcgctgtgtcttctccacttcgccctgcgtacgctctcccgtctcactctctctccccctccacctcgttcgtggcgacgacagggcgaccgccgctgccaccgccgcctctccactgtgtgcccagtgctttgtccggccgttcgccggcgacgggcactcaccaccaggtgacaaaggaaaaggaagaggggcagcaaatcggtgcgctgctgttcatcaaatgctggggaggaaaccaacagatcaggggcctggtgaaatgctgcgcagcgagggtgactgactggccactccgcccgccgacccccgtttcgtgcttactggcatgctcgcagcataaaggaatcttctcggaattagccccccttcctgtggtcgtgacggccccaagtttcaagacatggaccatgtgccggctctagttcttgccgggtgctgcttcctggccctgctgcctggctgggcctgtggccttggctccatgtcgtccattgcggtgtcctatggggaggatggtccggtgttctgtggcctcaactccgacggctcccacctcgtcgcctgcttcggtgctgatgcatctgtcctgtacggcgcaccacccaacatccctttccttggcctcacggcaggggatgggttcgtgtgtggcctcctgctcgacaccaggcagccatactgctggggtagcaactcctatgtcaagagcggggtgccacagccgatggttgagggcgcaaggtactctgagctcagtgcgggggacaaccacctctgcgcactgagagctgctcaagatgggggtcgtggttccagtgctgctacatcgctgattgactgctggggatacaatatgaccgccacacatgctgttgatgaagccgtgtcgactgtttcagctggttcggtgttcaattgtggcttgtttgctcggaacaggacggtgttctgctggggcgacgagacggtgagtggtgtcgttgggctggcaccgagggatctgcactttcagtctataggcgcgggcggttaccatgtctgtggggtgttggagaatgcacaggtgttctgctggggcaggagcttggagatgcagcaggtggtgccatccagtgctatcggtgatggtgatgtgaacatagtgccgatggatgcaatgagcactgtggttggcgggcggttccatgcttgtggcatcaggagccttgaccaccaagtggcttgctggggcttcactcttcataacagtacatcgccaccaaaagggctgaagatgtatgctcttgtggctggggattacttcacttgtggagtgcctgctgagacttcgctgatgccgaggtgctggggcaacagtgggccattggcattacccatggccgtacctcctgggatttgtgtacctactgcatgcagccatgggtactatgaatatgtgaaccatggtgaagttggcagcatcaaggtgtgtaagcctgcaaactctagactctgcttgccctgtagtacaggttgcccggaaggcttgtatgagtcatctccttgcaatgcaacagctgaccgtgtttgccagtttgattgcttgaagtgtgtcacagatgagtgcctgtcattctgcttatcacagaagcggaccaagagccgcaagttgatggcttttcagatgcgcatctttgttgcagagattgtctttgctgtcgtcttggtactcagcgtgtcagtaaccacttgcctgtatgtccggcacaagcttcgacattgccaatgctcaaatagagagctgagactggctaagagcacagcatactctttccggaaggataacatgaagatccagcctgatatggaggacttgaagatcaggagagctcaggaattctcctatgaagagttagagcaagcaaccggtggcttctcagaggattcacaagtcggcaaaggcagcttctcatgtgtattcaagggcatactgagagatgggacagtggttgctgtgaagcgtgcaataaaagcatcagatgtgaagaagagctcaaaggagtttcacaacgaacttgacctcctatccaggctcaaccatgcacatttgctgaatttgcttggttactgcgaggatggcagtgagaggctcttggtttatgagttcatggctcatggatccctgtaccagcatctgcatggcaaggatccaaacttgaaaaagcgactaaactgggcaaggcgggtcaccattgctgtacaggctgctaggggaattgagtacttgcatggctatgcttgccctcctgtaattcaccgggacatcaagtcgtcaaacatattgattgatgaggatcacaatgcccgtgttgctgactttggtctgtctatattgggtcctgcagatagcggtaccccactgtctgagctgccagcagggactcttggctaccttgaccctgagtactaccgtctccactacttgactacaaaatctgatgtctacagcttcggggttgttctcctggagatactaagtggcaggaaagcgatcgacatgcagttcgaggaggggaacattgttgaatgggcagtacctctgatcaaagcaggggacatttttgccatccttgatccagtcttatctcctccctcagaccttgaggccctcaagaagattgcttctgtggcatgtaagtgtgtcagaatgcgaggtaaagatcggccttccatggataaggtgacgacagctctagagcacgcccttgcactgctgatgggcagcccctgcatcgagcagcccattctaccgaccgaggttgttcttggaagcagccgcatgcacaaggtgtcacagatgtcctctaaccactcctgctcagagaacgagcttgctgacggggaggaccaggggatcgggtacagggcaccttcctggataacttttcctagcgtgacctcatcacagaggaggaaatcatctgcatccgaagctgacatcgttggtcgaagggccacagacggcaggaacgtcgggagcagcataggtgacggactgcggtcactggaggaagaaatcgctccagcttcaccacaagagaacctgtacttgcagcacaacttctgaagaaattcaggagatgcaggaacctgagcagcgactttctgccattgttgagcagtattttaagttcggcctttcatgccctgttgaagtgttcatacgttctatataatagcagcctaaaaacagggagctaattagtactggaagaattctttttagcgtccagaagcattcatctgtagattcgtatggtcccttttattttcctggtacaatttatcttctggtggctgcagttgatggattatcgtgtatccttagcttgcaaaactgggtagtttccttaatccttcagatcatctctctggctcccgatgctgtttctgcatcctaaatggcagtagctttgggaaccaactgcatgtctgggtcgggtcaccatgttcagcattctttcgcttgtatccttgtggaaggtttcttcagttgcttgatttgtgattcgcagcaacaggctgtctgccca

SEQ ID NO: 96914 - DNA, 349 bp, Zea Mays
ggtttgtgaaatggattgagttgatccatcatcacctcattccttattaggttgtttggtttgaggattgagctagtccatcgtcttctcactcctcacttttttgtttggtttgtggaatggaatgagttgatccatcatcacctcattccttatagttagttagttagtactaatatgaggaatgaggtcatcccaccaaatttgaggaatggatccatgatgcaccactacattttggatggtttgattcctcaaaccaaacaccccctataattatttagttagtactaatatgaggaatgaggtcatcccactaaatttgaggaatggacacatgatgcatcac

SEQ ID NO: 96915 - DNA, 1106 bp, Zea Mays
tcatatgcaggtccctgacattgaggattttatatacgaaaaggccaaaacattgacatcgtcaagtaaggcaacaacatctttggtcaaggtggagaaaaaggttggagtttcttcagttataaaagttggagctccagataactgggaggcagttcttggaggcattaaaagcatgaggttatctggtgaagcccccgtagatacgaagggctgtgaaaaagctggttctctccttccacccaaggaaagaagatttgcagttctgatatcaactatgatgtcaagccagacaaaagatgaagttacacatgctgctgtggaacgcctctctgaaaacggtttacttgatccggatgctatagtgaggactgatgagaccacgcttgcgaatcttatcaaacctgtcggattctatcagcgaaaggcgcagttcataaaagaagcttctaaaatttgtcttgagcgctttggaggggatattccggattctctgaatgaactgcttgctctgaggggagttggccctaaaatggctcatttggtgatgagcattgcttggaagaatactcaaggaatctgtgttgacactcatgtgcatcgcatttctaaccgacttgggtgggtttttcgggaagggacaagacagaaaactacgacaccagaacagacaagaatttctctagagaaatggctacccaaggatgagtgggaacctataaatccattactggttggatttgggcaaactatctgtactccactgaggcccaaatgcgataagtgtggcatcaacaacatttgcccttctgcttttaaggaatcatcaagcccaattccaaagcaaaagaaaacaaggtctccatagaactctgactgtgacttgtctggcaccgacgtgagataatattttgggttgtccgtcggtggtaaatattatggggtttccttttggtcagttattgttggatcaccttggtgccgtaccattggcatttggcaatggcaagtcatgtatatcattttgtataccggtaaattgttcaagacggtatgaagacacgcttgtctaccagttactgtaacaagcgaaattttcatgtgcc

SEQ ID NO: 96916 - DNA, 1118 bp, Zea Mays
tcatatgcaggtccctgacattgaggattttatatacgaaaaggccaaaacattgacatcgtcaagtaaggcaacaacatctttggtcaaggtggagaaaaaggttggagtttcttcagttataaaagtcatttgcgcagttggagctccagataactgggaggcagttcttggaggcattaaaagcatgaggttatctggtgaagcccccgtagatacgaagggctgtgaaaaagctggttctctccttccacccaaggaaagaagatttgcagttctgatatcaactatgatgtcaagccagacaaaagatgaagttacacatgctgctgtggaacgcctctctgaaaacggtttacttgatccggatgctatagtgaggactgatgagaccacgcttgcgaatcttatcaaacctgtcggattctatcagcgaaaggcgcagttcataaaagaagcttctaaaatttgtcttgagcgctttggaggggatattccggattctctgaatgaactgcttgctctgaggggagttggccctaaaatggctcatttggtgatgagcattgcttggaagaatactcaaggaatctgtgttgacactcatgtgcatcgcatttctaaccgacttgggtgggtttttcgggaagggacaagacagaaaactacgacaccagaacagacaagaatttctctagagaaatggctacccaaggatgagtgggaacctataaatccattactggttggatttgggcaaactatctgtactccactgaggcccaaatgcgataagtgtggcatcaacaacatttgcccttctgcttttaaggaatcatcaagcccaattccaaagcaaaagaaaacaaggtctccatagaactctgactgtgacttgtctggcaccgacgtgagataatattttgggttgtccgtcggtggtaaatattatggggtttccttttggtcagttattgttggatcaccttggtgccgtaccattggcatttggcaatggcaagtcatgtatatcattttgtataccggtaaattgttcaagacggtatgaagacacgcttgtctaccagttactgtaacaagcgaaattttcatgtgcc

SEQ ID NO: 96917 - DNA, 3858 bp, Zea Mays
atgcattactagccaaccaaatcggtcgctgagccaggccccaggcccaggcacgccgctcttctcggcagtaacggaagccgagtcctctcccaccccggggcgggactcgccacttcccattcctgtgcgcctgcctcgcctcgcctcgcgtcgcactacccacccccaccagccaccaccaccaccaccaccaccaccaaccaaatggagcgcgcacgccgccacgccagccgcgcgctgctgcgccgcctgctcgcggcggccgcggcctcgcccgccgcgtccccggccacgtcgtcccgcggcatctccaccctgtcgccgccgccgccagccgcggggaagcagcagcgccgctgctgccctccaccccgcggcgcgcaccagcacgcgcaggcgcgggcggtgtcggtgtcggcgctgcagccgagcgacaccttcccgcggcggcacaactccgcgacgcccgccgagcaggaggccatggcgtccgcgtgcggcttcggcggcgtcgacgcgctggtcgacgccacggtcccgcccgccatccgcgcgccgccgatgcggttccccggcaggttcgacgccgggttcaccgagtcgcagatgctggaccacatgcggcgcctggcgtccatgaacagggacttcaagtccttcatcgggatgggctactacggcacccacgtccccgcggtggtgctgcgcaacctcatggagaacccggcctggtacacccagtacaccccgtaccaggccgagatcgcgcagggccgcctcgagtcgctgctcaactaccagaccatggtcgccgacctcaccggcctccccatgtccaacgcctccctcctcgacgaggccaccgccgccgccgaggccatggccatgtgcagcgccatcctcaggggcaagaagaggactttcctcatcgcctccaactgccacccgcagaccatcgacgtgtgccgcacccgctccgacggcttcggcatccgggtcgtcgtcgccgacgccaaggacctggactacggcggcggcgacgtctgcggcgtgctcgtgcagtaccccggcacggagggcgaggtgctcgactacgccgagttcgtccgggacgcgcacgcccacggcgtcaaggtcgtcatggccaccgacctgctcgcgctcaccgcgctgcgcccgcccggcgagatcggcgccgacatcgccgtcggctccgcgcagcgcttcggcgtgcccatgggatacggcggcccgcacgccgcgttcctcgccacgtcgcaggagtacaagcgcctcatgcccggccgtatcatcggagttagcgtcgactccaccggcaggcccgcgctccgcatggcgatgcagacccgggaacagcacatccgtcgcgacaaggccaccagcaacatctgcactgcccaggccttgctcgccaacatggctgccatgtacgctgtctaccatggcccagcggggctgaaggcgatcgctgaccgggttcatggcctggctggcaccttcgcccacggcctcaagaagctcgggacagtgacggtgcaggacctgcccttcttcgacacggtcagggtcacgtgctccgatgcacgtgcaatcgccaaggaagctgtcaagaacgagatgaaccttcgggtcgtcgatgccaacacgatcactgtagcatttgatgagacctccaccctggaggatgttgacaagctgttcaaggtgttcaacaacggcaaatcagccagtttcacagccgaatccatcgcaccagaggtctcaagctcaattcctagcagccttgctcgcgagagcccctacctaacgcatccagtcttcaacatgtaccacacagagcatgagcttcttcgttacctgcataagttgcagtccaaggatctctcgctatgccacagtatgatccctctgggttcttgcacaatgaagctaaacgctactgttgagatgatacctgttacatttcccaactttgcgaacctgcacccatttgcccccactgatcaggctgcagggtaccatgaaatgtttgacgacttgggcaacctgttatgcacgatcacaggttttgattctttctctttgcaaccaaatgctggtgctgcaggagagtatgctggattgatggttatccgtgcttaccacaactcaagaggagaccaccaccgcgatgtctgcatcattcctgtctcagcacacggcacgaaccctgcaagtgctgctatggttggaatgaagattgttgctgttggaactgatgccaagggtaacataaacatcgaggaattgaggaaagctgcagaagcaaacaaggacaacttggctgctctgatggttacctacccttcaactcacggagtctatgaagaaggcattgatgagatctgcaagatcattcatgaaaatggcggacaggtctacatggacggggctaacatgaatgctcaggttgggttaacaagccctggttttattggagctgatgtttgtcaccttaaccttcacaagacattttgcattccacatggtggaggcggtcccggcatgggtcctattggggttaagaagcatttggcaccatttttaccatctcacccagtgattcccactggtggctttcctctccctgagaaaacggaccctcttggcaccatttctgctgctccatggggatctgctttgattctgccaatttcctacacatatatagccatgatgggctcacaggggctcactgatgcttcgaagatcgcgatcttgaatgcaaactacatggcaaaacgtctagagaaacactacccagttctgttccgtggagtcaacggaactgttgcccatgaattcatcattgatctaagggcatttaagacgactgctggtatagagccggaggatgtggcaaagcgcttgatggactacgggttccacgcaccgaccatgtcatggcctgttcctggcacacttatgattgaaccaactgaaagtgagagcaaggccgaactggacaggttctgcgacgctcttatctccatcagggaagagattgcagagatagaaagcggcaaagcagatgtgcttaacaatgtcctgaagggcgctcctcacccaccgcaactcttgatgggtgacacatggagcaagccgtattccagggagtacgctgcgttccccgcggcatggctccggggcgccaagttctggccaacaactggtcgtgtggacaacgtctacggggaccgcaacctcatctgcacgctgcagcaggcgacccaggtggccgaggaagccgcggccgcaactgcaactgcgtaatctcgtccgagaaccacgataattgatcgcggcgtgcgaaacatcctcaagaaactataatgcatgcttcctgtaggagggaagcatcgtcatcttcctcgtcatcctttctgcagtgtatatactagctcatggcagcgcctgatcccccaccaccaccgcgcgcacacacaaagctgccaccttgtaattttgtacattacttcattgcttctctgttattcccatttaataaattaaaaggaatagctttttattgaatataatttgtttctcttttcataacaaaaataaataaatgaaggggcattgttcgaaataagactaagagctgatttggtggtcagagatccatgggaggaatctctttgctattcaaatttgaataataaggagattcatccacatggatcctctagatcaacaaatcagctataagagacaacaaattggattcaggttggattcaaattatacttaatattaggccataaattggctgacgctcaatttattgtgtat

SEQ ID NO: 96918 - DNA, 3725 bp, Zea Mays
tcttctcggcagtaacggaagccgagtcctctcccaccccggggcgggactcgccacttcccattcctgtgcgcctgcctcgcctcgcctcgcgtcgcactacccacccccaccagccaccaccaccaccaccaccaccaccaaccaaatggagcgcgcacgccgccacgccagccgcgcgctgctgcgccgcctgctcgcggcggccgcggcctcgcccgccgcgtccccggccacgtcgtcccgcggcatctccaccctgtcgccgccgccgccagccgcggggaagcagcagcgccgctgctgccctccaccccgcggcgcgcaccagcacgcgcaggcgcgggcggtgtcggtgtcggcgctgcagccgagcgacaccttcccgcggcggcacaactccgcgacgcccgccgagcaggaggccatggcgtccgcgtgcggcttcggcggcgtcgacgcgctggtcgacgccacggtcccgcccgccatccgcgcgccgccgatgcggttccccggcaggttcgacgccgggttcaccgagtcgcagatgctggaccacatgcggcgcctggcgtccatgaacagggacttcaagtccttcatcgggatgggctactacggcacccacgtccccgcggtggtgctgcgcaacctcatggagaacccggcctggtacacccagtacaccccgtaccaggccgagatcgcgcagggccgcctcgagtcgctgctcaactaccagaccatggtcgccgacctcaccggcctccccatgtccaacgcctccctcctcgacgaggccaccgccgccgccgaggccatggccatgtgcagcgccatcctcaggggcaagaagaggactttcctcatcgcctccaactgccacccgcagaccatcgacgtgtgccgcacccgctccgacggcttcggcatccgggtcgtcgtcgccgacgccaaggacctggactacggcggcggcgacgtctgcggcgtgctcgtgcagtaccccggcacggagggcgaggtgctcgactacgccgagttcgtccgggacgcgcacgcccacggcgtcaaggtcgtcatggccaccgacctgctcgcgctcaccgcgctgcgcccgcccggcgagatcggcgccgacatcgccgtcggctccgcgcagcgcttcggcgtgcccatgggatacggcggcccgcacgccgcgttcctcgccacgtcgcaggagtacaagcgcctcatgcccggccgtatcatcggagttagcgtcgactccaccggcaggcccgcgctccgcatggcgatgcagacccgggaacagcacatccgtcgcgacaaggccaccagcaacatctgcactgcccaggccttgctcgccaacatggctgccatgtacgctgtctaccatggcccagcggggctgaaggcgatcgctgaccgggttcatggcctggctggcaccttcgcccacggcctcaagaagctcgggacagtgacggtgcaggacctgcccttcttcgacacggtcagggtcacgtgctccgatgcacgtgcaatcgccaaggaagctgtcaagaacgagatgaaccttcgggtcgtcgatgccaacacgatcactgtagcatttgatgagacctccaccctggaggatgttgacaagctgttcaaggtgttcaacaacggcaaatcagccagtttcacagccgaatccatcgcaccagaggtctcaagctcaattcctagcagccttgctcgcgagagcccctacctaacgcatccagtcttcaacatgtaccacacagagcatgagcttcttcgttacctgcataagttgcagtccaaggatctctcgctatgccacagtatgatccctctgggttcttgcacaatgaagctaaacgctactgttgagatgatacctgttacatttcccaactttgcgaacctgcacccatttgcccccactgatcaggctgcagggtaccatgaaatgtttgacgacttgggcaacctgttatgcacgatcacaggttttgattctttctctttgcaaccaaatgctggtgctgcaggagagtatgctggattgatggttatccgtgcttaccacaactcaagaggagaccaccaccgcgatgtctgcatcattcctgtctcagcacacggcacgaaccctgcaagtgctgctatggttggaatgaagattgttgctgttggaactgatgccaagggtaacataaacatcgaggaattgaggaaagctgcagaagcaaacaaggacaacttggctgctctgatggttacctacccttcaactcacggagtctatgaagaaggcattgatgagatctgcaagatcattcatgaaaatggcggacaggtctacatggacggggctaacatgaatgctcaggttgggttaacaagccctggttttattggagctgatgtttgtcaccttaaccttcacaagacattttgcattccacatggtggaggcggtcccggcatgggtcctattggggttaagaagcatttggcaccatttttaccatctcacccagtgattcccactggtggctttcctctccctgagaaaacggaccctcttggcaccatttctgctgctccatggggatctgctttgattctgccaatttcctacacatatatagccatgatgggctcacaggggctcactgatgcttcgaagatcgcgatcttgaatgcaaactacatggcaaaacgtctagagaaacactacccagttctgttccgtggagtcaacggaactgttgcccatgaattcatcattgatctaagggcatttaagacgactgctggtatagagccggaggatgtggcaaagcgcttgatggactacgggttccacgcaccgaccatgtcatggcctgttcctggcacacttatgattgaaccaactgaaagtgagagcaaggccgaactggacaggttctgcgacgctcttatctccatcagggaagagattgcagagatagaaagcggcaaagcagatgtgcttaacaatgtcctgaaggtaattaatatctcattaactgcaaagagtatgtgtgttttagcacgctacgtcttgcacagtgacacaggagatggttctgcacacaaacaggagcccaggacatctcttggattgcatgtttacagggagaggttcacaggtgtttttgctttgtttgtgcagggcgctcctcacccaccgcaactcttgatgggtgacacatggagcaagccgtattccagggagtacgctgcgttccccgcggcatggctccggggcgccaagttctggccaacaactggtcgtgtggacaacgtctacggggaccgcaacctcatctgcacgctgcagcaggcgacccaggtggccgaggaagccgcggccgcaactgcaactgcgtaatctcgtccgagaaccacgataattgatcgcggcgtgcgaaacatcctcaagaaactataatgcatgcttcctgtaggagggaagcatcgtcatcttcctcgtcatcctttctgcagtgtatatactagctcatggcagcgcctgatcccccaccaccaccgcgcgcacacacaaagctgccaccttgtaattttgtacattacttcattgcttctctgttattcccatttaataaattaaaaggaatagctttttattgaatataatttgtttctcttttcgg

SEQ ID NO: 96919 - DNA, 2058 bp, Zea Mays
tttttcttggccactactatgtgtcactgtttcattccagctcgtcgcgatgatcttgagagctgaccatttatttaccttctaactgtgatgcgttcctacagatcactgtagcatttgatgagacctccaccctggaggatgttgacaagctgttcaaggtgttcaacaacggcaaatcagccagtttcacagccgaatccatcgcaccagaggtctcaagctcaattcctagcagccttgctcgcgagagcccctacctaacgcatccagtcttcaacatgtaccacacagagcatgagcttcttcgttacctgcataagttgcagtccaaggatctctcgctatgccacagtatgatccctctgggttcttgcacaatgaagctaaacgctactgttgagatgatacctgttacatttcccaactttgcgaacctgcacccatttgcccccactgatcaggctgcagggtaccatgaaatgtttgacgacttgggcaacctgttatgcacgatcacaggttttgattctttctctttgcaaccaaatgctggtgctgcaggagagtatgctggattgatggttatccgtgcttaccacaactcaagaggagaccaccaccgcgatgtctgcatcattcctgtctcagcacacggcacgaaccctgcaagtgctgctatggttggaatgaagattgttgctgttggaactgatgccaagggtaacataaacatcgaggaattgaggaaagctgcagaagcaaacaaggacaacttggctgctctgatggttacctacccttcaactcacggagtctatgaagaaggcattgatgagatctgcaagatcattcatgaaaatggcggacaggtctacatggacggggctaacatgaatgctcaggttgggttaacaagccctggttttattggagctgatgtttgtcaccttaaccttcacaagacattttgcattccacatggtggaggcggtcccggcatgggtcctattggggttaagaagcatttggcaccatttttaccatctcacccagtgattcccactggtggctttcctctccctgagaaaacggaccctcttggcaccatttctgctgctccatggggatctgctttgattctgccaatttcctacacatatatagccatgatgggctcacaggggctcactgatgcttcgaagatcgcgatcttgaatgcaaactacatggcaaaacgtctagagaaacactacccagttctgttccgtggagtcaacggaactgttgcccatgaattcatcattgatctaagggcatttaagacgactgctggtatagagccggaggatgtggcaaagcgcttgatggactacgggttccacgcaccgaccatgtcatggcctgttcctggcacacttatgattgaaccaactgaaagtgagagcaaggccgaactggacaggttctgcgacgctcttatctccatcagggaagagattgcagagatagaaagcggcaaagcagatgtgcttaacaatgtcctgaagggcgctcctcacccaccgcaactcttgatgggtgacacatggagcaagccgtattccagggagtacgctgcgttccccgcggcatggctccggggcgccaagttctggccaacaactggtcgtgtggacaacgtctacggggaccgcaacctcatctgcacgctgcagcaggcgacccaggtggccgaggaagccgcggccgcaactgcaactgcgtaatctcgtccgagaaccacgataattgatcgcggcgtgcgaaacatcctcaagaaactataatgcatgcttcctgtaggagggaagcatcgtcatcttcctcgtcatcctttctgcagtgtatatactagctcatggcagcgcctgatcccccaccaccaccgcgcgcacacacaaagctgccaccttgtaattttgtacattacttcattgcttctctgttattcccatttaataaattaaaaggaatagctttttattgaatataatttgtttctcttttcggaacagg

SEQ ID NO: 96920 - DNA, 1453 bp, Zea Mays
gcacccgtccgcgccgcatctgcctccaggcgattcggctcccggcctccgcgtccgcacagatcgcgccgcctcgccacgccgccgcctcccgactgcccatctgccgcggccgcgcccaccgcccgactgcccgtctgccgcagccgcgcccaccgcccatcgccctctgctcccggccacacctgagcggccgagcccgacaagcggccgcgacattgccacactcctccgcgacaaacagtaggacaccgcacgcatcacgacatcagggcttcgattccaggctggctccaccactggaaatggcggcactggtgccggagtgggctaccaaggagccctgcctcatggggatcgatgaggctggccgtggccctgtcctcggtcctatggtgtatggatgtgtgtactgcgcgtgctcttacaataacactcttgcgactctcaaattcgcagattcaaagacgttgaaggaagaacaaagagaggagctatttgaaagtttaaaggccaatagctctattgggtgggaagtggatgtcatatgcccaaaggatctatctgctaaaatgttaaaaaggtcgaaagttaatctgaatgaaatatcacataactctgccatgggtcttgttagaaaagttcttgacatgggagttctactggcagaagtatatgtagatacagtgggagatcctgaaaagtacagaaccaagctgacagaaaagtttccaggggtcaaatttgtggttgccaaaaaagctgatagcctttaccctgttgttagtggagcaagtatagctgcaaaggtcactagggacagagcgttgcgaaactgggtgtttgatgaaacagctctgagtctgcacatgagaactggatcaggatatccaggagaccctgatactaagcaatggttagaagatcacaagcatccggtatttggcttcccaactttggttcgtttcagttggggaacttgtaagcccttcttcaaggacgcagttgatgttacatgggagtctgatgaagttgatgaagaagggactgacaatggaggtgccaagcgacaagtcaagctttcaagcctaggcttcactggtttcaaaaggaaaaccgaggatatcgaatcaagcggaaaaggtcgttgcaaattcttccaggctcgcaaacttgagttggtcaggaagtttcagtgatgtgtcctaatttggtagtacgtacttatatttgtggtagctggagtgtttggtttagtttgttgtagagcctaatttgaaactggtctaaattggatgttgagattggaatgggaagataatgattttccccacattgctacttctgccatttcctacgtgccgcagtagttactggatgctactgcgagtttatttgctaaactcgctttactgtttctttgcaatattgacggacgtttatttggaggata

SEQ ID NO: 96921 - DNA, 528 bp, Zea Mays
tgattcggtgatcccttgttgtgaattattttaccaaactgtgttcatatgactgtctcattaaagggcatcagtggtgcagaccctgatactaagcaatggttagaagatcacaagcatccggtatttggcttcccaactttggttcgtttcagttggggaacttgtaagcccttcttcaaggacgcagttgatgttacatggtgtgctcaatttttttcaacctttgtgtgcccaatagtgaacaaattttattactgtgttttgtgaactgcgaaacatgattctgattgctagtatgattttgccacatggtatgatatgaagggagtctgatgaagttgatgaagaagggactgacaatggaggtgccaagcgacaagtcaagctttcaagcctaggcttcactggtttcaaaaggaaaaccgaggatatcgaatcaagcggaaaaggtcgttgcaaattcttccaggctcgcaaacttgagttggtcaggaagtttcagtgatgtgtcctaatttggtagta

SEQ ID NO: 96922 - DNA, 1037 bp, Zea Mays
gcagaagggccaagatgcaaaacagcggaaaacaacttgccctccctataagcccaaagcacccggtccgccacggcgcccgcctcccctcgccggtgtcgcgtgtccctcgttcgcgcacgcccagcccgcctccacctctcatgccggagcagcaccgcatcgccggagatccgccgtactggtgatccccggagcaggagcagacgcaatggaccgcatcatgatgtcccgcccaccccttcccgccccgacccatgccgctgcgggcgccgacggtgacttcctcgagctcgacgtgctctggcccgcctccccttccgcggtaggtctcggcctccttgccgcgctcccggaggatgagggcaagaagaagaagcgcgccgcggccggggtcggggtcggggtcggggtcggagcccccgcccgatccgccgcgcgccccgtcccggagaccgtcgcagcgtccgcgatggcgaggtcggcgccggtgcggataccgtcggatcccgcgcggagggggaggtgggcccacgccggggcgggagctggcggcagcgcggaggacgccggggaggccttggtccccccgcacgagatcgtcgcgcgccgcgccgccgcgcacagctcggtgctggagggcgccgggaggacgctcaagggccgcgacctccgccgcgtccgcaatgccgtcctgcgccgcaccggcttcctcgactgaggcggaggcgagtcgtcacgtcgctttcgcgataaagttttgatcatgttgttttctcttcgcgattttgtttcccgatgatgtgtttctggtccggctactttgattccttcccctgccgagagggggttgggaaaaaatgaggtgagttgaggtgaacgagcgacgacgtaattaccttgctgtgttgtttcatcacacatatatggaaattttggcccttatatttgttccaatccttatgatgtgtgttgacaagtaatgattacatggactaagagaggtggtttgttataaatcatgcctagttctatgc

SEQ ID NO: 96923 - DNA, 564 bp, Zea Mays
atgtccggcggcagcggcgacgacgggcagcagaggcaatgccggcggggcgtcgcggtcgcggccgacgtcgagctcggcgcggcgctggcgctggccgacatggctgcaggcagtggcgcgagcgccgtggtggcggcgcagaaccacgcggccgaggagatgaccgacgacgaggagacggcggcgagcacgaggctgagcctccggctcggccgcgtcggggtgggggtggtgcagtcgccgtcctgctccagcagctccggcgctgctgctgcccatccccggcacatcatgctcaccgaggccgagaaggaggcgaagcggctgcggcgggtgctcgccaaccgggagtcggcgcggcagaccatcctccggcgtcaggcggttcgagatgaactggcgaggaaagtcgcagacctgtcgtcacagaacgcgaccatgaaaaaggagaaggacgtggtgatgaaggagtatctctcgctgaaagagacgaacgagcaactgaaagcggcggagcaggcacaccaccaccaccacctccggctctcgtcgttattctaa

SEQ ID NO: 96924 - DNA, 159 bp, Zea Mays
cgtcggagcctggccagagcccgcattacgcaccagttcaacctacccaagacgccgtctgaaatggcaagtattgagaaattcctccagttccaggacgccgtgccttgtaagatctgtgccaagcggggatgcgccacccatccgcgcagcatcgcc

SEQ ID NO: 96925 - DNA, 1211 bp, Zea Mays
atccaggatccacgcgtgtacggtgctgtaaattttgttccgaaaacatcctcctctgctgtgcgcctgtgcctctcaccccctgctagagctagacgcctagacccactctcagatccaccccaactcgcggagaccgagcccagtccagcgatgccgccgccgccgcaggcgaacggggggaaggtgaccccgaacctggcgatggacgccgaggccacgcgcatgctcaacctcacagtcctccagcgcctcgaccccgccgtcgaggacatcctcatcaccgccgcgcacgtcactctctacgacttcaacatcgacctcaaccagtggagccgcaaggacgtggaagggtcgctgttcgtcgtcaagaggaactcccagccgaggttccaattcattgtcatgaacaggcgcaacactgataatttggtggaggatttattaagcgattttgaatatgaacttcagccaccatatttgctgtaccgaaatgcttcccaagaagtaaatggtatttggttttataaccaacatgattgtgaagctgtcgcaagcctttttggaaggtaaagcttctcccttgcttgttccacataggctggtgggtataactgttacgtgtaattttctaatttaagttaactctaagtctttaacacaaaagtggatgtactgttatggtgcgagaaaagggatggatctgaggtcttaactatctaggataggactgaacaatgcccataaaagcagtttttctaggtggaactacaatgtgtatatacaggttgtaggacctaacttgggatgagggtattttgtaactactttactgaaaattgatgactactaagttttatagtttcattcacggcaatcttaagttttttttttgtgctgtgcattcactgattcatgaataaatagttatgtaaagttatctgctcatttaaaaggagttaacacgtttgatatttaaacaaaaaataatgcatattgttatatgccattcgagctatcacctatcaattttcttccaatcctcaaagcagatggtttgcccatctcaaaaaaatagagggttggaaaataaacaggaacggtttgaaaagaaaataaatgcatttgtcttttgttgctaacaagtgaaattccatgatgacacaaaatgttgaggaaattcatgtgatagtgtatttgcttcagtaaat

SEQ ID NO: 96926 - DNA, 2112 bp, Zea Mays
gcaggcctcactgacgaccatctagagtctctactgctagtgctactgctagtctgctacttgggaggctggctataaatggctggccatgacatatgcaatgcatgcctccctcagctccctctacacagcaaacggcacaccactcacctcgctgccgatctttcttcccttcccttccttccacctcggctagctagctagttattaccttagcatcccaccacatcacaccaaggtcacgcggcggccggcaagaatggcgacgcaccacctggcccagggccacccgcaggcgtggccgtgggggatggccatgtacaccaacctgcactaccaccaccaccagcagcagcagtactacgagagggagcacctgttcgagaagccactcacgccgagcgacgtgggcaagctaaaccgcctggtgatccccaagcagcacgcggagaggcacttccccctcggcggcggcgacgggaacgggaacgagaagggcctgctgctggaattcgacgacgaggccggcaggccgtggcggttccgctactcgtactgggtcagcagccagagctacgtgctcaccaagggctggagccgctacgtcaaggagaagcgcctcgacgccggcgacgtcgtgcgcttcgaccgggtgcgcggcgccggcgtcggcgccgccgaccgtctcttcatctgctgcaggcgccgcggcgagagcgcggcggcggcgtcggcggcggcgactccgacgccgccgcccgtggcgcccgcgcttaacgccggcgagcagcagcagcagcagccgtggagccccaccgtgtgctacagcacgtcggggtcgtcgtacccgcccagcccggctagcccctacgcctaccacatcgacacgccacacgcaggcgcaggcgaggcggacgccaagagcagcggcggcacgcctactacaggtacagcgccgacgaggaagctccggctgttcggcgtcaacctcgactgcggcccggagccggagacggagacgccgacggcgccaatgtacggctacggatacgtgcaccagagtccctacgcagcagtgcccgcagttcccagctactggtaataagcaagcacggtcggaaggaacatcaccgagatcattcggtcgcattatacgtactgtactactgctagctgaagctgatagagctaattaaaatggacaagcatataagcaaagcgtcagtttctcttttttttaatgtttgctcaacttgtataggaaattaggaatgaataggataggagtaattgtgaacgaggacttagttatgttttgttttcatttgtcaacaggggcagttcatgagacagacggacggaggagatgagagagagagagagagagagagagagagagaggaagggggaggggaggaaggagatctgaagcaatgttcttgagaagcctgaagcctaaagaaccaacaaccagcgacgaaagaagaaacttagctaccactactactactgttctctcttctctgtctgtagtactgagccaccacaggtctggtggaattgaccggcgggatggaaagaaagggggagcgaaagagatcgcttgtttcccgggcaatcttctcctcctcccggcaccgcagactgggccaccccctccctttttctccttccttccgcaaacaaaccaaccctacgtgccggaccgggggggccccctcttgcaagccagcaggtagcagtagctagaaggtttcaggaaacatcaggttgaatgaaaaggagtggggtggctactagctagctagctagctaggtagagatcgagacaggggagtgacggatggtgacacacatgcatgcatgcatagtagaaaacaaacaagaggacatgcttgcagtcatgtatactggtagtagtactgtgctgtatgtgcgcgtcgtttgtggtaggagtaggagtgtaggtgagatgtgctccttcaaggaacagagaaatgtcctcatggggattttgttcttcttgcggttttcttttttcctactgctattgctatggtcgttctttcatgcactcttcctctggtacaaccaaaaatcctttcacctctg

SEQ ID NO: 96927 - DNA, 1759 bp, Zea Mays
gctccctctacacagcaaacggcacaccactcacctcgctgccgatctttcttcccttcccttccttccacctcggctagctagctagttattaccttagcatcccaccacatcacaccaaggtcacgcggcggccggcaagaatggcgacgcaccacctggcccagggccacccgcaggcgtggccgtgggggatggccatgtacaccaacctgcactaccaccaccaccagcagcagcagtactacgagagggagcacctgttcgagaagccactcacgccgagcgacgtgggcaagctaaaccgcctggtgatccccaagcagcacgcggagaggcacttccccctcggcggcggcgacgggaacgggaacgagaagggcctgctgctggaattcgacgacgaggccggcaggccgtggcggttccgctactcgtactgggtcagcagccagagctacgtgctcaccaagggctggagccgctacgtcaaggagaagcgcctcgacgccggcgacgtcgtgcgcttcgaccgggtgcgcggcgccggcgtcggcgccgccgaccgtctcttcatctgctgcaggcgccgcggcgagagcgcggcggcggcgtcggcggcggcgactccgacgccgccgcccgtggcgcccgcgcttaacgccggcgagcagcagcagcagcagccgtggagccccaccgtgtgctacagcacgtcggggtcgtcgtacccgcccagcccggctagcccctacgcctaccacatcgacacgccacacgcaggcgcaggcgaggcggacgccaagagcagcggcggcacgcctactacaggtacagcgccgacgaggaagctccggctgttcggcgtcaacctcgactgcggcccggagccggagacggagacgccgacggcgccaatgtacggctacggatacgtgcaccagagtccctacgcagcagtgcccgcagttcccagctactggggcagttcatgagacagacggacggaggagatgagagagagagagagagagagagagagagagaggaagggggaggggaggaaggagatctgaagcaatgttcttgagaagcctgaagcctaaagaaccaacaaccagcgacgaaagaagaaacttagctaccactactactactgttctctcttctctgtctgtagtactgagccaccacaggtctggtggaattgaccggcgggatggaaagaaagggggagcgaaagagatcgcttgtttcccgggcaatcttctcctcctcccggcaccgcagactgggccaccccctccctttttctccttccttccgcaaacaaaccaaccctacgtgccggaccgggggggccccctcttgcaagccagcaggtagcagtagctagaaggtttcaggaaacatcaggttgaatgaaaaggagtggggtggctactagctagctagctagctaggtagagatcgagacaggggagtgacggatggtgacacacatgcatgcatgcatagtagaaaacaaacaagaggacatgcttgcagtcatgtatactggtagtagtactgtgctgtatgtgcgcgtcgtttgtggtaggagtaggagtgtaggtgagatgtgctccttcaaggaacagagaaatgtcctcatggggattttgttcttcttgcggttttcttttttcctactgctattgctatggtcgttctttcatgcactcttcctctggtacaaccaaaaatcctttcacctctg

SEQ ID NO: 96928 - DNA, 977 bp, Zea Mays
gcatcaaggctcacctccttccctctgttcccgtctcccccggcctctctcggcaagtcggcatccgtcctcgatccacgctcagctcgcctaaggactaagcgttcagcgatgagccggggcagcagcaacggcggcgtgaggagcgccgccaggctggaggagctgcagctggacctgtccccgccgccggtggggatggaggtggacggcgccgggggcgtccacggcgacagcgactcgtcgtcgtcgtcgccgccgagctcgtgcgtgtcgtcggacgggcggagctcgagcggcggcggcggcagcagccccgggggcagtaagtcgccgatggtgatcggcgcctgcacgcggtgcctcatgtactgcatggtggccaagaaggactacccgacctgcgtcaactgcaagcagccgtgcctggtggacctgctccacggcgaggccggccgtgttggtggcggcgccaggcaggccgccgccgccgccgccgctgacgacgacgacgacaagaagaagcaggtgcaccgccgtaagcgcaggtgaagtgaggccgccgtaagaagctggtggtggtgcccgtgcccgcgccgcgcgcccagtggatgctcatacggagggtcagctaagctagcttgctagctagcccggcgaagggcgaactgactgactgccgttggatcatccactggacagctagcccgcagggtgttaggatcggaggagctaaagctagctagtagtacgtggagcagcagcttaattagttcactcgatggatgctgctgttggagtaggtggttgttgacttgttgtcaattgtcatggtgagcgtggggggagtggggttatgtgtggtggactggagacttgtggttgtggaccgtggtggtgtctccggactccggttgtaatatatatcccccattctgttccagctgaagagaacgtttgcaagctaatggaattat

SEQ ID NO: 96929 - DNA, 997 bp, Zea Mays
gcatcaaggctcacctccttccctctgttcccgtctcccccggcctctctcggcaagtcggcatccgtcctcgatccacgctcagctcgcctaaggactaagccatcagcgttcagcgatgagccggggcagcagcaacggcggcgtgaggagcgccgccaggctggaggagctgcagctggacctgtccccgccgccggtggggatggaggtggacggcgccgggggcgtccacggcgacagcgactcgtcgtcgtcgtcgccgccgagctcgtgcgtgtcgtcggacgggcggagctcgagcggcggcggcggcagcagccccgggggcagtaagtcgccgatggtgatcggcgcctgcacgcggtgcctcatgtactgcatggtggccaagaaggactacccgacctgcgtcaactgcaagcagccgtgcctggtggacctgctccacggcgaggccggccgtgttggtggcggcgccaggcaggccgccgccgccgccgccgctgacgacgacgacgacaagaagaagcaggtgcaccgccgtaagcgcaggtgaagtgaggccgccgtaagaagctggtggtggtgcccgtgcccgcgccgcgcgcccagtggatgctcatacggagggtcagctaagctagcttgctagctagcccggcgaagggcgaactgactgactgccgttggatcatccactggacagctagcccgcagggtgttaggatcggaggagctaaagctagctagtagtacgtggagcagcagcttaattagttcactcgatggatgctgctgttggagtaggtggttgttgacttgttgtcaattgtcatggtgagcgtggggggagtggggttatgtgtggtggactggagacttgtggttgtggaccgtggtggtgtctccggactccggttgtaatatatatcccccattctgttccagctgaagagaacgtttgcaagctaatggaattattaactatttaatc

SEQ ID NO: 96930 - DNA, 1626 bp, Zea Mays
tcccagtcccagaaatgggcaagaacggcctggtctccatcttctcccggctcgtggactccgccgcccccacctccacgtccgccgccgccacgccgtggcagtggtcggcctgcggaaccaacccgcagacgacctccttccgcgcaggcgcaggcggcgacgacgacgagccctgctgcacggcgacgccgcccacggcagcagcagcagcagccagtcgatccgtccaccggaagccggctgcgatgggccgcggcgcgccgcccggcgaaatgtacaagacggtcaactcggtcttcctggacgaccccgccgcggacgacttcttcttctccctcgccggcgacggcgacgacgaggaggaggtggcggggctctacctcgacgacaacgacgacgacgacgggttctcgaccaccacggcgtccgaggagtggtcggaggaggccgtgatccgcagcctgggccgcacgtccaccgaccgcttcttcttcgacccgcagcctggcccgctgccggcgtccaactccatcctcgccaccacggccgcggccgccgccgagacgccggcgaggaagaagacggtcccggtcccagtcccagtcccagggccgacagaggaggaagacgcaacggcaacgcacgcggacgagggcgacggcgtcaagaagcagcggcaaccgacgacggcggcggcggcggcggcagcggtgtcgtcgtctctggcggagcgcagcgtggcggtggcggtggactcgggcgacccgtacggcgacttccgggcgtccatggaggagatggtgtcggcgcacgggctccgcgactgggcgcagctggaggagctcctggcgtggtacctccggatcaacgggaagcagcaccaccacctgatcgtgggcgccttcgtggacctgctcctcggcctgtccacgtcctcgccctcctcctcctcctcccctccctccagcaccgccgccgagaccagcaccaccaccacgagcagcaccagcaccggctgcagctgagctgcagctgcacggccgccgccgccgccgctacgaccaccagctgtggcagtgtcgccggcgacgccgtcacagcctccgccgccgccgccgcctccggccgacgttcaggtgcacgtggtggaggatgaggaggcagcatgcaagcgctggccctgtactgctggcagcgacgacggtgatcggtcgtgcccgcagtccgcgccaccaccagtagtgctccacccactgcgcgtggcctgtcgatcgcttgagtagatgacctgctaatctccagacctttacctcctggctcctgcagctgctgatggttagtgttctaacgacaacaggatgattaaattaactggacgctgtcactaacactctctcgccatgtagtacaggtgcgcgtagcaatagtagagttagtagtagtaggagcagttggttggtgcggatcgaatcgaaggatccaatgcaatgtacaagtaactgtacctgtacgtgtagtgtagtgtaggtagagggtttctctcgagagagggagagaaaaaaaaatcaacggtttttatttccagtacgggtataaatgtataaagaccttaatttctactcc

SEQ ID NO: 96931 - DNA, 1540 bp, Zea Mays
tgtgagcaagaaacgcgtctcaaatcttcattactagtagcagcttagctacaagcacaagtagacacaaagcagacctgcttctaaatctctcacacagctaactaccacttcttcgtggacacggccttcatccaaaacgaaaggccagccgaacacacactcacacacacactgctatgctgcttgctcctgcgagacatacagtaggtaggaacagcgagaagctagctagcaaacagagcaaggaagaaacccaagaaaaagacgagctcgcaaagcacacactacggctacggctacgctacaaggacgacctggacggtggacacctggtcgtactggtactggacaatggacatacacacactgatgacacctggtgaagctaacagtaataaggtggtggtttaatctctccttcacgagatcctatcaccacccggtggcagaggggcagaggcggcggcggcggcggacatgaccaccgtccacccctgcagcaggtggagcccggccgccgggtggtgccaggatctcgggaccagaagacggagcccagccaggccacccgtgtttatttatttatttatttttcagtagtggtagtggtagtcgtagtcgtaggcggcggcgtggtacggcggggccgcggtggtgagctgcgcgcagacctcggcgaaggcggcgaggatggcggcgtggtggcggggcgcgttgagcgcgagcaggcggcggagcatgcagcgcaggtcgtcccagccgcacagccccatctccaggaccatctgcgtcatgctctcccggaagtcggcgcgcgggtcggaggactccttctccacggccacgcccccaacgccgccctctgctgcggcggcgtccgcgtccgcgtccgccgccgcgcccgcgcccgggccgcccatcttctcgtaccgcttcttcctcctgctgccctggtggtggtggtggtggtggccctgcagctgctgcctcctcctccccgccgccgctgctggcggcttgtcggcggccgacgccaggtgcttggtggtggtggggtggtgggtgtaggaggagtcgtagttggagtgggaggagtgggtggtggtgaaggtggtggcggaggaggaggcggtggaggcggccgaggacgggaagaagcccgaggaggagcgcgagctgctgcgcggcggcggcggcggctgcggcggctttggggacgggcggaggaaggacggcagctggctcagcagcctggttgtggcccggcgcgggcggcagccgcacccggcgtccaccaccgccacgtgccgccaccgccccaccgggaactgctgcaggctcccgctcccgccccgccgcgccctggacgacgacgacgacgacatggtgctggggatggtgcgggagggaggagctgtaggctatagctgcgtgcgtagctggacgggacgacgacgcctaggcctagcttccgctgctgtccatgtgtgtggcttttgggtggatggatggatggatggaacgggggaatggacgg

SEQ ID NO: 96932 - DNA, 450 bp, Zea Mays
atgcctcatgggagccctgacagggatgagacaaggtcagaggttcagagctggcctggccaggactggtttgtggaaggggctgagcgagctgtcagattgtgctggcctttcggctcttgtgcagacaaagtgcccacgttctccgcttgggctgctatactggagctgagccggttgggcgtcactgtccggcgggccaggattgaattggagcagcgagaggctgacaatgccaggggccgcatgggcgggcgacaagcagccatggccctcagtctgaggtcggggagagggggcaggcaaacccctggcagtcggcaggcactgggcacgggcggattggataatgctgctgtctgcttgtcagagtggggctgtgagaaggaaacaaagcggggactgagttggcagggttggggccttggggtgctgggctgtcagtgttag

SEQ ID NO: 96933 - DNA, 1650 bp, Zea Mays
acactctcatccccgcaacaaccgcctaccggcccgcgcgcgctgtagtctccggcagacaccaacaaggctcgtcactcccctacctccctcggtactcgctccgtctctcgtctctcgctcgcgcatcggctgggggcacggagaacgggaggcgcggaaggtcagaagcggcggccggcggcgcatcggcctcgcccaggcctagtcccgcacggtgctcggtccttctccgattctcccacagcctcgccccctcgcccctgcgcccctgcgcccctgcgcgtccagcgccccaaccccagcggcctgcggcactgatccacagtccacagacccggacaccggccgggcgaggatccgctgaccacgcagcctccaacgccgcatggagatcgtgcgctcccagaggcaggtcgccgccgcagccagtggcggcggcggcggcggcgcgggggccctgccgacctacaaggcggcgccgcagctcgaggtgcggctggaggagttcgagctcttcgccatcgaccgcctccgagttctcaaggggatttcggatggactctcgcgtgggaagaggccggaggagatggagaaactggtcagtgaattgtggaagacacacatgaggcaccaggatccagcagagaatttgaacaaggatataatatcgcactttgtgctccgtctagtctactgcagaacggaagaattgcggaagtggtttctctccatggagactacactttttcggtatcgctttcggcttgagagtcctgaaacacagaggatgcttatgactgagtttcaattgccgtataaagcactgccatactcagagtttgaggctgtgaaagacaaattgagccaagttgcacgttccattggtcaatctgccagtgttgagcatgtgttcttcaaggtacctttcgaagaagttcctgatcttgttgctggccgtcgggtatttctttcaaaaggctatgcttatgtggccatgagccaggtttgccgttaacgtggtttctctagtggttactcaattccgctgcaatatctcaaaggcacttgctttaacaaacagaaaatggacagcaactattaaagaacaagaaaaggacaggttgactcctattgttgaagcattaagcaatgcgtattttggacctgattactctcagccaaaggatgctgttgacatatctctaaaggatattgaccaactggctaaaagttctttccctctttgtatgcggcatatgctagataagttgagagaaaaccaccatctgaagcatggcggcagaatgcagtttggtctttttcttaagggtgctggactaaagttggaagatgctcttgcgttttggagggcggaattttctcaaaagattggttctgagcggtttgacaaggaatatgcctatgccatcagacataattatggaaaagaaggaaaacggacagattacactccatattcatgtcaaaagatcatttctgcaacacctggcgttggagatcaccatggatgtccgtttcgacattttgggtacaatttgacccttaatattctatagacgattactatgtgcttattatttagattggtgctctgaattttctgatagcagtatcagtttgtatttc

SEQ ID NO: 96934 - DNA, 2118 bp, Zea Mays
acactctcatccccgcaacaaccgcctaccggcccgcgcgcgctgtagtctccggcagacaccaacaaggctcgtcactcccctacctccctcggtactcgctccgtctctcgtctctcgctcgcgcatcggctgggggcacggagaacgggaggcgcggaaggtcagaagcggcggccggcggcgcatcggcctcgcccaggcctagtcccgcacggtgctcggtccttctccgattctcccacagcctcgccccctcgcccctgcgcccctgcgcccctgcgcgtccagcgccccaaccccagcggcctgcggcactgatccacagtccacagacccggacaccggccgggcgaggatccgctgaccacgcagcctccaacgccgcatggagatcgtgcgctcccagaggcaggtcgccgccgcagccagtggcggcggcggcggcggcgcgggggccctgccgacctacaaggcggcgccgcagctcgaggtgcggctggaggagttcgagctcttcgccatcgaccgcctccgagttctcaaggggatttcggatggactctcgcgtgggaagaggccggaggagatggagaaactggtcagtgaattgtggaagacacacatgaggcaccaggatccagcagagaatttgaacaaggatataatatcgcactttgtgctccgtctagtctactgcagaacggaagaattgcggaagtggtttctctccatggagactacactttttcggtatcgctttcggcttgagagtcctgaaacacagaggatgcttatgactgagtttcaattgccgtataaagcactgccatactcagagtttgaggctgtgaaagacaaattgagccaagttgcacgttccattggtcaatctgccagtgttgagcatgtgttcttcaaggtacctttcgaagaagttcctgatcttgttgctggccgtcgggtatttctttcaaaaggctatgcttatgtggccatgagccaggtggtttctctagtggttactcaattccgctgcaatatctcaaaggcacttgctttaacaaacagaaaatggacagcaactattaaagaacaagaaaaggacaggttgactcctattgttgaagcattaagcaatgcgtattttggacctgattactctcagccaaaggatgctgttgacatatctctaaaggatattgaccaactggctaaaagttctttccctctttgtatgcggcatatgctagataagttgagagaaaaccaccatctgaagcatggcggcagaatgcagtttggtctttttcttaagggtgctggactaaagttggaagatgctcttgcgttttggagggcggaattttctcaaaagattggttctgagcggtttgacaaggaatatgcctatgccatcagacataattatggaaaagaaggaaaacggacagattacactccatattcatgtcaaaagatcatttctgcaacacctggcgttggagatcaccatggatgtccgtttcgacattttggtgaagaaaatttgcgggcagcactcaacaaaatgggcgttggtgggcatgcattggaagaggtaatggataaagtgaagaacaggcattaccaggtagcttgcacattaacctttgaggccacacacggtgtctcctgtgattctggaatcaaccatccaaatcaatatttcagtgaaagccagaaagttctgcgagccaaaaaccaaacaatggagagccaatcgcaatcagcaacctaaattgtgtcagcagctggagaaactatacatttccaaaaaacttaccagcaggtaagcactgaagcaaaattcatccttgatgccaattatgttatcgtcattggctgtacctttggcgcttacctggaatattgttgctccctggtgtttccaaatcccagctgctggcttggcctaaaacgaaaacctccaggctccagctgctagctgtcataccctacaagtgatggcaccgcactctacactagaattgttacctagtgctgcgaacagcagcaggtcaaggcgtctgtagactctgtacatgtaattctcgaaagaaccaagacttctgcatt

SEQ ID NO: 96935 - DNA, 864 bp, Zea Mays
gtacctcatgtttgctccatgcattttcttctgctttactgtatctgcagtgaagaaaatttgcgggcagcactcaacaaaatgggcgttggtgggcatgcattggaagaggtaatggataaagtgaagaacaggcattaccaggtagcttgcacattaacctttgaggccacacacggtgtctcctgtgattctggaatcaaccatccaaatcaatatttcagtgaaagccagaaagttctgcgagccaaaaaccaaacaatggagagccaatcgcaatcagcaacctaaattgtgtcagcagctggagaaactatacatttccaaaaaacttaccagcaggtaagcactgaagcaaaattcatccttgatgccaattatgttatcgtcattggctgtacctttggcgcttacctggaatattgttgctccctggtgtttccaaatcccagctgctggcttggcctaaaacgaaaacctccaggctccagctgctagctgtcataccctacaagtgatggcaccgcactctacactagaattgttacctagtgctgcgaacagcagcaggtcaaggcgtctgtagactctgtacatgtaattctcgaaagaaccaagacttctgcatttaatgtaggatcagctgtgctgtgctcttagacctcatccaccagtttatctataaatttatccaaaatactgtctttcattgttctatattgtaaaccgcgttgttcgcgtagtagggtttgaaatggggatgataatggataaactgttggagatagtattatgttattgttaaactctttgagtagaagagaattctttggttttgattctgccgtgtattattttttttaa

SEQ ID NO: 96936 - DNA, 809 bp, Zea Mays
gtacctcatgtttgctccatgcattttcttctgctttactgtatctgcagtgaagaaaatttgcgggcagcactcaacaaaatgggcgttggtgggcatgcattggaagaggtaatggataaagtgaagaacaggcattaccaggtagcttgcacattaacctttgaggccacacacggtgtctcctgtgattctggaatcaaccatccaaatcaatatttcagtgaaagccagaaagttctgcgagccaaaaaccaaacaatggagagccaatcgcaatcagcaacctaaattgtgtcagcagctggagaaactatacatttccaaaaaacttaccagcaggtaagcactgaagcaaaattcatccttgatgccaattatgttatcgtcattggctgtacctttggcgcttacctggaatattgttgctccctggtgtttccaaatcccagctgctggcttggcctaaaacgaaaacctccaggctccagctgctagctgtcataccctacaagtgatggcaccgcactctacactagaattgttacctagtgctgcgaacagcagcaggtcaaggcgtctgtagactctgtacatgtaattctcgaaagaaccaagacttctgcatttaatgtaggatcagctgtgctgtgctcttagacctcatccaccagtttatctataaatttatccaaaatactgtctttcattgttctatattgtaaaccgcgttgttcgcgtagtagggtttgaaatggggatgataatggataaactgttggagatagtattattacaagataaaaaaa

SEQ ID NO: 96937 - DNA, 314 bp, Zea Mays
tcttttttatatatttcttcgcaaaaaatagtaaaacttttgcgcaaagttgaagcacgacaaagaaaaggaaacggtgccaccgagagtgtacatcgaagaaaggaaagagctttcttttgggaatgcaaaaaaaaaaaattgctaccggcggcacttgtgagttgtgacttgtctactgtcgctcgctactcctactactaggctactactactgtatgggcaggaacagattcccacgtcaaatttctaaataatactactactactaagccgtgtactctagtcgtgattttttttttcttcttcatttt

SEQ ID NO: 96938 - DNA, 114 bp, Zea Mays
atttcatctatgcaattttttataataccacgtttagacgtagatattggagctcagaattagaaattggaatcagctttcttaaattctattgtttggttgcatgtgtaattg

SEQ ID NO: 96939 - DNA, 79 bp, Zea Mays
ttcatttcatttttttattttaaacttcactctgaacaggtaaaaacagtattctgtatgacaaaatgtacgagctacc

SEQ ID NO: 96940 - DNA, 3406 bp, Zea Mays
ctagcatgctctaccataaacatggcagggacctcacttgcagctcatccagcgtccacctcaaacatctccgaccacttcgcactcgtgtcgttcaaatctcacataatgagtgacccgtcccgagcccttgcgacatggggcaaccagtctgtcccgacgtgccggtggcgtggcgtgtcgtgtggcttaaaaggacaccgccatggccgtgtggtggcattggacctcggcgagctcaaccttgttggcaccatcactcatgcgttgggaaacctcacgtacctgaggctgctcaacctttcgtcgaatcacatccatgggatcctgccaccagagctaggtaatctccatgaccttgaggacctgcaacttagctacaactacatcgaaggggagattccgtcgtcactctccaactgcagccaccttgtcaatattttgatcgatgtcaaccaattgcaaggagggataccagtcgagctcagctcattgcgcaatgtccagtcagtcaaccttgcccacaatatgcttactggaagaattccttccaagattgcaagccttttaagtctgaaacagctcaacctaaaatttaacaacttgacaggagaaattccaacggagataggagcacttgtcaatctcaattttctagatctaggtttcaaccagttttatggaaccattcctggttcacttggaaacctctcagcattgacatcgctcagaatcccctccaacgaactagaaggacgtatcccgacactgaaaggtctatcatctctcactgaacttgagttgggaaaaaacaagctcgaaggaaccattccatcttggttaggaaacatctcttcactagaaatcattgatcttcagagaaatggtatagttggtcaaatcccagaatccttaggaagtcttgagctgcttacaatcctctctctctcgtccaacagactctcaggttccatacctcatgagctcggaaacctccaagccctgactggacttttcatagataataatgaactagaaagcactttgccgccttcaatatttaatatatcttctcttcagattctgaatgtacaattcaataatttgactggaaagtttccacctgatatgggcagcatgctcccaaagctaaatgaatttcttatagcatataatcaatttcaaggcatgctcccaccatccttgtgcaatgcttcgatgcttcaacaaattcaagcaacaaacaatgccttgtcaggaacaataccccaatgccttggaacccataaggacctgactgtggtggcgttagcaggaaactggtttgaagcaagaaatgatgctgactgggactttcttgcaagtctaaccaactgtagcaatttgaaactcttagatgttaataccaacagtctccaaggtgcgctccctaattcaattggtaatctctcgacacggttggagtatcttaacataggagaaaacgacataactggaacaataacacaaggaataggaaacctcattaacgtgaatgaactttacatggcaaataatcttctcataggttctattccagcatctcttggcaaactaaagaagttaaatgaactgatgttttcaaataattctttctccggatccattcctgcaacattgggcaatctaactaaacttactatcctcacactcagtagtaatgtgattagtggagctataccttctactctcagcaactgtcctttagaagttttggatctttctcacaacaatctttctggtccgatacctaaagaactatttttcatatcaacactgtcaagtttcatggatcttgcgcacaattccctatctgggacattgccattagaagtgggtaatctaaaaaatttaggtgaacttgatttctccagcaatatgatttctggtgaaattccgatatctatcggcgagtgccaaagcttggaatatctcaacatatctggaaacctgctccaagggaccattccactttcactaggaaatctaaagggtctcttggtgcttgatctttcctacaataatctatctgggaccatccctgaaatccttggcaacctgaaaggcctttcttccttgaacctctcatttaacaaattccaaggtggtcttccaacagatggggtatttctcaatgcgtctgtcatcacagttactggaaacgatgacctgtgcggtggtatccctcaattgaaattaccaccctgctcaaaccacaccaccaagaagccacctcagaggctcggcatggtagccctaatatgcggagcggttgtttttgttacatcagtagttgtgctgtctgtgttctaccaaaactgccggaagaagaaagcaaacctacaaatttctgtcataaaccagcaatatatgagggttccttatgctgaattggccagtgcaacaaatggttttgcatctgagaacctcataggagaagggagctttggctcagtctacaaagggagaatgagaggcgacggccagcacatagctgttgctgttaaggttctcaacctcatgcaacgcggcgcaactcagagttttattgcagaatgcgagactttaagatgcgctcggcatcgaaaccttgtgaagatcttgacagtctgctccagtattgattttcagggccgtgacttcaaggcccttgtgtatgagtttttaccaaacggaaatttagaccaatggctgcacaaacatatcacaggacacaggagatggtgaacaaaaatcgctagatctggcagcaaggctaagcattgtaatagatgtggcatctgcggttgattatctacaccaatataagccaacaccaattattcactgtgatcttaaaccaagcaatgttctcctggatagtgacatggttgctcacgttggggattttggtcttgcgaggtttctgcatcaagacaaagacaaatcaagtggctgggcatcaatgagaggatcgattggctatgcggccccagagtatggactgggtaatgaagtctccactcatggggatgtctacagttttggtatactgttgctggagattttcactggaaaaagtccaacagacagtgaatttggagaagccattggactccgcaagtacgttcaaatggcatttccagacagagtgaataccatcatggaccaacaactactaactgagacagaaaccaatgaatcaaacatgtcttgctctggcagcactagaatctcctgcgtcaattccattctgcaagttggaatttcctgttcagatgaaacaacaatagatcgcccaccaatcggagatgctcttaaagagttgcaggcaattagagacaagcttcacaagcacctctctggctctcagttgaaggatcatcat

SEQ ID NO: 96941 - DNA, 1398 bp, Zea Mays
atggcttaccctggggacccgagggcacgtccagacctggagacctgtgcagttttagcatccggcgacatcaagcttagtcgcgactctctggtggggcgggctgcggtgtgtcagcttaatggcaatagccatgacacctctccaccccatgtggaggcggctctctgggaccagttaggcattcacaaggagaggctgcaggacctatctttcattgaagggcgtaacattcaggatcgcagaaggcggcgtgagttcgagtgtaattatggggttcctgactctttgggagagaaaagggtgaaggttgtttatcaggatgcagggaggaagggaagataccaccgaagggatgatgaggatagggaggatccaggccatggaggtcgccatcttcggagcaggtcttggtgggatgggagaggctctcattgtcagggggttgttgatgactgctattccaacaacaacaagcatcattttaggggcagttcctcctatcgcagctgcggtctttcccaaaatttttgggggcatggctcttggctttccaaccaggtggctgttgtggaaccacagcacaagggtacctacccgttaaagcctccaagcatcggcaagaatgtctcttttgcctcccccatcgcaactgttctaggtgcgacaatcactggtgacctgagggggccttctgtttttatttctaacacccctagtactgtctcttgtgcttttcatgacccaatgttggatgaagcacctctattctggtgttgtaggggggcacaactcttcggtgatgtacaaccttctccatgcctagtggattttatcagttcgataacaagaccagtttcccctcccctgattgcgcaaacacctctcacaaaccctgatagaactggtctgaaccggtttgctcatgaaagcaatcactctgctcctcaccttatccctacagacagcttgaaccatataccctctgatattgctgttgaaccagacttaccacaacctcatgtacatgaaacaaatgggtacagtcctttgcatattctgggagcagcctcagaaccaacctcaaccccccaagatcagctgtcaaaaacagttccattttctggaccttccacctccacacaaatgccaattaaaacagctgcctacgctgtaactcgccatagtacaagactagcaaacaaatcaaaaaaacgagacggtaaaggggcgattcagattgcccaagaactgcttgctcataagttaaaagatttggcccctaacgttgctgactcacataatgatttggtccaacagcttgtgcagcattttgatcaaccactgtccaaaggaaagattgaggccatcaagaacctgctggaaaatgggaagtag

SEQ ID NO: 96942 - DNA, 561 bp, Zea Mays
aaggtgctatgctggaatgtgagaggtctaaatgacgctgccaagcgggcgagtgtacacaatatgattttctcatctggtgcaacaattgtttgcctgcaagaaactaagatcgctaattggactactacactgctttgtcaaattttggggccgagtcttgctgcccaagcagtggcgctaccagccactgggacctttgggggcattttgctggcagcccttgaccgttttttccaactccactccccgcatatgactaatcacacagtatctgctactattacattactggctgatggcacagattggtccattacaggggtctacgggccacagtcggatcaggacaagattctctttcttgatgagatcacccaccttaaacagatcatacacccgaaatggctccttctaggtgacttcaatttaatttaccatatgagcgacaaaaacaacacaagggttaatattcaaatgatgaactgtttcaaacgagtaatagatggcttgcaattggtggaactagcaatgaggggtcgtcgatacacttggtcaaat

SEQ ID NO: 96943 - DNA, 413 bp, Zea Mays
taaatgggcaagcttggtgccaagctgaccaagctcaccaagtctcaggccgactacatcagcgtgccgatcgatcgagggtccctacaagcctgcccactaccggtactaggcagccagcacagcacacggcttgcagctcactcgggccgttgtgtgctatgaagttcgctacacactggcctgtcagttatcttttgcatgcatatgcgttatcatatacgcagtcgcgtagcaggttttcttatggttatcgcttgagctgaggcctgaggggggagggaaggcgctgtttgcttttgctgaagaataatggtgtagtcggctggggtaaggcgatgtgcgttgccagatacagttttgtcttgttgactctacttatctgattatcatttgtaagcgatttgctcaaa

SEQ ID NO: 96944 - DNA, 3582 bp, Zea Mays
gccagagcgagcgagggagcaaggaggaagacgcaccaggacattgacgagccgcggtccgcagcagcagctcccagcttcatcccccgacccggagccccagcactggtgcagcaggctcgctcgccgccgccgccgccgcgtgaagtgaggcgcgcccccccgcggacgctgacgctgggacccgcgcctgctgggagtgggcccgccccattgatgggcgccggcaggcgccggcggcgagggaaagcgtgaggacgaggagggccggcgggctccgcacgaagcaggccgggcgagcctgccgccgcgccgcctagggagggcgccgcccgtctttgcttgtttgctcgcaccgtcgcacgtcctgttccagtaccaggccagagagaaggggggcgggactgcaggcggcgggccgcggaggagctagggttctctctgttctcactctccctgcgtcgccgggatggcggttggggacgcgctgcgccggctctgcgaggaggtcggctggtcctacgccgtcttctggaaggccatcggcgccgccgaccctgtgcatttggtgtgggaggacggttgctgcggccacgtgtcatgctccgccgggtctgaggctcctgaagctgggtgcgagctgggcaccagtgtgtgcacgcttgttaggaaggtcatgacctcgcaaattcatgttgttggtgagggtaccattggccgtgctgctttcaccggaaatcatcaatggattgtccatgatcctgccaatgatcacaatctcagacccgaggtttctgctgagatgaatcatcagtttgcagctggcattcagactattgcaattattcccgtgttaccacgaggtgtactgcagctaggtgcgacaagtgtggtaatggaaaataccaaccttgtgctccagtataagaacctgtgttctcagctaaacaatcggtcgagtatggcttcatcgtcatctgttaaaaatgatttgaaccagaaaattcagtcacgccctttgaatggcctcacgagtatacaccctgcagatacacgctcaaagttttttagtggacccccattgacatatcaacaatgttatggtcctgatggcagaactgtgtctagtagtacattggcaaacatgggcagtaatgcttcaatgcttatggttgcacaaagaaatggccaagtgggtaaagaacacattgtatatgctcctgacatgaggttcagaccacaaaacccttactgtgacaggagagttgggagtaacacccaaaatagtgttgtgagctctggttttatctcgtctatctcagcatcaatggaaaggcatccattaatgaccaacaatcgacagttagaacaaggaaacactggagaaccatcagattccagaagtgttctcttgaaatctctcgcataccataaccctttagtgcatgaaaacacaaacatgactttgttgcatggaagaggccaggtgccaggctttgttaatggtcatgggggttttgattttctcccagaaggtactagagtagtcaagagtaacctgtatggcagcacaacaaatcaaattttagatcaaatatgcagttctacttctgggatgaaagggcacggaccaactatttcatataaaatcccccaacctacccaatttgttggaaaaacggagagttccaagagagagacatgtcaagcttctgttgctctgttgtctgactctgatattcaggtttctagtgtcttgaaaacagccatttcccaagagaatcagacgagtagatctgatcttattggctcaaaaaaggctaatgaagtgcatgatcctactgatgcaattgttcaagctgtcaagaatatggatcgccgcagactcccagacatatctaacgagagatcacccccattccttatggatcctgctgcagaaagtgatttgtttgacatgtttggttctgaatttcatcatttgtgtcacaatgtggataatgatcttacctggaaagctgcaaaacctgagaattcaaatagagatgtacctgaattctctgatcatcttggttcctctccagccttcaattcagtggatgacgagttcccttattctgggatcttctcactaactgataccgaccaactgttggatgcggttgtctctaatgccaatcctggtggcaagcagatatctggtgacagcgcttcttgcaagacttcagtgacagatattcctagcacttcgtattgtcgcttaaaagagccaaagcagtctgaatcatctgctcctcctttgctaatcaagaatgagttagctgtttcaaattttgttaaacatccatctttcccagaaaaggcagcggatggctgtctttctcaaaataatgcaatacagaaatctcagatacgcctctggattgagagcggacagaacttgaaatgtgaaagtgcctcagcctcaaacagcaagggcgttgatacatcaagcaaggctagtcgaaagaggtctcgaccaggagagaatcctaagccacgaccaaaggaccgccagcttattcaggatcgtataaaggagctccgggaactcgtacctaatggggcaaagtgtagcattgatgccttgttggagaagaccattaagcacatggttttcttgcaaagtgtgacaaagcatgcagataacctcaaggactcaaatgaatctaagattcttggtggtgagaatggtccattaaaagactacttcgaaggtggtgcgacttgggcctttgatgttggtagtcaatctatgacgtgtccaatcattgttgaggatcttgatcggcctcgtcagatgcttgtggagatgctttgtgaggatagaggtatcttcttggagatagctgactttattaaaggactcggattaaccatcttaaggggcgtcatggaagcacgcaaaaataaaatctgggcacggttcactgttgaggccaacagggatgtgactagaatggaaatcttcctttccctaatgcgcttgctggaaccgagttatgatggcggtggagcaggagagaatcctaataacaacataaaaatgccccttggaattgtgcagtatcccgttatccctgtgtcaggtcatcttaggtgagccagctgcccagccagcacaaagatcacaggacaggaggcatctttgaaatgctaagagcgggaggtcgacccacttctgccatgactagcattatcaacccaggacgagcgggaatctcgtggcatgcagtgcatcgtccctgcagtgtgcattcggaaagcctaacagtagaggggaatggagacatggatagttggttcggcgggtgatcattagacgatcgatgttttgactgtataatcttaactgttgctgatgcttttgccttttgttcttctgcatattagtgaattttgttatgttcttctgctgaatggaaattctgagttgaattgtagaccttgttcagttgtttctggtactagctcgaagtcggagctctctttttcttaccgttcctgtgtgattactaatgagaaactagttttactgtttac

SEQ ID NO: 96945 - DNA, 3515 bp, Zea Mays
acgcaccaggacattgacgagccgcggtccgcagcagcagctcccagcttcatcccccgacccggagccccagcactggtgcagcaggctcgctcgccgccgccgccgccgcgtgaagtgaggcgcgcccccccgcggacgctgacgctgggacccgcgcctgctgggagtgggcccgccccattgatgggcgccggcaggcgccggcggcgagggaaagcgtgaggacgaggagggccggcgggctccgcacgaagcaggccgggcgagcctgccgccgcgccgcctagggagggcgccgcccgtctttgctttaccaggccagagagaaggggggcgggactgcaggcggcgggccgcggaggagctagggttctctctgttctcactctccctgcgtcgccgggatggcggttggggacgcgctgcgccggctctgcgaggaggtcggctggtcctacgccgtcttctggaaggccatcggcgccgccgaccctgtgcatttggtgtgggaggacggttgctgcggccacgtgtcatgctccgccgggtctgaggctcctgaagctgggtgcgagctgggcaccagtgtgtgcacgcttgttaggaaggtcatgacctcgcaaattcatgttgttggtgagggtaccattggccgtgctgctttcaccggaaatcatcaatggattgtccatgatcctgccaatgatcacaatctcagacccgaggtttctgctgagatgaatcatcagtttgcagctggcattcagactattgcaattattcccgtgttaccacgaggtgtactgcagctaggtgcgacaagtgtggtaatggaaaataccaaccttgtgctccagtataagaacctgtgttctcagctaaacaatcggtcgagtatggcttcatcgtcatctgttaaaaatgatttgaaccagaaaattcagtcacgccctttgaatggcctcacgagtatacaccctgcagatacacgctcaaagttttttagtggacccccattgacatatcaacaatgttatggtcctgatggcagaactgtgtctagtagtacattggcaaacatgggcagtaatgcttcaatgcttatggttgcacaaagaaatggccaagtgggtaaagaacacattgtatatgctcctgacatgaggttcagaccacaaaacccttactgtgacaggagagttgggagtaacacccaaaatagtgttgtgagctctggttttatctcgtctatctcagcatcaatggaaaggcatccattaatgaccaacaatcgacagttagaacaaggaaacactggagaaccatcagattccagaagtgttctcttgaaatctctcgcataccataaccctttagtgcatgaaaacacaaacatgactttgttgcatggaagaggccaggtgccaggctttgttaatggtcatgggggttttgattttctcccagaaggtactagagtagtcaagagtaacctgtatggcagcacaacaaatcaaattttagatcaaatatgcagttctacttctgggatgaaagggcacggaccaactatttcatataaaatcccccaacctacccaatttgttggaaaaacggagagttccaagagagagacatgtcaagcttctgttgctctgttgtctgactctgatattcaggtttctagtgtcttgaaaacagccatttcccaagagaatcagacgagtagatctgatcttattggctcaaaaaaggctaatgaagtgcatgatcctactgatgcaattgttcaagctgtcaagaatatggatcgccgcagactcccagacatatctaacgagagatcacccccattccttatggatcctgctgcagaaagtgatttgtttgacatgtttggttctgaatttcatcatttgtgtcacaatgtggataatgatcttacctggaaagctgcaaaacctgagaattcaaatagagatgtacctgaattctctgatcatcttggttcctctccagccttcaattcagtggatgacgagttcccttattctgggatcttctcactaactgataccgaccaactgttggatgcggttgtctctaatgccaatcctggtggcaagcagatatctggtgacagcgcttcttgcaagacttcagtgacagatattcctagcacttcgtattgtcgcttaaaagagccaaagcagtctgaatcatctgctcctcctttgctaatcaagaatgagttagctgtttcaaattttgttaaacatccatctttcccagaaaaggcagcggatggctgtctttctcaaaataatgcaatacagaaatctcagatacgcctctggattgagagcggacagaacttgaaatgtgaaagtgcctcagcctcaaacagcaagggcgttgatacatcaagcaaggctagtcgaaagaggtctcgaccaggagagaatcctaagccacgaccaaaggaccgccagcttattcaggatcgtataaaggagctccgggaactcgtacctaatggggcaaagcattgatgccttgttggagaagaccattaagcacatggttttcttgcaaagtgtgacaaagcatgcagataacctcaaggactcaaatgaatctaagattcttggtggtgagaatggtccattaaaagactacttcgaaggtggtgcgacttgggcctttgatgttggtagtcaatctatgacgtgtccaatcattgttgaggatcttgatcggcctcgtcagatgcttgtggagatgctttgtgaggatagaggtatcttcttggagatagctgactttattaaaggactcggattaaccatcttaaggggcgtcatggaagcacgcaaaaataaaatctgggcacggttcactgttgaggccaacagggatgtgactagaatggaaatcttcctttccctaatgcgcttgctggaaccgagttatgatggcggtggagcaggagagaatcctaataacaacataaaaatgccccttggaattgtgcagtatcccgttatccctgtgtcaggtcatcttaggtgagccagctgcccagccagcacaaagatcacaggacaggaggcatctttgaaatgctaagagcgggaggtcgacccacttctgccatgactagcattatcaacccaggacgagcgggaatctcgtggcatgcagtgcatcgtccctgcagtgtgcattcggaaagcctaacagtagaggggaatggagacatggatagttggttcggcgggtgatcattagacgatcgatgttttgactgtataatcttaactgttgctgatgcttttgccttttgttcttctgcatattagtgaattttgttatgttcttctgctgaatggaaattctgagttgaattgtagaccttgttcagttgtttctggtactagctcgaagtcggagctctctttttcttaccgttcctgtgtgattactaatgagaaactagttttactgtttac

SEQ ID NO: 96946 - DNA, 1086 bp, Zea Mays
agtatagacagacctctttccagtcgcgttcgcggtgacaaaaagaaaaaaaaaatggaggacttgagcgccatgcgtcaccacttgatgtgccccatctcactgcagcccatgcaggaccccgtcacggcgcccaccggcatcacctacgaccggcgcgccatcgagcgctggctggccgccggccacgccacttgcccggtcactggccagccgctcgccctcgccgacctcaccccgaaccacacgctccggaggctcatccagtcctggtgcgccccgcgtccctccacgccaccggaggcggcgggtgctaataagccggcggatggcgacgacgcagtggagcactcgcagtcgcagaccgacgacgacgtcgtcaagaagctgctgcgcgcggctacttccccgcccatcgacgtgctccgcgaggccgcggcggctgcgttcgagagcgacgcggcgcggcggcgcatggtggacgccggcgtgctccagcgcgtgctccgcggcgtcgcggcaatcgccagcgaggtcaaggccgatgatccccgacaccatgagaatgagagcagctcagcgatcgcgcgcgccatcgaggccaggctcgacctcgcccgcgcgctcgccgtctctagctgcgacgacgacgagctgcggccgcagctggtcgccgacagcctcgtgcacggcctcctcgacgcggcgacggacgtgctggcggccctcgagcgcgccggcgccggcggcgccggcggcgacgcggcgcgggcgagcgcggtccggctgctggactccgtgacgggggcggccggcgcggccgtgctggagcggctgcggccggggctcttccgcgccgtcacggcggtggtgcgcgaccgggtgtcccccgccgcgacgcggtccgcgctgcgggtgctcctgcacgcgtgcccgctgggccggaaccgcgcgctggccgtggaggccggcgccgcgcgcgaggccatcgagctggagctcgacgcgccgcccgcgggcggcggcggcggcaacaggagggccacgcagtggcggagctgcataataaccattgggttcaactga

SEQ ID NO: 96947 - DNA, 704 bp, Zea Mays
acacaagtgctgtgcagcgcattgcagtggcgcaggaatctcattctcgtcccaagtcccagcttcccaagcaagcaaaccatcaccacgtacgccggccggtcgcgggcgtcgatcgaggccaccgttccgcgcggccatggtgggcggacgagcgacgcgcctggcgccgcttctgctgctgctgccgctgctggcggtggtgtcctgtgacggcgaggctacgacgacgacggccggcggccagccggacgacacggccgtgctgtgcgtgagcaagtgcgggacgtgcccggcggtgtgctcgccgcccgcgccgtcggacagcacggcgccgccgaagcccggaggcgggtacacgccgccgtcgccgaagaccggtggcgggtatggctctccgtctccgccggcgggagcgggacaggggggcaagggagcagggcggcccagcaacttctactacctcttcacctccgcggcaggcgggcggagcggcggcggcggcggcggtggtggggtgaccgtcttgttgctcgcgtcggcgctcacggcgctcgtcgctcggttgcagtgagacgcgccagacccaccgaccgactcgcagatgttttcaggctatggctcacctcacctttgctgtactgctgtgtactgttgtacctacctctacggctctacctcgtcagttaaactgttgttctcaa

SEQ ID NO: 96948 - DNA, 455 bp, Zea Mays
atggtggatgctcgtaggcgtaaccccgatctagccatccgagcacctccacgcacaacgttcggtaacgaatgtagccaagacaatcgtcaactatctgatgcactccttacccggatcgttggcggcgagcagacaatgaatcgagcatgatgaaagtcttatttttaatttattaatttgtttaaacaaataactcatacacatggaattaaataaacaagaatttgtcctaatcacatagttaaaacactcctttattccttccaaatttttgggtattacatggcaacattgtgaatgtcttatgtaacgtttttattttggaactattaatgttcggttaacattttaacatgtttgaatgtcttgtgtattcatctttcctaactaatctaaagtaagattgaaataaatgttttcctttctattttctatgtttttgtatgaaaagg

SEQ ID NO: 96949 - DNA, 386 bp, Zea Mays
cagttcagtaaagtagtaactttttttcgtggtcagagactcacaaatcaagttatcaaaaagatgcgagaaatacaaaccaatcttctactactgctgtagaaccacaggaataagatgcttcacggcatgacccttctgtgtggaatcttgaccattatggacttggtagaatctcttccattcctcaacatcattgaggtgaggtgcttgcatctgggaataccctctgaaccagttcaattagatcagcggtgattatgggtcagattctagcctctataccatgaactggctttcccactaaagtgcaatactaccatatgggtattgtttgtatcaggaactgggcagagagaaaagtaatggttacctacttccttcgt

SEQ ID NO: 96950 - DNA, 106 bp, Zea Mays
tttttcttttcaaggtgattcaagtatcaagattacccaaaacccaaacttgagctgtgatttgtttggtaattcatggggaaaagttcaaaatcctagtttttag

SEQ ID NO: 96951 - DNA, 1342 bp, Zea Mays
tcgcctactgcttcgtcgggctgtccgcggtcattgcctgcttcttcaaatccattgagcagatcatgaggcactcccgggaggtggtggtcggcgtggacccgcgcaccggggcacccgtcgtgaggcgcgacaaggtgtggaactacaccatcgcggacattgctctcctcgcgttcggcaccaacttccctcagatctccctcgccaccatcgacgccatccgtaacctcggtcaactcacagcaggaggtctaggtccaggcacactcatcggctctatggcgtttgatctgtttctgatccacgctgtctgtgtggttatgccaagggcgggatcaaagatgaagatctcagacctgggcatttggttagtcgagctcttctggtctttctgggcctatatctggctctatgtcatcttagaggtgtggacgcctagagtgatcaccctctgggaggcatagctgacagtcctgcagtatgggctgcttctgctccatgcgtatgcgcaggataaacggtggccatttgtgttgatcccatttttcactagatcgggagaaaccagaacaggtgcgcaggacagattatctcaatggagctggtagcaccccacttcactatgctgcttgtggtggaaatgttgtctattgtcaagtatgtgccgcgatcagtgcgagaggtgagaggcctgaagattgggttccaccagaagatgtttctgctgtttattacgccaaatgtgatggcattgacgagacactccctatgggtgctgacgggaacgatgggattgtagacatcttctctgcacattcctactacgatgcagcagagtacagtcaacttgcagaagaggatatggaaggatcgtcaacaatggatcaagttgtaaagaacacacaagagaacatgtcctggctttctatttggtggcaacaatttgttgatgcttctatggtaatttggttcgtcgttggtctctttatgtgtactgaatagcaagtcatttattgttgcatttggcaaggacattattttttccctgctggcttcctgctctacgagaagaagcaagtgaaacaggtgcatgcttttgcttgctgtcgcagatgcccctgatggcaagcttcagcaatcgtcaagtacaaagacatcctcccgtgcgaaattcaatttgccaaatcctaatctcttctatatatcctcatagatcgcagcgatggagccggatccggtcgccgctggggcatcctcctcgtcgccgccttcaccagcgccggccacgtccccgccgtggcaaacgcaagcaattacatataggttcagaaaggacaat

SEQ ID NO: 96952 - DNA, 632 bp, Zea Mays
tccacttgggcttgaggttcagctacatattacagaagttgtctgtcctgccttaagtgaacctggcttacgggcctttcttccatttatgactggggtatctgtgtgcctaaataggggagacatagatccaaaagctcaacagcttgcagaagcagcaggatcttcattggtgtccattatcgtagatcacatattcctctatattaaagatactgagtttcaacttgaacttctcatgcggtctttgttcttctcacgggcaagcatttcagacggcgaatgctcaaagaacttatcttgcatcaaggtcggcgggatgtttctgaggtactatatctgtccttgttactcaagactacacaagtcctgatggttgtgtcattcacttacaaattgaggcattgtgacccctcacgcctaaagtattgaatgacattagaccaatattattttggttaaggcataactgaggttcctgacggttctgaatataggatattgtgactgtccgtgtcaaaagtatcaaatgtcatataactgtcattaacaatgaacttggctgacattgccccctcagtgtctgattcacgttttttttcctggtgggcacgctctatcaagctggtgcc

SEQ ID NO: 96953 - DNA, 471 bp, Zea Mays
atgggtcttggggctgccggcgccgccgacagctctccggcaagcgggggccggcgcctggccgccgagggctgcacgagcacgggggcgaccatgtccgtcgccgcgcacagcgcgccggcggtgtcgtcgggctgccgatgcagcagcagctgcggcggcggtgggcaccgccactgctgctgcgtcaacgtctacgtgaacaacaacgtgcaaggtgtcaccaactccgtgctggtcggcagcaaggtcgtcgtgaggatgagggacgccgggacgcgcgtcgcccgccggcaacgccagccgcggcgagacggccgccgtgaggggaagccaagctctcggcagcagcgaaaggcgaagacgacggaggtttggatcatcgtcgccgtcgtgtcgtcgctgttcgtagcggcagctgcgactgcggctgccgtgctttgtacgcgtacgcaaatgacactggactga

SEQ ID NO: 96954 - DNA, 1887 bp, Zea Mays
gacgcagcacaatagcaacaggcagttcacttccttgttcctaacccgccgccgcgccgttgacttgaacggcgctgctgcttccctccaccaagaagctcagctcccgaccgcggcgatcggccgcgcgcgccgcgacgtctcgaagctcgggtcttccgttcgcccatcgcaggctcctcgtgccggccgatctaccaccgctaccgaggaaagcgcgaggccgtccggcgccggccggaatccaccacgatcctatgatctataccttggcaccagcgatggcgtcgtcggcttccgccgggcaggggcaaggcaggcgcgtcgagcccgtccgcgccgccaccggcatgggcgctctgcccctggacgccctgtacgacatcctgcttcgcctcccggccaaggaactctgccgcctccgctcggtgtgccggccgtggcgctccctgctctccgaccccgcgttcgccgccgcccacgcagcacgctaccccgagccactcatcatcgtcggctacaactacaacgacagtgctccccctccagagagcgacgagcgtgactggacgaaaccaaggaggtaccaatgcgtcatcagcgtgatggatctgacgggacacgtggtgaagaacctgcgcgtggacggccacatcgcgagcatgtcgctcagcctcgcctgcgtgaagaggaccggagacggcagctgccggctggtgaacccggccacgggagccgtgcaccacgtgcccgaagaggacccgccgtacggctacagcgacaggctgtgcccgtttgggcaggttgccagcacaagggagttcaaggtgctccggaaggtttcctactcgctcaacggcaaccctcgtgtcctctacgagatctgcaccgttgccggcaccggcaggagcaatgcgcagtggaggatgattcaggaccatccgcaccgcatcgacatcgattggcgcgacaaggccagcgtggtcatcgacggggttgtctacttcctcagcaagaactacgcgtcttcttcttcttctgctggatctgaggagcaagactggatagcgtcgttcgaccttgacgcagagaggtggaggccgaatatcaggggaccccaaagccttaccgtcgtcaacaatggaaacgacaacgggctggctgttgacgaggagctttcgttaaccaacctgaatggctcactggttatcgtccatctccaatctcctccctgcatgaacctctggtatctgctggactcagagaagggcctctgggtcaggcagtacagcattcaggttgaagaatgggactgcagcctctcgtgcttcactccattgatcgtgctagacgatgggaggatcgtcatacatgtcgaagggtcggagatgttggagatctatgaccccaaaaccaacaagttgtccagcgtcgccgacacgggtgtcagcagcgcagttagtgtgtacacaggaaccttgctcagcttagagtggtgaggctatctatctagctagctagcttgtgggaactgtcatttagggggtgtttggttttgtggactaaagtttagcccgggtcacatcaagcgtttgactttcaagtaggagtatgaaatataaacccaaccaactgtactaaattcgtctcactttttaatcttcggctgagaaattagttttataatccgactacatttaataccccgaacggaggttcaaacattcgatgtgataggggctaaattttagcaggggcaaaccaaacacccccttaatttacctgttccgtctggtttatgtgacaggcattggccttcacaattcctatcgtcctggtcactacgactgtacgtgttcttgcttcttgtttctgttggcaaggagc

SEQ ID NO: 96955 - DNA, 1813 bp, Zea Mays
cagcccaataacatcttgtcgtcgtcccgactcaccgccgccgtcatcatgagttcatgactggcctaccgatcgccgcaccaggccctcgcgcggggcaatagaactatagaagtcctcaccccctccgacgacagcgccgatcgttacgccgccggttagtccggcacgtgaactaaccacgatctcccccgatggcgtcgtcgttcaagccgcacgccgcaccgaagaggcgcgccctcgccacgttcaacatcggggctctgcccctggacctcctcgtgtacgagattctgctgcgcctccccgccaagctcctctgccgactgcgcacggtgtgccggttgtggcggtccatcctctctgacccgcacttcgccgcggcccacgccatgcggcacccggggccgctcatcatcgccgccatcgatgagagacccgacgtgcacgtcaacatcatggatctgtcagggcaaatcttaaagcaggtgcgcggcgtgccgggtcagagagtcgtgagcacggcccttgacctcgtctttgtcaagaaaaccgatagcagcagcagcagctaccgattctgcaacccgtttagcggagacgtgcattacttaccagatcaattgctcaacccagcaactggagctgtgtatcaaataccaaacagcttcgccgaagaacacatagatttcacatcgagctttatttcacagtccagatatctgtttggtcaggttagcagcacaggggaatacaaggtgttccggaagctttaccatctttccgttcagtttggaggcaggcagctgctcgagatctgcacagtcaacggtagcaaccacacagggtggagggcagtcacgcccctcgaaaaaaacattcagtttggtgtgttcaccagtgtggtaattaatggaatcatctactcccaatgttttgatccgcaccattctatcacttatgattgtcgagctactgaggaagacttgataattacatttgacattgagactgagaaatgggggccatttatgcgaggaccccccatcagcttttctgatgctgctgctcaggtgttcaatgaccttcggcttccacctataaagcagctaacattagccaatctgaatggctctttagctgttgtgcatggcccagctcccagtatggacatttggattctgatggactctggtaagggtctctgggtcaaacaatacatcatacagttcaaagagtatgccagttttcaatatgtgcatccattggtggtattacgtgacggaagggtggtcctatataaagaagacatgcagcttttacagatctatgacccaagaactaacacactcacagattccgtggaggtgtgccatttttctgcagttgctttgtttggaggaaatctactgagtttataatatgtcttgcaggatcgcatctattgcttcttgtgctcatcgcagggctgtctagtatcagtggtggcaatatctttagctatattctttctctttgtcttggccttgaccttcacagctttagatgctggtgctgcaccacttgtgtgctctgtagatgttcaggttgatttgagccttctttggatctgtaaaaatgcattcattttagttaaacttcgagagttataccgtttagtaccaacaatttattgatttaaaactgtgagaaaattagatctactcataagccaatttttatgtgaattttcatgcatttgacaaaatcagatatgtttacaggatgtttccctacaagcgaaaatattaaatcagggtcatttgcctttaaa

SEQ ID NO: 96956 - DNA, 1911 bp, Zea Mays
aagactttacccccacgtctgcaaccctagcgagccgccgcccgccgcagttcgactttagtcggtctgagtcctgcagcccctggcgccgctatgtacctgacctcgtgtagtcgcttggcccagccgtcgaaaagttccgttgctctgccggagtcgggagagtcgatgtacgccgccgcccgcgtggaggtggaagcggatcggaagaaggaaaaggtggatgagacggagaggatggcaagggagaagaaaaatacacatgaaaaggagcagattcgcaaggtggtgatggggaagcggaagcggaacgaggatgagttggggatggaagagaagcagatgatcgcggagaaagagaaagaggagaaggtgaagaagggcaatggaggaggaattctgactaccaaacttttctcagagctctacatatccgagctcactgccaaggcgatcagagagatgaactacagccacctcaccgagattcaagctagatcaataccgcatcttatgctaggaaatgatgtgctgggttcagccaaaacaggatcagggaagacccttgccttccttataccagccattgaactgctgcacaaagcgtccttcatgccaaggaacgggactggagttattgtagtttgcccaacaagggagcttgctatgcagacacacaatgttgccaaagaattaatgaagtatcattcacagactcttggttatgtaattggtggcactaacatgagaaatgatgccaatcagcttctgaaagggatcaatctcttagttgcaactccaggcaggcttctggatcatctgcgaaatactagaagtttcaactacaaacggctacagtgccttataattgatgaagctgatcgcatacttgagcaaaattttgaagaggatatgaaacaaatatttaaacgactccctcaggataggcaaacagttcttttttctgccacacagaatcaaaaggttgttgaatttgcgaattttacgtttgggcaaaatgaagaaagacaaaagaaacttgtttatgttggagttgatgattctaaattaaagcctactgttgagggcttgcagcagggttactgtgtcattcctagcgagaaaaggtttctggttctgtatgctttcctaagaaggatgcagcttaggaaggaggatctgaaggtcatggtgttcttttcatcatgtagctcagtcaaattccatgcagaatttctaaatttcctcgggatagggtgttatgatatccatgggcaacagaagcagcagaagcggactagtacattcttccaatttttgaaggagaaaaatggcatcttattatgcacaaacgtggcagctcgtgggcttgatattcctgatgtggactatattgtgcaatttgatcctccagatgacccaaaggattacattcacagggttggtcgcactgcccgaggtgacaaaggcaaaggaagtgcattattgttcttactaccggaagaattgaagttgcttatttacctgcaggccgccaaaatttctctgactgaatatgttttcagtgaaaagcacgtgccaaaatcgcaatcacaacttgaggacgttgtcggtgggaattacttcttaaaccagtcagcgaaggaagcctacaggtcctaccttttgtcgtacaactcgcattctatgaaagacatttttgatgtccatcaacttgatctcaagaaagttgctgcatccttctgtttcaagaaccctcctaaagtgaatctggacctggacagtagctcatcaaaacatcgaaagatgaggaaagcggacggtgcaaataggcatggaattggtccttcgaccccctacggaaggagcggccgttacggttccaggcagttggcaagattctagaaagga

SEQ ID NO: 96957 - DNA, 1625 bp, Zea Mays
aatatagaaccctgttcccaccggcgctcactgcaccttccccagcggccaccacccgaggccggtccccgctgacccgcctccgtggaccggggacacgcggcggcgaccggcgaggcggtccctgcttcctctttctactcctcacaagtatgtatgacacgcaccacccgcaccgcacccacccaccaacccgaccttccgctgctcacacacacacacacacacacacacacactctacacgcgagcgagaccacgcgccggaccgccgcaagccggccgccgccgccgcgacctggagcttgcgagctagctctggcctcgctgcctgcgccgactgagatggacccgcgctttccgctgccggccgcggcggcgccgtccacgggcggcggcggcggcgccagagggcaccaccggcgggcccactcggagacgttcctcagcttccacgacgcggacctgctcctcgacccggacggcgacttcttctccgacctcgacttcccctccctctccgacgactctccggccgcctccgaccccaccccgccgccgcatccgcagcagcagccgccgcaggcttccccggccccacgtccgcccggcgggacccacacgcggagcctctccctcgacgccgccttcttcgagggcctcgcgtttcagggacccagtgggagcgccgggggtggaggtgggcccggccacaagaggagcggctcgatggatggggacacctcgccgttcgagggcgagtcggcgctctccagcggcctgccggactacgccaagaaggccatgcccgccgagaggatcgccgagctcgcgctcatcgaccccaagcgcgcaaagaggattctggcgaacaggcagtcggcagcgaggtcaaaggagaggaagatcatgtacactagtgaactggagaagaaggtccagactctgcaaacggaggccactacgctgtcagcacagctgaccctgctccagagggatacaactggtttaactgccgaaaacagagagctcaagcttcggttgcagtccatggaagagcaagctaaactgcgggacgctttgaatgaagccctgcgagaagaagtccagcgacttaagatagccgcaggacaagtcgggaacatgaatgggaaccccttcaatggtggactccagcagcagattccatcctatttcgtgcagcagcagcagcagcagcagacaccgtactttggtggccaccaggctcagcttcacaatcaaaatcaaaaccatcgtcaccagatctcgtcaaatgttgggcagacgctcagtggtcagtccctaaacgactccatggatttcatgtgaggagtacaatatcagggccagtattacatcgtataccgactgcagttcagcactgtaaaaaagatagctaatgtacaatgtatgcatgtgcctcattggtagtgtgtagttagctcttctttgtatcattattctgaaaatggctcgtgtatgtcaaaatgatgtctcttttcttctttgctggtttctggagtaatgtgttagactgactagctacctttaacaatttatgtaaatctttagctttttttttaatggtggaaggttcttatacat

SEQ ID NO: 96958 - DNA, 1412 bp, Zea Mays
cgctcactgcaccttccccagcggccaccacccgaggccggtccccgctgacccgcctccgtggaccggggacacgcggcggcgaccggcgaggcggtccctgcttcctctttctactcctcacaacctgcgccgactgagatggacccgcgctttccgctgccggccgcggcggcgccgtccacgggcggcggcggcggcgccagagggcaccaccggcgggcccactcggagacgttcctcagcttccacgacgcggacctgctcctcgacccggacggcgacttcttctccgacctcgacttcccctccctctccgacgactctccggccgcctccgaccccaccccgccgccgcatccgcagcagcagccgccgcaggcttccccggccccacgtccgcccggcgggacccacacgcggagcctctccctcgacgccgccttcttcgagggcctcgcgtttcagggacccagtgggagcgccgggggtggaggtgggcccggccacaagaggagcggctcgatggatggggacacctcgccgttcgagggcgagtcggcgctctccagcggcctgccggactacgccaagaaggccatgcccgccgagaggatcgccgagctcgcgctcatcgaccccaagcgcgcaaagaggattctggcgaacaggcagtcggcagcgaggtcaaaggagaggaagatcatgtacactagtgaactggagaagaaggtccagactctgcaaacggaggccactacgctgtcagcacagctgaccctgctccagagggatacaactggtttaactgccgaaaacagagagctcaagcttcggttgcagtccatggaagagcaagctaaactgcgggacgctttgaatgaagccctgcgagaagaagtccagcgacttaagatagccgcaggacaagtcgggaacatgaatgggaaccccttcaatggtggactccagcagcagattccatcctatttcgtgcagcagcagcagcagcagcagacaccgtactttggtggccaccaggctcagcttcacaatcaaaatcaaaaccatcgtcaccagatctcgtcaaatgttgggcagacgctcagtggtcagtccctaaacgactccatggatttcatgtgaggagtacaatatcagggccagtattacatcgtataccgactgcagttcagcactgtaaaaaagatagctaatgtacaatgtatgcatgtgcctcattggtagtgtgtagttagctcttctttgtatcattattctgaaaatggctcgtgtatgtcaaaatgatgtctcttttcttctttgctggtttctggagtaatgtgttagactgactagctacctttaacaatttatgtaaatctttagctttttttttaatggtggaaggt

SEQ ID NO: 96959 - DNA, 2037 bp, Zea Mays
attctcttcctcatacctcgcgcgttaaaaaacctccttcgtctcctggtctgtgtcccacactcctatccttctcgccttcgactgcccagagcgcccagcgcccgcgacgcttctagaacacgcgacgcgggcgagcgcgctggcgggtgggcgaggcaaaactaaggaggcgggaggggcggcgatgcggggcaggtgacgctgcggcgcggcgtgggggatggtggcggcggagggtgggcccggcggggccgtcgaggagggcgtcggggagagctcgtccccgccgcgcgaggacgccgtcccagcgcccgccggctccggcgggagcgggggcagcggaggcgcccgcgaaatctgtgcccaggtgctcgaccgcctcgtcgccgacggctacgcggaggcgtccgaccccgagttccgcgacaggctcgccgcccatttcggccggctcccgcacagctatcagctggatatcaatgttgacaaagcatccgatgtcttggtccaccagaacgtcttagcggaagcaaaggatcctgataggcgccctgcattctatattgaagatatggattcagcatacgactccgatgcatctgaagaaggggatgatgatggtgatgatctctctgtaaggcagggcacaccatatactcacattcatgagatagttttctccacaatcgataagccaaagctccttagtcagctatctgcattgctatctgacattggattgaacatcagagaagcacatgttttctctacccatgatggctattctcttgatgtttttgttgttgatggctggcctgttcaggatgctgatggtttgcacaaagcactggaagcatccattctaagaaatgagggttcatggtctggttcatctcattcctcagccgctgaaagaacactgcccttccaagttaaaggtggtgagtgggaaatcgacaaacgacttctgaagatgggagggatggttgcttctggttcttgtggggacttgtatcacgggacttaccttggtgaggatgtagctgttaaagttataagagctgagcatttgaataagaatgtttggaacgagtttacgcaagaagtatatatactaagagaagttcaacataaaaatgttgtgcgattcattggtgcatgcacaaaaccaccccaattttgcataattacagaatacatgtctggaggaagcctatatgactttgtgcacaagcagcataatgttctaaacctcaggactttattaaagtttgcagttgatgtatgccgagggatgtgctacttgcatgaaaggggtatcatccatagagacttgaagactgcaaaccttctaatggacaaagatcatgttgtgaaagtggctgattttggtgtagctcggttccaggatcaaggaggtgtcatgacagctgaaactggaacatacagatggatggcacctgaggttataaaccatcaaccctatgataacaaagcagatgttttcagctttgctattgtcatctgggagctgataacgtctaagatcccgtatgaaagcatgacccctctccaagcggctgtaggtgtgagacagggattgcgcccaggacttccaaagaagacgcatccaaaggtattggacttgatgcagagatgctgggaagcagacccatctgcccggcctgctttcccagacattttagccgaactggaggatcttttggcacaggttcagggaacaccgggaaagacggcccatgctccatcaaataactcgaacacgaaagattaacccccatgcacacatacctgacgtttttctgaattcagtgatctgccatgtttaggattcgagtcgctaattacgaggaatgtagcatatcgatttttttccctggatggttttgcttgtgtacatttgaacaatcttcttggggcctattttttatggtcacctcattgttcttacataggggaaattggctcgagcgtttgggaggattacgtattatgacaacggctgataattta

SEQ ID NO: 96960 - DNA, 2263 bp, Zea Mays
attctcttcctcatacctcgcgcgttaaaaaacctccttcgtctcctggtctgtgtcccacactcctatccttctcgccttcgactgcccagagcgcccagcgcccgcgacgcttctagaacacgcgacgcgggcgagcgcgctggcgggtgggcgaggcaaaactaaggaggcgggaggggcggcgatgcggggcaggtgacgctgcggcgcggcgtgggggatggtggcggcggagggtgggcccggcggggccgtcgaggagggcgtcggggagagctcgtccccgccgcgcgaggacgccgtcccagcgcccgccggctccggcgggagcgggggcagcggaggcgcccgcgaaatctgtgcccaggtgctcgaccgcctcgtcgccgacggctacgcggaggcgtccgaccccgagttccgcgacaggctcgccgcccatttcggccggctcccgcacagctatcagctggatatcaatgttgacaaagcatccgatgtcttggtccaccagaacgtcttagcggaagcaaaggatcctgataggcgccctgcattctatgtccgtttcttgaggattgaagatatggattcagcatacgactccgatgcatctgaagaaggggatgatgatggtgatgatctctctgtaaggcagggcacaccatatactcacattcatgagatagttttctccacaatcgataagccaaagctccttagtcagctatctgcattgctatctgacattggattgaacatcagagaagcacatgttttctctacccatgatggctattctcttgatgtttttgttgttgatggctggcctgttcaggatgctgatggtttgcacaaagcactggaagcatccattctaagaaatgagggttcatggtctggttcatctcattcctcagccgctgaaagaacactgcccttccaagttaaaggtggtgagtgggaaatcgacaaacgacttctgaagatgggagggatggttgcttctggttcttgtggggacttgtatcacgggacttaccttggtgaggatgtagctgttaaagttataagagctgagcatttgaataagaatgtttggaacgagtttacgcaagaagtatatatactaagagaagttcaacataaaaatgttgtgcgattcattggtgcatgcacaaaaccaccccaattttgcataattacagaatacatgtctggaggaagcctatatgactttgtgcacaagcagcataatgttctaaacctcaggactttattaaagtttgcagttgatgtatgccgagggatgtgctacttgcatgaaaggggtatcatccatagagacttgaagactgcaaaccttctaatggacaaagatcatgttgtgaaagtggctgattttggtgtagctcggttccaggatcaaggaggtgtcatgacagctgaaactggaacatacagatggatggcacctgaggttataaaccatcaaccctatgataacaaagcagatgttttcagctttgctattgtcatctgggagctgataacgtctaagatcccgtatgaaagcatgacccctctccaagcggctgtaggtgtgagacagggattgcgcccaggacttccaaagaagacgcatccaaaggtattggacttgatgcagagatgctgggaagcagacccatctgcccggcctgctttcccagacattttagccgaactggaggatcttttggcacaggttcagggaacaccgggaaagacggcccatgctccatcaaataactcgaacacgaaagattaacccccatgcacacatacctgacgtttttctgaattcagtgatctgccatgtttaggattcgagtcgctaattacgaggaatgtagcatatcgatttttttccctggatggttttgcttgtgtacatttgaacaatcttcttggggcctattttttatggtcacctcattgttcttacataggggaaattggctcgagcgtttgggaggattacgtattatgacaacggctgataatttaccgcctacaacatgggtggatatttttcatgcattattatcccagtagctgccattccaagaaaggcataatgctttactcgccttaggttccttttggaatggacactggcgtgttcagctccagtggtcaaagcaccactccctcccgtttagaccttgttcgattgtttccattatagattacatgagattagaaaaaaattatgaaa

SEQ ID NO: 96961 - DNA, 789 bp, Zea Mays
tcgcgcgttaaaaaacctccttcgtctcctggtctgtgtcccacactcctatccttctcgccttcgactgcccagagcgcccagcgcccgcgacgcttctagaacacgcgacgcgggcgagcgcgctggcgggtgggcgaggcaaaactaaggaggcgggaggggcggcgatgcggggcaggtgacgctgcggcgcggcgtgggggatggtggcggcggagggtgggcccggcggggccgtcgaggagggcgtcggggagagctcgtccccgccgcgcgaggacgccgtcccagcgcccgccggctccggcgggagcgggggcagcggaggcgcccgcgaaatctgtgcccaggtgctcgaccgcctcgtcgccgacggctacgcggaggcgtccgaccccgagttccgcgacaggctcgccgcccatttcggccggctcccgcacagctatcagctggatatcaatgttgacaaagcatccgatgtcttggtccaccagaacgtcttagcggaagcaaaggatcctgataggcgccctgcattctatgtccgtttcttgaggtcaatcaatgaacgccacaacggtggcttcaccaacccctttgaaactagggtcagggttgggggtttgggccttacctgtggcctccgggcttagagggattgcggggagcttcccagcccagcgctggatggtatggcaaggctgccacggggttgttgattgccatggtggcggactgttggtgtggaggcggtatcaagcttcaattgtttaggggcggtgt

SEQ ID NO: 96962 - DNA, 4653 bp, Zea Mays
gccgacatcgccctcaaccatctgccgatatgcgaacctggagagtggttcggacggacgaggaagacggaagtgaggatcctcctctcgctcctcggcaacgataggtggggcagctgtctcgtggtctcaccctgccgtagtgcccgtatggggagctcctcctctttcaacgcgtccccagctccacatggcaccgccctcgtccctaacagccgcgctgctaatccacctcctgcgcggcggctccgacctcgcgtccgtcgccgccacgcacgctaagcttgtcaaggccggcatcgcgacccccctctcctcctccaatcatctcctcgccgcctactgccgctacggcgcgattggctgcgcccgcgacctgttcgacggaatgcgggaccgggacgtcgtctcctggacgacgctcatgtccgggtacgccgccgccgcccggccccgggacgccgtgtccctcctccgcgccatggggtgcagcggcgtgcggcctaacgcggtcaccttctcgacggccgcctgcgcgtgcgcgcgcctcgcggacgcagaactcggccggcaggtgcacgcccaagtggagatcgccgggtgcgcacgcgacacagtcgtcgccactgcgctcgttgacatgtacggcaagtccggcggtgtcgaggacgcgcgcgcggtgttcgacgccatggctgcgccagcgaggaacgccgtgtcgtggggcgctatgctggccgtgtacgcgcagaacgctctcgggaacgaggcggtcgagctcttcgcggagctcaggacgtgtggcggtggcatggcgcccaaccacttcatgctggcgagcgtggtgagcgcgtgcgcaggcatggcgcgtctgggcatcggtaggtgcgtccatggcgctgtccttcggcttgggtatggaaacaatgacgtgatttcggtggctttggtcgacatgtactccaagtgcgggcgctacgagtactcaagaaaggtgtttgacaggatcaagcaaccatccgtcgtcacttacacctccatcattgtcgccgcagcaaagtacggccgctggacgtgcgcgcttactttgttcaacgagatggtagatcaagctcctccgctccatgcagagcagatacggcgttgctccgtgccccagccactacacatctgccgttgacatgctgggccgggcagggcggctcgaggaggcattcgagctggccaaggaggcgcagcttgaaggcaacgatgccctcttgctgtggaactccttgctgtcagcttgccggacacataagcgcctagacctagcaaccatggctggccagagggtttatgagttcaataaccagcaggatgtagcagctgggctggtagtgatgtcaaatgcatatatttcagccggtcagatagataatgctgccgctgtgcgatcaagcatgaggctgcgtggcatacggaaggatcccgggtgcagctggattgaagtaaaggataccccccatgtgttctatgctggtgcagtatcatgcgctggtgcatgggcagataaagttctgatgttgctagatgaattggagagtaagatgagggagagaggttacagggggagattagggagtgctagagtatccgatgcacatgaagatgaggaggaagggaaaggtgtgatggttggtgtgcacagtgagattcttgctttagcgtttggtttgctagttgtcccgaatgggatgaccatcagggtgatgaagaacctgaggatgtgcagtgattgccatgaggtgttcaagttcatcagcgccattgttgagagcgagttcgtggtcagggatctgaacaggttccaccatttcaagctggggtcatgttcttgcaatgactactggtgatcccaaattgtaatctcagtggttctgctgttcatagtagaaaagaacaacgttagcatattatcagttattaaaaaatgttgagaaattatcttgctggagatgttcgagtgacttatttttgggtacaactacggaactaccagacattggtgtagcttcacaaatcacaaactccgctctaggaagaaaaagtagagttgtgagaacacagaggtcatccttcttggactcctatccctgcacgcgccgtccaactcagccaccgccacggacacggtgtaccccggcaatggcctcgccggcagcagcagcaagctcgtctccaacaacagcaagttcgcgctgggcttcttcaggatggacaacaagtccttcaactacgccaccaacccatacacttacctcggcatctggttcaacaaggtccccaagctaactccgctctggagcgccaacggcgagagcccggtcatggaccctgcctcaccggagctcgccatcgccggcgacgggaacttggtcatcctggaccaggccaccaggtccgtcatctggtctacccatgccaagaccaccaccaacgacaccgtcgccgtgctccagaacaacggcaacctcgtgctccggagctcctccaactcgtccaccgtcttctggcagagcttcgactacccgaccgacaccttcttcgccggagcaaagattggctgggacaaggtaaccggtctgaaccgccgccttgtttcgaggaagaacctgatagatcaggcccctggcctgtacactggggagatacagaagaatggggttggccatctcgtgtggaactcgacagtagaaatcgagtccaccgggctgtggaacggccagtacttcagctcggcgccggagatgataggcaacaccgacaacatcacaactttcgagtatgtcaacaacgataaagaggtgtacttcacatggaatctgcacgacgagacggcgatcgtgctctcgcagctaggtgtcgatggccaaggcatggtgagtctgtggattgacaaggactgggtggtaatgtacaagcagcctgtactccagtgcgatgcctacgcaacgtgcggacaattcacagtctgtgatgagggtgagaacgagggcccaatctgcaactgcatgaagggtttctctgtaagctcacccagggactgggagctgggagaccggagagacgggtgcaagaggaatactccattgcactgtggaaggagccgcaacacagataagttctacgatgtgcaaaaggtcatgttgccccaggacgaaatgaaaattcaggctgcaacaagtgatgaggatgactgctcacgggtttgcttgggtaactgctcgtgcactggatattcctatagggaaggaggttgctctgtctggcatggcaaattgaccaatgtgaagaagcaacaacctgatggaaatggggaaacactttacctacgccttgctgctaaagaggtgccaggggtgccgaggaagaatagtagaatttttcgctttggtgctgccattattggcgcaagcgctgcagctgttgctgccctgatgatccttggtctgatgatgatttggaggagaaaagggaagctgtttacccgcaccgtgggagatgctcaagttggcattgggatcactacgttcagatatgtcgatttgcagcatgcaaccaagaacttctctgaaaagttagggggaggcagtttcggttccgtattcaaggggtacctaagtgactcacttgcactggcagtgaaaaggctcgatggcgccaatcaaggggagaagcaattcagagcagaagtgagctcggttggaatcatccagcacatcaatttagtcaaactgatcgggttctgttgccaaggtgatcagaggttactggtttatgaatacatgccaaatagcgattggagttgccagaggcctggcctacctgcacactggttgtcgggattgcattatacactgcgacatcaagccagagaacatactccttgatgcgtcttttgtaccgaaaattgcagattttggaatggcaaaggtgttggggagggaatttagtgacgcgataactacgatgagaggaactattgggtatcttgcgcctgaatggatcagcggagaagctgtcacatctaaagtggactttacagctatggatcggtcttatttgaaatagtatcagggaggaggaattcgagccaagaacactccaaggatggtgattattcagcatttttcccagtgcaagttgcacgcaagcttctgagcggagacattggcagcctggtggacgcaaatttgcatggtaatgtaaatcttgaggaggttgaaagagtttgcaaagttgcatgctggtgcattcaagatagcgagtttgatcgaccgaccatgaccgaggtggtgcagtttcttgagggtgtttctgagctccacatgcctccggtgccaaggctactcgatgctatcacaggaggagccaccaacaccaaaatctactcaatgctatcactggaggggtcacctacatcagtgtgacatctgtttagctgtccctcaaactaaaatataactcttcagaaaaaatttagctatcccatgagaatatagtaatttatatcatatcatatatatgtaaggacttgggcatttgtggcatgctagtgcatctcgatcaatgtaacctggaggtggtagaaaaacaaatatgtacgccaat

SEQ ID NO: 96963 - DNA, 2164 bp, Zea Mays
tgtcttcctcctcgtcatggacgtggcgttgccgtcgaagagctcgtcgatgatggtctccacgtcctcagcgctgagcttgacgtacttctccgtctgtctcccggcgctgaagtgctgcgcgaagcggccgaggaaggagcggtaggccggcacgacgacggcggcgatggagacgcgcagctccgactgcagctgctcgtcgctgacgacccatgcgccctgcgtccggtggatctcgtccatggcggcgttgaactgcttgaaccgctccttgagcaccggcttctgcacgtggcccttcaccgtcagcacgccgtcgtcgcggagcagccccagcacgcggctccacgcgtcccgctggtagttcttgtggtactgccgcaggttggtcgactgcttccgcgcccacgcctcgcccagcatcgcgttggtctccgccgacccgcggatcttctgcagcatgtaccgcccgttgttcatcaggaagatgttgctcagcgacgggtccttgtacagccgcgacttggcctccaggttgccgtgcagcagctccatcacctccatcagctgcgccgcgaacgggttgccgccgtcgtcgccgccgccgccgccgtcgtggtgctcacggaacacctgctccagcgtgctgttgtactcgcacgcgtacttgaggtagttcatcacgtagcgggtcagcgggtgcaccgcgccgccgggcaccggctgcttgccggcgtcggcgcggatcgaactctccagctcgcggaagatggcggcggcggactcgccgagccgggaccgcacggcggcgatctcggacttgagctccgccaggccggagtggctgtgctcggcggccggctcgtcggcggagaggaaggcctcgatgaccggtgacgcgtcgcggaccgcctcgtacatgtcgagcaccttgaagagcttctccgcggcgcgcttggtcatggccacggcctccgtgaagctgagcatgtgcagcatgacgcagcgggacaggtccgcgaagatgccgcgccccacgccggcgtggcgaccggcgaagacgcgagtgcagaggtcgtgctccgtggacaggcccacgttgatggcgtgccggaacgccttggtccacgtcacgatcaccgcctccagcgcctcccacgtcatcttcaccacgtcgtcgatgttggacttctcgtagcccaacccctgcagcgccgcgtcgaaggcgttcctccgcgccaccaggaacatctgcgagcactccgtcacgtacccggcggcgaccatggcgtcggccatggcgcggagccgctccacggtctccggcgggtacggcggcgcggactctatcccggcgccggcgttcgacggcggcgcgagggcgcaccggtcgggctcgtgcgcgccgccctgctgctcgcccccgggcccggccctggggacgcgcgggtcctcgagttgcgcgaggaactcttcctcgacgaacgtgatggcccggtgcagcacggcagtgacgcggttcacggcggcggcgtgcttgccgccgccctcgggtgtcttgccgagcgcggacgcgagcgccgcgatgcgcgttatcgcggccagcagcgccgtcggctcgctgccggcctccgacgcccacctgtcctcgactccctcgtacctggcgaccagcagctcgacggcggaggcgaacctctccagcgtcgtctccgtgatgctcaccggcgccgcgtcctcgtcctgacccgcgaggaacgcgtccacctccaccgacaaggaggcgaggtccggctcgccgcatccccctcccaccaagcccggatcctcgccgccgactcgcgccccatggtcaccatccccctcttgctcgttctcctccttgatggactgctcccttgagccgccgtgctgagcgtccttgtcgcggagggcaccgagggagaagttgcggtcgacctcccgcgtcttgccgccgctgtcgtcgcgggtggttgccggcgagaagctgctggacttgtagggcgcttggctccggctgtccatctccggtgggtgcccgaccgggtggaagggaggaaggaatgagcaatggcgaggtcagtggttgtttgttcgcacggatggctgaggaggcatgcagagcaagagagagaaagag

SEQ ID NO: 96964 - DNA, 3003 bp, Zea Mays
tcttcctcggctcctccaccccggtcctctcctgccgcgtcgcgttcgcccctcgcagcgggcaactcccaccgccgccgcttcgcatccgcccatctgcttccatcgtctcacggaggtcgctcacttcgccgccgcccgccccgcctctcccggtgccacggggccctcggccgcgccgtggcgcttaaaccctagatctgtgcctccgcgctggccgcggccgcgtcccgacgccggcacgccgccgatcgccgcacgtcgctcgatcccaggttttgccgctcgagtttagataagttccttcaatgcatcgtgttgggagtgctggtaacacagctggctcgactcgaccgagaaaagagaagcgcttcacatatgtactcaatgatgctgatgataaaaagcattgtgcggggatcaattgcttggcttatctagatggttccatatttagtacaagtgatcatctttttagcgggagccgtgatggtaccttgaaaagatgggaattaaataatggggatgcaagcttctcaggaactttcgagtctcatgttgattgggttaatgatgccattatagttggagacaagcttgtttcctgctcctcagacactacaataaaggtgtggaattgcttctctgatggtgcctgtaccaggactctccgccggcattctgattacgtgatttgtcttgctgctgctgagaataatagcaatattgtagcctctggtggtcttggtggtgaggttttcatttgggaccttgatgctgctcttgctcctgtagccaaatctgtggatgcaaaagaggatgaggttcctaatggaaactccgggcctgctttgacaacactgtgcagcataaattctagtagcaatattgcttcctctaatggtcaatcacatgggtacagtccaatagctgccaaaggtcacaaagattcagtttacgcactggcgatgaatgatacaggaacccttcttctctctggtggcactgagaaggttgtccgagtgtgggatccgaggacaggatcgaaaaacatgaaattgagagggcacactgacaatatcagagccttgcttgttgattctacagggaggtattgcctatcgggatcatctgattcaatgataagactatgggatctaggacagcagcgttgtgttcattcttatgctgtgcatactgattctgtttgggcacttgcaagcactcctgcatttggtcatgtctacagtggtggaagagatcaatctgtatacctaacagatttgtccacaagagagagtcttttactctgcacaaatgaataccctgttctacagttgtctctgcaagatgacacaatatgggtggcaacaactgattcttctgtttatggatggccagctgaagggcgcacaccccaaaaagtcttcgaaaagggtgcctcattcttagctgggaatttgtcattctcaagggcaagagcatctttagaaggatcggcacctgtccctgtatacaaagagccatcttttgttatcccaggagttccagcaataattcaacatgaaataatgaataatagaagacatgtactgacaaaggataccactggttcagtcaaattgtgggagatcactcggggtgctgttattgaagattttggcaaggtttctttcgaagacaagaaaaaagagttgtttgagatggtaagcatacctgcttggttcaccatggatgctcgattagggtgcttgtctgtccacctggatactccacaatgcttttctgcagaaatatatgcggttgacctaaatgttgctggagcacaagaagatctcaagattaatttggctcaagagacccttcgtggtttgctaattcattggagtaaaagaaagcagaaatctagttcacacagcttgtgtaatggtgatagttcaatagggaaagatgttccgtcgaaagactcgccccggtcaagacctgaggtcgacgatgccactcaaaaccatgcaactcatgtgcttccatcatttgagttttctacagtttcacctccatcaattatcacggaaggttctagtggagggccatggagaaagagaattaccgatttggatgtaactgagggtgatcttccatggtggtgtgtggactgcattactctcaatcgatatccaaaggagaatacaaaatgcgggttttatttacaccctgctgaaggctcgcctgcaccaaacataactcaagggaagcttagtgctccacggatattgcgaattcacaaggtagctaactatgtggttgagaaactcgttcttgacaaaccattggatggaggctctgatgcgtttgttatgggattgagttctgctcaatcacagctctcagttctagatagttcttcgcggcttggactaaagccatggcaaaaaacaaagccatgtattgagatattgtgcaataaccaggttctatcaccagagatgagtttggctactgtgcgaacatatatatggaaaaagccagaagatttgattcttcattacagagtggtccaaccgagatgatcacggcttcagatcacatggttctcagcatgcctgcaccataaacggtgtggttgaagacacccttggcttagcgaggaaaccgtcagaaatattttgctcttgggctccggtagcctttctcctagaatcccgacttcgtttgcttctttgtaaagttccttcctgatcttgccctggtagtaagatgtatcatagcacaggtataaggccctctgcttgtacatgtagaagatttgggtgcttaataaaggtcaaatggatttttttcgtttttctttgataaagtttgtaagaaaacgggctggttctcggctcagaccgtgacgttccgacgtcgattattggatttaaccctgtcgcatcctcttggttctgttagcgtaagaggtggacgggatgtcgggagcaataaagctgtttttttatatat

SEQ ID NO: 96965 - DNA, 1266 bp, Zea Mays
gattgatatgccttcaaaatagttcagttggggtagtggtttcataatatttgtatcaccacgatgatgtgctacttaaaagatggtaactcaaatacattaaacttcatttttcaatgaattattcatccttgagttctggtaaatatatattacttcattcagtcctgttaattttttcctgcgctttatatgaacaatcacatgcagaattgcagattggcactagagctttgtgtagctgattggccctagagctttgtgggaataacttgtgttcaagtacatgcatcagcatccaatattgttcttgtttgtgtcctactggaaaggaggaagatttgagatactgaagattaatgatgccccctgctatataaatctgacacagggtgctttgtaaccattgctttcataagttattttttctgatgcttattttctttatataatgcagatgcgggttttatttacaccctgctgaaggctcgcctgcaccaaacataactcaagggaagcttagtgctccacggatattgcgaattcacaaggtagctaactatgtggttgagaaactcgttcttgacaaaccattggatggaggctctgatgcgtttgttatgggattgagttctgctcaatcacagctctcagttctagatagttcttcgcggcttggactaaagccatggcaaaaaacaaagccatgtattgagatattgtgcaataaccaggttctatcaccagagatgagtttggctactgtgcgaacatatatatggaaaaagccagaagatttgattcttcattacagagtggtccaaccgagatgatcacggcttcagatcacatggttctcagcatgcctgcaccataaacggtgtggttgaagacacccttggcttagcgaggaaaccgtcagaaatattttgctcttgggctccggtagcctttctcctagaatcccgacttcgtttgcttctttgtaaagttccttcctgatcttgccctggtagtaagatgtatcatagcacaggtataaggccctctgcttgtacatgtagaagatttgggtgcttaataaaggtcaaatggatttttttcgtttttctttgataaagtttgtaagaaaacgggctggttctcggctcagaccgtgacgttccgacgtcgattattggatttaaccctgtcgcatcctcttggttctgttagcgtaagaggtggacgggatgtcgggagcaataaagctgtttttttatatat

SEQ ID NO: 96966 - DNA, 699 bp, Zea Mays
ctccttgtgcagtatgtatatcattgtcagctgagtactaagacttcacccttagttacttgagcaaacttttattttgctttcatgcaattataggcagcacatagatgattggcgagaataattatgaatccccagctcctgatagattggttgtggaattagcaaataagcctgcaatgtacacaacactggatattaggcagtctggcagtgtgcatatgatatgactgtacactatatactacatcaaacattccagcaattcagactagtgttagttcgtaaagttgtaggatgttggttgttgaaagaagaaaaaacatattaaagtacattaaattttgtttagaaaataatattgtcccatggaaggactctgcctggcagccagagaagcaatgtgaagttcttttgacaatacttagccaaccaatttggaagcaaatatctataattcatcactaaagcctacccgcaatgcatgatgtcatgcacagtcagctaggccttatggaccgggtcggtagtatgagaggcccattagggtagataagattagtcatcttgcttatgagtcaagcaaacctattttataaggagacatgtatcaatcaaggcaaggaagaagaatatcatctattagcggcagtgcccttctatccctgcccttgtggtctggctctccatgtgccaggt

SEQ ID NO: 96967 - DNA, 333 bp, Zea Mays
atgaccaagttcccgtcgccggcgatggcgagctccggtgaggcggggtccatgaccgggctctcgccgttggcgctccagagcggagttagcttggggaccttgttgaaccagatgccgaggtaagtgtatgggttggtggcgtagttgaaggacttgctgtccatcctgaagaagcccagcgcgaacttgctgttgttggagacgagcctgctgctgccggcgaggccattgccaggggacaccgtgtccgtggcggtggctgagttggacggcgcgtgcagggagaggagtccaagaaggatgacctgaaggagaagcatggtgaaccaa

SEQ ID NO: 96968 - DNA, 156 bp, Zea Mays
aattttattttacttctcacatagtatacatgtcaacaattactcaaacatttctttatcgtaaatacatacacatctttataagtgagtaaaatattttatcatcacacatgcctactaatattctactcggtacactaattcagctaattaacc

SEQ ID NO: 96969 - DNA, 703 bp, Zea Mays
agcagagggaatcgccatggcgaacgcaggggcgagccaggagctgcgcggcgggggaaatcaggggacgcgcaggagctccagggctggagaaagcttccggctgatggaaggaggagcgctcgactgggcgctgtacggtggaggagttcggctgagaggaagaaaaagcagcgcgcagagaaaactgggagcagggcagttcgagcgccgtccgagcaggggccagggcgcggccagaacggaagtagggaagagctccgcgtgccggaggagcgtgcggccatggatgagcagagcaggggctggggacgcgcgcgcacaggagaggaactcggccaccataggagagggaggcagggcgctggatccgagccagggcgacgaggaagctccacggcgagctggaccgagccagggagagagctccggacggacgcagcgagcagagggcagggcgcggcgtaggggatgaacaccgacgagctgcgcggctggggaagatggaatcggccagggagaagaaactccatggcacacggaagaaacggtcggcgcgcagggataagaacagcgcgtggtcaggaaaatcagggaggctccatggcgcggtggccatggccaaacaggccgggagcgccgcgagctgggcaacggcacaggtgagcagagagcacggcgctcggcatgggcagggaggaag

SEQ ID NO: 96970 - DNA, 1052 bp, Zea Mays
aataaaattaatacacccgttaaaacaacacggacgagttttatctcggtctagctaccagcttgaaatagtaatttcatccatacatagtttaataatcaataaaatataatatagtaaaatataacataatgggtactaatacttttggagaaacgtaaacaactaaacatgtaagtaaatcagagttgcatacattttttcggtcctcgtaccacgatcatacacaagcacatgcatacacacacgtatacatacgatagattacgtagccacgcttattcgtgcatcacacgagcgcatacatacgtacgcgcgcacaacacggcgggcgctcgatatcactctcacacgcacgcgatcaatcagccgaagaagtggtgcttcttctcgccgccggcctcctcggcctccttgtggtccttcttcttctcgtggtgctcgtggaaggcgaagccgccggagccgacggccgccgccgccgcgacctcctcctcgatcttgtggcggtgcgcgtgctccgggtccttcttcgcctcgtgcttctcgtacttgcgaaggcgccggcggcgatggcgccggcctcgccgaggtgctgcttgtgcttgtgctccttctcctccttcttgtactcgtcgtactcgttctcgcccgtggacaccacctccgtcaccgtggcctccgtgtactcggcggactcgccgtacccgccggcggcgagctgctcctcgtccttcttgtggtggaacaggtggtggtggtggtgcttctcctccgccatggataatgaaacgagctagaagagggatgaccggccttaattagcttgttggagggagagcaagtgacaattggatcgacagctgttcttgcttgttgcttggcagttgctcatcgtcttatatagccggatggaggggccctgtggactgagctggcatggcattatggacggtggtggaaatcagtacgcgtatcattattatcaaaattcagacatgattaattagaagcgatatgcaccgtctacagaacatctttatattatatac

SEQ ID NO: 96971 - DNA, 946 bp, Zea Mays
aatcaataaaatataatatagtaaaatataacataatgggtactaatacttttggagaaacgtaaacaactaaacatgtaagtaaatcagagttgcatacattttttcggtcctcgtaccacgatcatacacaagcacatgcatacacacacgtatacatacgatagattacgtagccacgcttattcgtgcatcacacgagcgcatacatacgtacgcgcgcacaacacggcgggcgctcgatatcactctcacacgcacgcgtagcacacggggagggacgacgatacgggaggatcaatcagccgaagaagtggtgcttcttctcgccgccggcctcctcggcctccttgtggtccttcttcttctcgtggtgctcgtggaaggcgaagccgccggagccgacggccgccgccgccgcgacctcctcctcgatcttgtggcggtgcgcgtgctccgggtccttcttcgcctcgtgcttctcgtactgtgcatgtccacgtcacacgaggtgaccgtcattcagttcgttcgattaatatatatattattctttctcgttcatgtatgtatatatatatactactcaaggaggatcggatcggacggactacgtacgagtgcgaaggcgccggcggcgatggcgccggcctcgccgaggtgctgcttgtgcttgtgctccttctcctccttcttgtactcgtcgtactcgttctcgcccgtggacaccacctccgtcaccgtggcctccgtgtactcggcggactcgccgtacccgccggcggcgagctgctcctcgtccttcttgtggtggaacaggtggtggtggtggtgcttctcctccgccatggataatgaaacgagctagaagagggatgaccggccttaattagcttgttggagggagagcaagtgacaattggatcgacagctgttcttgcttgtt

SEQ ID NO: 96972 - DNA, 2455 bp, Zea Mays
atggagtttgctgcgatgaaacggagagacctgctggagctctgccggcagcacggcctcgccatccgcggctccaaagccgacctcgccgccgtgctcgcaggcgcgctctcgttgcaggggcctcctgttgctgttgctgctgcagctgagagtgtagttggtgtggtggtgaggaagggctgtctgaagcgtctgggaggtagtgctagcggtggcacttccggggcttccaagaaggtgagttttgcattggatgaaacgccagaggtgaagggacgaagacgaaggtcccaggtgattttgccactcgttgttgccaagacaagggggaggcgcaagggtaggaaggcacctagttctgcagcagtgagtggaagcggtcggcggcggaaacacgatggtggtggtggttctgctcgtggaagcgttaccagagaggttggtgcagatgccccagtgacacggtctaggatgaaagtggcgtctttacattctcacagtggggttgaaagtcagaataaccctgctaaggctgaggaaagagggaaggtggtaggaacagctactaggaggaagcagaagcgcaaggcccatgagaatgctggggatattgctaattcatgggcaggaatttctcgtaggatcacaaggagtttaagctcgtcggctgcagcagtctcattgccatgtgatgctgaggaagagagaggggctagaaaggtagaaagctcagtagcagctgatgtgatattggccaccctcgttggaaaaaagaggaggaagacatggtgcaggcctaaggccagggaggaacttcctgccgcagctctaggcgaaaggggtagctcgcagaagagtgatgttggtggcggttctgttgatcatggtgcttttcaagagttgtgtgcagatgctccagtgacacagcacgggacaaaagtggtgaatttgtgtgctgaaagtggggttgaaagtcggaataatcctactgagggtgaggaaaaagaggaggtggtagaagcagccacttacaggaaacagaagtggaagatccaggagaattctgaggatatttgtgccagagcgtcgtctggaatttctcataggaggacgaggaagtcaagctcgtccccagctgctgttctgttgtcccctgctgctgagaagatggaagtagcagatgataaggatgaacctggtgttaaggagttagctgaagttaaagtgttcgccaccacagcagtaccaattattgctgagagtacaagtaagaggaaggaagtagaccacgtccctgctgagctgaaacctgctaaggtagagttttacggcagaactacaagatcacactcaacagcagctgctgcattatcgcccactgtgattggaagcaagttaagaaaggcaggagatgtgcacacaaacggagaggtgtctaaggacttggaggttcctcgaaacgatgctcctattaccaggtcactgaggaacagagttgttcatattaacaacagcgcagttgatggaactcgtgcccggaagaagcttggaaccaagaggaagcccagtagtagaccagcaactcacgggcgtcagccacctgtacctcctgtagaggataaagaacaagttgctgtgccctgtaagttctcccaacacaggcgatcaagcagaaaccgtcctcggcctgatgaactgttaagaaacacatatttagaaaataacaaggtgaatggagtaccagtggggggcaaggacttgagtatagctcatcgattgacacataacgccgctaaggccagcgtgggagatgttgagtcgctgtcgccaggtttcgaagacagtctcaccaggagcaacaaggatgatgtgagaaccaaaggtatgcaccaaagtgttagtaacagggagttccaaaatgccaagggtggagatgtgggtaagcagccgactggaaggggatgtgttaggcgatcaacacgcatatctgcgacgtcggttcgaatctgaggcagccctctcttgggttggatcaacctatgctctccaccacctggagctcggctgcacgaggaggcagtcggctttttgttagctaaaatagtatctttgtggcagcaagactttggccaatcgcatcttgggcaccagcgacgaccctgacttccctctcgagttcttttggcgcctgctctcagaaagagaatatctgtaagcaaggtcgaagtaggtcgtttgcttttgctaacatggtgcttgtcatgtaaccaagtgtgttcatgcgctcctctaaaaaaaagaatatttatatgtgtgctcctaaaaaaagagagagtgcatttatgtgaccctgattattaaccatggtagctacctacttggtttgaggctttgagccccacctgtatgaacttctttaaccataattgtgcaatatattagccatgttggt

SEQ ID NO: 96973 - DNA, 1294 bp, Zea Mays
ctggtgtaaggtcgtatgatcaagcgtgctctgaattagtcagtggagcatgatatactaggtcgattcatgcttattgctgcatagttaatttctcgttgtaatgcaccagtatgtaattgtatcattctgtttcctgattaacttcataagttaatagcacttgatctctcaatgaatttcatgctgcaaaccaaagcatatactggttggttagtgtttcaggttttctgtacattttttctagctttcgatcagatgtacccattctattaaggacaaacactgcaatcatgctaaacttcttgcctgagaatttgaaaatgatttgtttgcttctccttttgattcggtgctactttttgtcatctaggtgataaaaagctgttgactccgcaacctcggctaaggacaggatttttctcagttatggactctcagatgatacctgttgggtgcattcctgaagcatgcacttctgttggtgcagctaaatatgggaggccaattggtttagatgaaagccttaaggtggatttgattgtgattgggtcagtggcagttgatccaagttcaggagcacggttagggaagggagagggatttgcagagctggaatatggaatgcttcgctatatgggagctatagatgattcaaccatgatagtaactactgtgcatgacaagcagttagttgatgacattccagtggagaagctgctagttcatgatgtgccagttgacattatctgcacccctactcaggtcatcttcacgaagactacgatcccaaagccacaagggatttactgggaaaagttatctccagaaaaattgggccaaatccgaattctaagagagctgaagcaacgtatagagcaagagacaggaactatgcttccttgtggaccttcggagaagctaccgccaacagctcagagaaagcagaggtggcagcggcgacgatgagacttttaaatgactgccccgtgcgttgcgacggcttacaacaatacccatgtaaactatccaccaaaaaaatttcaatattttttgtttattgtctccgctctccgtgtaatatttttttttgatttggctaactggtgttattatttactctatccaatatatcttgttacaacacaaccaatgaaatgagcgattagaagagagttcacaacgactgactgaacgaacaaatattataaaatgatataattccaccatacaaagaccaaataagaaaaaatttgtaagctcaagtttctaaaataagtcacatgaactcaaa

SEQ ID NO: 96974 - DNA, 1610 bp, Zea Mays
aacagtgacatccaaaccgtgccattttttcgagcggcttgagccacaacagccccactctgtctgagtgtctgtgcctgcctgtgcaaagtagggtttccaccgggacacaggccgcctccatcccatggcgcgcgccgccgcctccaggctcgccgccgtggcgaactcttcctctacgcgcgagttgttcgcccgccacctcgccgccgctgccgcctcggcgtggaccgcaccgccgcgtctgcctgaaccagggagggagcggcggagcccgggctggtggtgtccgagcaggtcgtttcatgccacaaggcgggtgtatacaagggattactatgatgtgcttggagtaagcaaggatgcttctgcaccggatataaagaaggcatattatgcgctcgcaaagaagttccatcctgatactaataaagatgctgatgcagaaaaaacatttcaagaagttaaccgtgcctatgaggttttgaaggacaatgacaagcgtgaaatatatgatcagcttggaccagaagcatacgagcgtcaagcgtcaggtggtgaccctggagggccgggttttcctcggggtaacccatttggtgacatctttggtgatatctttgataatgcatacagaggtggccaagatgtcaaggtttctgttgaactatcattcatggaagctgtccaaggttgcagaaaaaccattacgtacgaagctgatactttttgtggaacttgcaatggaagtggcgtcccccctggaactgtgcctaaaacatgtaaaacatgtaaaggctctggcgcgatatacatgcagaagggtatatttactgtcgaatgtacttgctccctgtgcaatgggagcgggaaaattgtcaagagtttttgcaagacttgcaaaggagaacaggtagtgaaggggaaaacgtcagtcaagctagatatagccgcagtgacgataatgacatcatgaaggtttttggtaagggtggtgcagatgttgaccgaaataagcctggtgacctttatgttactatcaaggtcagagaggaccctacttttcgaagagaaggcatccatgtgcatgttgattctgttttaagcattgctcaggctgtcctaggtggaactgtcacggtaccaaccctcactggaaatgttacagtcaaggttcgtcaaggtacccaacctggagagaaggtcgtcctccggggcaaaggaataaaagcgaggaactcgccagtgtttgggaatcagtatgtacacttcaatatcagggttccgacggatgtgacgcaaaggcagagggagctgatagatgagttcgataaagaggagtgcgcagaccgggaaagacctgcggttgcctccggatgaagtttttggttcaaccattaattagttttagcaccacactagtttgatgccctcaatttctccaacccgccataaggtgctgtaggcaccaaaagcttattgtaacatttgaatcttatatagcatctacccagtgtgtaacgtatacattacgcgctaaattattgtaccattttcgatttttaaacagaaaagatagcgggggttgtcttcactcttcagtaacattc

SEQ ID NO: 96975 - DNA, 1704 bp, Zea Mays
aacagtgacatccaaaccgtgccattttttcgagcggcttgagccacaacagccccactctgtctgagtgtctgtgcctgcctgtgcaaagtagggtttccaccgggacacaggccgcctccatcccatggcgcgcgccgccgcctccaggctcgccgccgtggcgaactcttcctctacgcgcgagttgttcgcccgccacctcgccgccgctgccgcctcggcgtggaccgcaccgccgcgtctgcctgaaccagggagggagcggcggagcccgggctggtggtgtccgagcaggtcgtttcatgccacaaggcgggtgtatacaagggattactatgatgtgcttggagtaagcaaggatgcttctgcaccggatataaagaaggcatattatgcgctcgcaaagaagttccatcctgatactaataaagatgctgatgcagaaaaaacatttcaagaagttaaccgtgcctatgaggttttgaaggacaatgacaagcgtgaaatatatgatcagcttggaccagaagcatacgagcgtcaagcgtcaggtggtgaccctggagggccgggttttcctcggggtaacccatttggtgacatctttggtgatatctttgataatgcatacagaggtggccaagatgtcaaggtttctgttgaactatcattcatggaagctgtccaaggttgcagaaaaaccattacgtacgaagctgatactttttgtggaacttgcaatggaagtggcgtcccccctggaactgtgcctaaaacatgtaaaacatgtaaaggctctggcgcgatatacatgcagaagggtatatttactgtcgaatgtacttgctccctgtgcaatgggagcgggaaaattgtcaagagtttttgcaagacttgcaaaggagaacaggtagtgaaggggaaaacgtcagtcaagctagatatagccgcaggaagtgacgataatgacatcatgaaggtttttggtaagggtggtgcagatgttgaccgaaataagcctggtgacctttatgttactatcaaggtcagagaggaccctacttttcgaagagaaggcatccatgtgcatgttgattctgttttaagcattgctcaggctgtcctaggtggaactgtcacggtaccaaccctcactggaaatgttacagtcaaggttcgtcaaggtacccaacctggagagaaggtcgtcctccggggcaaaggaataaaagcgaggaactcgccagtgtttgggaatcagtatgtacacttcaatatcagggttccgacggatgtgacgcaaaggcagagggagctgatagatgagttcgataaagaggagtgcgcagaccgggaaagacctgcggttgcctccggatgaagtttttggttcaaccattaattagttttagcaccacactagtttgatgccctcaatttctccaacccgccataaggtgctgtaggcaccaaaagcttattgtaacatttgaatcttatatagcatctacccagtgtgtaacgtatacattacgcgctaaattattgtaccattttcgatttttaaacagaaaagatagcgggggttgtcttcactcttcagtaacattcttttgggggtgtggttgtgtgccaagaatgaagagaggggatattggcaggagaaagtgtttttgaatttaatacgaatgtcatggtacc

SEQ ID NO: 96976 - DNA, 2591 bp, Zea Mays
gtgtgacgactgacgactgaggtctgacgaggcgtaaacctcgctgactcgccctgccgccgccccgccccgcccgcgcgttctccgccgtcgtccccggaaggtttttgcctcagggcatgtggatctgttagttcacctgctgcaagcaagtatagctatagggttgaccagtgcagaagtatgaatccttactttgttgggattcttgtccccgtcgcggtctccctgctgctccgcaagaggagaaaggcccaaaggatgaggggagtgccagttgaggttggtggggagcctggatatgcagtccgtaactatcgttttgaacaacctgttgagacacactgggagggggtgtccacacttgctgatctgtttgagcaatcttgcaaagagtatgtatacatgccactccttggcacaaggaagctcatttcaagggaaactgaagcagcacctggtgggagatcgtttgagaagctgcatctgggcgagtatgagtggaagtgttatgcagagtgcttcaagagcgtttgcaacttttcatctggactaattagagtaggtcaccagaagaatgaacgtgttgctatttttgctgagacacgggctgagtggcagattgggttgcaggcatgcttcagacaaaacattacagttgtcaccatctatgcctcattgggggaggaagctttgtgtcactcactaaatgagactgaggtcactactgtagtttgtggtcagaaagaactaaaaaagttgattgatataagtgggcaacttgacactgtcaagcgtgttgtctatatcaatgaggaaggcatctcaactgaagtttctttagctcaaaactgcactagctggatagttgaatcatttgaggaagtaactaggttaggagctgaagcacctgttgaagcaaacatgcctctaccttccgatgttgcggtgataatgtacacaagtggtagcaccggattgcccaagggagttatgatgacccaccgcaacgtcctggctacactctcagcagtcatgaccattgtgcctgcacttggcagtaaagatatatacttggcctaccttccacttgcacacattcttgagttggcagcagaggcactaatggctgctgttggggcctcaataggatatggatcacctttgaccctgattgatacatccaataaaataaaaaagggaactctaggtgatgcttctgcactaaagccaacattgatgactgctgtacctgctatacttgatcgtattcgtgatggtgtcaggaaaaaggtggatacaaagggtggtatagcaaagcaattgtttgacattgcctataaccgtcggcttgctgcaatcaatggaagttggcttggtgcctggggactggagaaactcttgtgggatacacttgtgtttggaaaggtgcgtgctattttgggaggaaagattcggtttgtactttcaggtggagcacctctatctggagatactcagagatttatcaatatatgccttggggctccaatagggcaaggttatggtctgactgaaacttgtgctggagggacattttcagagtatgatgacacatctgtcggtcgtgttggtgctccactaccttgttcgtatattaagttgattgactggcctgagggtggatacttgactgctgatttaccaatgcctcggggagaaattgtcattggaggtccaaatataactaaaggctatttcaagaatgaagctaaaacaaatgaagtctacaaggatgatgagaaaggtatgcgatggttctattctggagacatcggacggttccatccagatggctgccttgaaatcattgaccgtaagaaagatatcgtgaagcttcaacatggcgaatatgtatctctcgggaaggtagaggctgctttgattgtgagcccatatgtggagaacattatgatccatgctgatcctttccacaattactgtgttgctctcgtggtggctgcacacattgagctggaaagctgggcttcgcagcaaggaatcaaatacaacgatttctcagatttgtgccagaagcaagaggctgttaaagaagtgcttggatctttagcaaaggctgcgaagcaagcgcgacttgagaagtttgagataccagtcaaaatcaagctgataccagagccatggacccccgagtcgggactcgtcactgctgccctcaaactcaagagggaggtgatcaggaagacgtacgagaacgatctggctgagttgtacgcatgatggttctactctttttgatacgtttagtgtggaaaatgtgtagagtgtcaatgtcacgctgagatctatggtaatttgataccgattatcgttctgggattattattattattttgttcagttagaggagatatataaaccttgaagttttgagttatatggcttctcttgatgccgagaagctatattgcgatgattcctatgtgtttaggatataacgctttcgaattcttattgcgcttgttcatctcgtaccttgaggtaactactggtattgctgtctatagaattgtatgtacggtttcggtgta

SEQ ID NO: 96977 - DNA, 1824 bp, Zea Mays
atgcaacccaaaacaacatggagaaaaaaaactaactgagcatgactcgtcatcttttccaactctctttcttccccttgttctgctgacgcgccggtccgttggtcgcctcctatctgctcgctcgcccggtccggcctccgtccatggcgatggcggatgatgaggacaaaggagagccgcctggattggacccaagaacccggcgacccgtggcgaccggcgacatggccggcggtggcggagaggaggagtgggagggcccccccggctacgtgctctcgctcccggcggtggcgccgctcctgcccgtcgccgtctcctgcctcgacgccaccgtccggcgcaagaggcgcagccgtccccgcctccgtgcccagccgtcgggctggtgggccttcaagctccccgtccccgcgccggaggaggcaaaggggccggttctcccagcgtcggtggttaataatccgtctgaggaggctcgtccacagagcctgtgcgtgcgccaggcgccgtcgccagacccatacacccccgcggcggcagaggagaggccggttaagagtgtgaggatgtgcctgcagtgcggcgcggtggtgacgccgcagtggaggtcggggccgatggggcagggcacgctctgcaacgcctgcggggtccggctgaaggtggccggggcactgcgggggcaggtgcggcaccgccccgcgccgaggacggccgcccgaccgcccccggacagcccggcctcggagtcgtcgcctgacagcccgatctgggagcccgggtcagttcccgacgtttacctggtgaggaagatgcctctgaagcaggggagacctccgccaccgtcgccgatgcccgcgccgccgccgccagcgccagcggtgtacctcgtcaagaagaagaggaagaagacgccggcttcggtggcctcggcgaagaagccgtggcggcccccgaagtccgcgaagcagtgcctgcactgcgggtcgtcgtcgacgccacagtggcgggaaggcccgctggggcgtagcacgctgtgcaacgcgtgcggcgtgcggtacaggcaggggcggctgctgccggagtaccggccgctggcgagccccaccttcgagccgtcggagcacgccaacaggcacagccaggtgctgcagcttcaccggcagcggaggagcgggagccagagccaccaccaccagcagcagcaccctctgcccgtggagaagcaccctccgcgacccacagccgcgctccagtttccccagcggtggcacgtgaaggaggagtacccgccgacgccgccccaccagcctctaccgcacccggtggtggccggcagcctcgccgccggcgagctgcgcgttgggggcatggtcgacgcggcggcagatgcggacgccgatgcaggacacggcggcggcaacggcaatggcctgagcaacgcgccgagctctctggactcgctcctgctggagggcccgtcggcgccgctgcttgtcgacgacgacgatcccttgatcgattagctagccactagccagagcctactaggggcaatccggcttccagcctagccgatttgagagaatagtaatcttcttggaccttctctttcctgtctcggcaacttcatcgtctttggttgtgcgtatctctgttcatctttcggcaaagtttttcgtgtaacttcatcatcgtcaaatggcagaatttgtaccaatgcttaggtgctgtcgtaacagagatgataatggatggataatggcataatggcataatggcactggcatgatcgacctgcaactgtgccaatcacga

SEQ ID NO: 96978 - DNA, 1808 bp, Zea Mays
ctgagcatgactcgtcatcttttccaactctctttcttccccttgttctgctgacgcgccggtccgttggtcgcctcctatctgctcgctcgcccggtccggcctccgtccatggcgatggcggatgatgaggacaaaggagaggttcggatccattaatatctctatttttcgttgggtggttgggaagataaactcgcatcctgtaatattgctcgggagcctgctaaagatagcattcttcttgtcaagttgcgcagccgcctggattggacccaagaacccggcgacccgtggcgaccggcgacatggccggcggtggcggagaggaggagtgggagggcccccccggctacgtgctctcgctcccggcggtggcgccgctcctgcccgtcgccgtctcctgcctcgacgccaccgtccggcgcaagaggcgcagccgtccccgcctccgtgcccagccgtcgggctggtgggccttcaagctccccgtccccgcgccggaggaggcaaaggggccggttctcccagcgtcggtggttaataatccgtctgaggaggctcgtccacagagcctgtgcgtgcgccaggcgccgtcgccagacccatacacccccgcggcggcagaggagaggccggttaagagtgtgaggatgtgcctgcagtgcggcgcggtggtgacgccgcagtggaggtcggggccgatggggcagggcacgctctgcaacgcctgcggggtccggctgaaggtggccggggcactgcgggggcaggtgcggcaccgccccgcgccgaggacggccgcccgaccgcccccggacagcccggcctcggagtcgtcgcctgacagcccgatctgggagcccgggtcagttcccgacgtttacctggtgaggaagatgcctctgaagcaggggagacctccgccaccgtcgccgatgcccgcgccgccgccgccagcgccagcggtgtacctcgtcaagaagaagaggaagaagacgccggcttcggtggcctcggcgaagaagccgtggcggcccccgaagtccgcgaagcagtgcctgcactgcgggtcgtcgtcgacgccacagtggcgggaaggcccgctggggcgtagcacgctgtgcaacgcgtgcggcgtgcggtacaggcaggggcggctgctgccggagtaccggccgctggcgagccccaccttcgagccgtcggagcacgccaacaggcacagccaggtgctgcagcttcaccggcagcggaggagcgggagccagagccaccaccaccagcagcagcaccctctgcccgtggagaagcaccctccgcgacccacagccgcgctccagtttccccagcggtggcacgtgaaggaggagtacccgccgacgccgccccaccagcctctaccgcacccggtggtggccggcagcctcgccgccggcgagctgcgcgttgggggcatggtcgacgcggcggcagatgcggacgccgatgcaggacacggcggcggcaacggcaatggcctgagcaacgcgccgagctctctggactcgctcctgctggagggcccgtcggcgccgctgcttgtcgacgacgacgatcccttgatcgattagctagccactagccagagcctactaggggcaatccggcttccagcctagccgatttgagagaatagtaatcttcttggaccttctctttcctgtctcggcaacttcatcgtctttggttgtgcgtatctctgttcatctttcggcaaagtttttcgtgtaacttcatcatcgtcaaatggcagaatttgtaccaat

SEQ ID NO: 96979 - DNA, 1382 bp, Zea Mays
ttgcgaggacagcatgacttccttgtcgatgccggagcaggtacacggacactctccccaggagacggtggcaatggcctccgacgagccacagtcgcagctgactggcctaggcgatccaaaagccagccgatctgatgcggcgaccatggtgacgaccggcggtgctggcgacggggaggaggtgatgggggcggagagccccctcgacttcgtcctcgtcggcacgccttgggggctgctcctcgctcccacaccgctggcgagcatgaagcaggacgaggaggaggtgagtgctcctccctgtccagagaagacacctgctgcagcgaatggggcgaagcagtgcgtgcagtgcggcgcgaccgagacgccacagtggaggatccagccgacggggcagggcgcgctctgcaacgcctgcaggatccggctcaggccggccgaggcgctgcgggagaaggtgcacgtgcacgcgcaccgcccatcggcgccggcgctagggccggcgacgtcgacggccatctccgagcctccagcggacggctggatctcgggggcctggatggatttcgacgcgcacctgctgaaggtgacgcctccccctcccgccaggcggcaggagtctccgtccccgacgacggaaccagcgccggagaagaagacacggaagaggaagccgtcgacgcggcggtgccaggctgccagcactgctgcaagtcgtccgcgtcgacactgactgcagtgggggacggggccgataggccccagcacgctgtgcaacgcgtgcggcgtgcgctacaggcaggttcgagttcgactcctgcaggaataccgcccggcggcgagccctaacttcaagcatgtctggctctgagcacgcctgcaagcgccgcgaggcgatccagcttcgccagaggaagcacaggggaaaagagcagcaccaggctccggaaccgggcgcaggtgatggcatggagcagcgcgccagcacctgcctccgccaccgccaccgccgccagcgcaggctggtgatgagctgccgatgggcgagccgatctcgctggacaagctgctgctcgacgccatcgacgacgggtcgccggagacgaacttcgtgtacagtgttagtgatgatgatgagttgatgacctgctgatgggggatccaacaataatctcgctggacgagtttcagttcgacgggccggcgccgccgccgccgcttatcgacgacgacgacttcgtcgactagacctagctagctagcctcgcgataaactgagccaattatgcaagtcgttgtgtgatggtacgcagtataacatgagtgtttgtctgagaaattctgcactgcagatctcagggtttgatttcatgacc

SEQ ID NO: 96980 - DNA, 2019 bp, Zea Mays
tcgatgcgggagcaggagcgccgctccccgccgatggagacgacaaggacggcttccaacgagccccagctgccagaatcaggcccaacaactgggcgatctgcggcggccatggcgaccggcgacatggccggcggtggcgctggcgagggggagcggggccccgacagcgtcctcccatcctcgccatgggtggctctgctgtccgtcgtcggctcccacattgccagaccggaattccagcgtaagccacgcagccatgcgccccgcgccgcgccggcccgcccgtggggctccaagttccccgctctcccaccggttgcgccggccaagatgaagccgacgaggaaggtaaggcataagcgccgccagcgcgtgcaccgtgccccgccgcttccggcggcggccatgaagaggctggcgaagaagcgggcgagggtgtgcacgctgtgcggcacaacccagacgccgtcgtggaggacttcgccggccgaccggctggtcatgctctgcaacgcctgcgggatccgagccaggacttccggggcggcgccgccggagcaggtgcacgtgcacgtgcacctccccacgccggcgacgacggtcgtcgtctccgatccagagcaaccggccccgctggagatcctccagggctcggagtacgagcacctccccacggcggcgacagtcgtcgtctccgcgcaagagcagccgcccccgcaggaggagatccagcagcgctcggagtccccgccggacagcccgtacctgaactccatgctggatttcgacgtgtacctgctgaagaggacacaccccaggcgcgagaagtctcctccgccgccgcctcctccgacggcgggaataaccgcggcggcgctggccccgccgccgaagggcaagaaagacaagcagaagaaaaaatggtgcctacactgcggcaccacctggagcctgcagtggaggacggggccgatgggcgtcagcacgctgtgcaacgcgtgcggcgtgcgctacaggcagggccgcctggtgccggagtaccggcctagggcgagccccacgttcgaccagtcggagcactcctacaagcaccgcaaggtgctccagctccgcgagatgcaggaccgcccggcgccaccggcagcgtttcggcctagcgggaacagaaagaagcgccgcaagggcaaggagcagcagcagcaccagcctgcacaagctcgcagtcgcagcgaagagcaggaccagcagcctgcgcaaccagccgcggtggcggtgctccaggtccgcaagaagagcgataagggcaaagcgcagcgcctgcctgatccgcaaccggcgttgcggctcaagcttcgcaaggagctcagggggaaacagcagcacctgcttcctcctcttcctccccctcctcctccacctgcgctgccgccgcatgctggttatgattatgacatggtgcagcaacacctgcctccttcaccaccggttcacccggacccgcacgctggttatgacatgttgcacccgcatgctggttatgacatgttgcagtcatcgtactcgtacctgcctctaccaccggcgttgcagcacgccgccggtgatgatgacgacatggagatggagcagcagcacctggtgcttctgccgccggcggcgtttcttctgcgcgctggtgatgagatggcgcagtacctgcctcctccgcctcctccaccggagctgccgcacgctgctgctgatgacgacatggagatggagtggcgcctgctgtctcttccgccggcgctgccgcacgccaccgatgagctgatggtgggtgagccgatgccgatccccccgctggacccgttcctgttcgacgggccggccgcgccaaggatcatcgacgacgacgacgacgacgagcccgccaccgtgatcgtgatcgacgacgacgagcccgcccccgtgatcgtggtcgacgacgacgacgacgacgtgcccgtcaccgtgatcgtggtcgacgacgactag

SEQ ID NO: 96981 - DNA, 1055 bp, Zea Mays
aaacacgaaacctatccttcgtcttactaatacaccatgtcgcaaatatagaaattattcaatcctacttcacttaggtttacccacatattcatcgcataataaacatctaaacctaaccttcacatgacgactaatctacgaccgtgatcacaagcacttcacaaacatctaatacaccacaacacgcatgctacagacaagatcattatcgacttgtatatataaccactccgggcataggaccaataacaatgaattggcttaccacactaaaccgaactcaaattcacgatatcgacgacgatctgcagttcacccattttaccgaacatccgaagagtcctacgctagagctaatttttaccacacaaacaaaaatcaactaagcacgagcgccaccgacggatcctattaaacacatcattcgtttcatccatctaacaatttagctaacatgaatcatagatcagcttaccgacctaaaccaactcgatgatcgcgagaacgacgatggtcctgatttaggcgttttgtcgagcaccaagcaagcgttgcacggcaagatgacgtcgaggcgaggatcaaagatggacaactggcacggcgcgatggcggcttgaacagagacgagaccgacggcgaggttgaagctggacggggagccgatggcgctggggcaagggggtgaggccgagcgccatggggcaacctggaggacgagctcgggcatggagatagcagaggggcgagcaccggcgcgagcagaggcagggatccgagctgggggctggggcgagttcgccatggagcagaggaaatccgagcgcaaggaggaagaaacagctgggcggccgagcgccatgggggacgggcgcagggagcaagcttcgcgccgcaagaaattctggccgggcgccagggagaagcgagcgccgtgcacagagggagagaggaacgccatggcactgctcggctggaagcagaccagagagagagaaaggagtggctgcgcgctagaggagagatcgagcgactgggcgacgaggagatag

SEQ ID NO: 96982 - DNA, 467 bp, Zea Mays
atggtgatcttgctcctatttcttcctctcgctcttctccaccatacgctctccgagttttgctgtgttggaaaagcttcacggaagagcgacgtgtttagctatgggattatgctccttgaagtcttcactggaaagaaacccacagatgctatgtttgttggtgaactgagcctcaggcattgggtccatcaggcatttcctgaagggcttgtccaggtcgtggatgctcgtattctactcgatgatgcttctgctgctaccagcagcctgaaaggctttcttgtggcagtgatggagccgggtttgctctgttcagctgactcgccggaccaaagaacgacgatgaaggatgtggtggtgacgctaaagaaggtcagggaagattacatcaaaacgatcgcaatgagtacgagtgctacccacgagcagtgactgtttgttcgctgcggcccacgtgtttccct

SEQ ID NO: 96983 - DNA, 369 bp, Zea Mays
gcacaaggcattacagcctgtccacccgattttccgctattgtgtgacattgttctgtcaggacaggggtaacactagaagctccaagttcctaaataggaaaacaaaacagacttagaagtagacaatgaataagaagacccaaaatgtatgtaacatacaatacatttctctataagccaatccgcacgtccgcctttcagtgtccttggatatctcttcaactcacactggatgaggtcataggggaatgggcagagctgctcaactctacatatagcaacatcagtgcgctccgtcttccttctttcttcatccagttcgtagtacacctttccagagcaaagaactagacggttaattccctcc

SEQ ID NO: 96984 - DNA, 924 bp, Zea Mays
gatcttggacttcgaaaaccaattgaagagttagatgtgaacattcgagatgttgttagaagagagtatttattgttaggcccttgtcaaccaaaaggtcacatatttcccaagaagcgaataggagatagacaaagaagttttcaggaatcatggttcaaaaagcatgaatggttggaatacagtgttgctaaagatgcggccttttgcttttattgtttccttttcaagcaaccaagaagggaaaactttggtgttgaaagctacactggtgcgacagggtataacaattggaagaatgcgattaagtcatttgatgtacatgtgggtaacattgatagtgctcataataaggctagaagatgttttgatgattttaaaaatcaaagacagagtgtgtcacatgtaatgtcacaagtgagtaggaaacaagaagaagaatatttgagacgtcttattattgtcttaggtgttatcagatttcttctattgcaaggtctggcttttcgtggtcatgatgagtgtactagctcaaataatagaggcaacttcttagaaatgtttgaatggtacaaaatgaaggattcaagtgctaagaaattgtttgatagcactcctaaaaattgtatgttgacatcaccggagattcaaaagcaaatttgtgaggcttgtgcagaagagaccaaaaaagtcatcttagctgaaattggggataagaaatttgctataatcatcgatgaggcccgagacacatctatcaaggaacaaatggctttgattttgagatttgtcaacaatcaaggccaggtgattgagagatttcttggaattgaacatgttacagatacaagctcatcttcacttaaacaagctttagatggtatgctctctaaacatagtctctctataaaaaacttacgtggg

SEQ ID NO: 96985 - DNA, 572 bp, Zea Mays
gctctccctcctttcgcgccaccagaatttgtcacctgtcacaacagcttctcaggttcttatgccatggaaattcaacggatgttacagccttttcgtaatagatcatgttaaaaagcacgtgacttttatcgactttacaccgacccaagattggtataagcacatgccatacaagaggttcgcagaagcgattatcatggccttaaagaaatataagattgcctatagcaagaaacgttctggatgggaagaggatatttttaagtgaaaacatacaatttggaatggtgttccaagtgacttaagagagctaaataccagctacctcgttctataagctatgaccatatggggaatgatagacgaataaaatttattagggatgcaaagatttttcgaaggaactttgtgattgatctgttaagttatgaggacaattcgtgtcgatatgtcatccctgcaaacatacaacaacgacttatcgatattgctaaaaaggattagtttagtgtatggttgtcgacatatttgtctgtcattacaaaattctaaattgactctttagaaat

SEQ ID NO: 96986 - DNA, 2100 bp, Zea Mays
atggaggtgtacgcagtcggagtgttgaggctactaccatggctggcactggcagctgcgcttctgccactggcacgtgcggcgtcgcagcagccgccggtgcggggatgcaggcggcagtgcggcaacgttaccgtcccctacccattcggcatcggtgcgggctgccaccgcggcgcgaccacggggggcttccggctccagtgcgacgacgccggcggccgcggacgcccgccgcggctcactgtggccggctacggccacgaggtcgccgccatctcgctgccgacggccgaggccaccgtgctcctcaaagccagccgcgcgtgctacgaccgcccgggcgacgccgacggccgcgtcgtcagcctgcaggagcaccccatggcgctcaacgggtcgtgccgcggcgacgacggctgctgccagagtaccatcccgctcgggctaaactcctaccgcccctacctcggcagctttggccgccggcggaggcgggaccaggaggcgacgttcctggccaactccaccgcctgctcctacgctttcatggtggacgcgtggtggttctggttcgccggatcgcacttcaaccgcaccggcgacttcgccgtgcccgtcgtcctggactgggccatcagggacgccccgagctgcgccgccgcggagcgggacagcgagacgtacgcgtgccgcagcgcgcacagcgtctgcctcgagtccagcaacggccccgggtacgtctgcaactgcaccggcgggtaccagggcaacccatacgtgaccgacggctgcacggacgtcgacgagtgccggcacagggacgagtttccgtgctacggcgtgtgcgtcaacacgccgggaagcttcctctgcacatgtcccaatgggtccagtgggaacgccactgtacaggatggctgccgccgagacgacgacaacaaattcggtttgccactgaagatcgtcacgggcgtcagtgcgggcgtgttgctgctgctgctggcgagcttctcctcgcacctgtgggttcagaagcggcggctgctccaggcgaagcggcggttcttcgagcagaacggcggcgtcctcctgcagcagcagctgggctcgctggccagctccggcgtggcgttcagcatcttctcaggtgaagagatcggcagggccaccgacggcttcgcggaggcgcgggtcctcggccgcggaggccacggcgtcgtgtacaagggcgtcctcgccgacggctccgccgtggcggtgaagaagtcgagagtggtcgacgcgaggcaggtgaaggagttcgccagggagatgctgatcctctcccagatcaaccaccgcaacgtggtcaagctgcttggctgttgcctcgaggtcgaggtgcccatgctggtctacgagtacgtcccgaacggcagcctccacgcgtacatccacggcgatggcgacggcggcggcggcggtggcgaggccaagctgaatctgccacccggcgcgcgcctccgcatcgcggccgagtccgcggacgcgctcgcgtacatgcactcgtcggcgtcgccgccgatcctccaccgcgacgtcaagtccgcaaacatcctcctcgacggcgacctcgcggccaaggtgtccgacttcggcgcgtcgaggctggccccggcgggcgaggaggcggtggccacgctggtccagggcaccctcggctttatgtctagaaaaaaatttatcctaatttttttgaatacccgccttctaaatcctgggcccgccactgagagcgacgtgtacagcttcgcggtggtcgtgctggagctcctcacggggaggaaggcgttcgtcccggtggaggacgaggaagaggaagaggagggcggcctcgcgttctgcttcgtcacggcggcgcaggcgggacggcaccgggagatcatggaccagcgggtcatcgaggaggtcggagcggaggtgctggacgaggcctcggagctgctgatgcggtgcctcagcattatcggcgatgagaggccaaccatgaaggaagtcgccgacaaactccaaaagctcagacgccacgcttgcagcagcagcagattgtaatttaac

SEQ ID NO: 96987 - DNA, 2053 bp, Zea Mays
aaaaggggaagcgagaccgccgccacatgcctcctggcctcctacctcgcggctgcctcctcctcgtcgttccccatcttcgccgccacttgccggcgctttgttctactcttcgaagcagccactcgcataagcgccccgcggttatcttctcccccgtacgtgccgtctccggctactccgccatggcggctggttcgccggagcagcagcagcggagcgttgtggtcaaggagactgtggagctcacggagacggaggagcgcatctttcgccgccttctcgaggttgttcgccacttcagtctcggcacgcagctccgcgtcgccggcggatgggtccgtgataagctattagggaaagactccgctgacattgacattgcccttgacaatatgacgggtcagaatttctgtgagaaagtaaatgagtactcaaagttgataggggagcagcagaaaggaatcggtgttatccaatgtaaccccgatcaatccaagcacttggaaactgctaggatgcttattcttgacatctggattgattttgttaacttgcggtctgaaacatatactgaaaacagccgtatccctacaatggagattggtactgccaaggaggacgcataccgcagggacttgacaattaatagcttgttctttaatatcaacaataactcggttgaagatttaactggaagaggtattgaggatctcaagaagggccttattgttactcctttacccgccaaagctaccttccttgatgacccacttagagttcttcgagcaataagattcgctgctagattcaactttacattagatgaagatttgaaggaagctgcatctgatgaaaaggtgaagtcagagcttggcacgaagattagtagagaacgtatcggtcacgagattgatctcatgatgtcagacaaacaccctgttaaagcaatgtgtgacatccgcgatttggggctattttatgttgtattttcttttcctgaaaaatccaaccctcctgtttttgacaagtgtgattggcagtgtgtttcacatattgaagcagcttgggatcttgcatattctattggcagctgtgtgttcagcagtggttctgactccaagtcgcaggatgagcgaagaaggctgtacttgtatagtgcattattcaaccccctccgaagtatgttctacctggacaaaagatctaagaaggctcctgtttctagctttattatcaaggactcgctaaagttgaaaaccagcgatgctgaaacggttgtcaacatacatgctgctagcgaaaagtttgctgagttgattcctctcctcgagtcaaacgctgacgtgtatgctctcaaagagaagctggaagatgagtaccttgagataccaggagacagcgtgaagcgtgtttttgcagggcttatactccgagaaataaaggagttttggcgggtggcgctgcttctatccattctcttctaccgagaaactggaactcctgctggcaccctcgacgagcaggacgagctgcgtcggaggaaagagaaatacatcagagcagagcgttccataaccgacctagatcttgacggggtgtggaagctgaagccgatactcgacgggaaatcgattatgggagtcatgcaggtcaagtccggaggtccactgataggaaaatggcaacaacgtgtgctgaagtggcagcttgcgcatccggacggaaccgtggacgagtgcgtcgagtggatgaagcagtcgcagtcaaaacgacagaaagtggagtccagcacctgataatcaaaattgacagtttggtcgtagtcagttttcagataggttagcaactgcctgccccttgcaaacagtttttttgcgtagacggtgaactcttgctgctaagacagccagttctcccttgttcgaaacctgtcctgaacgtagagtgagagacgaaagagagagagagagatggtaatctataatattaaaatatagcatgaatataattgtcctgagcacaaaaagaaatatagttgtcctgagctcgt

SEQ ID NO: 96988 - DNA, 449 bp, Zea Mays
gattataatttgttctcttttgatttcccttaacattaagatatgttatcgtgtttaggatgagcgaagaaggctgtacttgtatagtgcattattcaaccccctccgaagtatgttctacctggacaaaagatctaagaaggtaacaataaagttgtgcatcatctgatttttctttttttttctaatgcaaggctctgaaaattttgtaatggttcagtttgtccatttgtgtcactaataagtcatttaaaagcaactatcaattggtacatttacttgatagtattatgctatattaactggagaggcaagcttgcagtgccatgactatttctttttttcagcatgcaacattatgtgcagtgttcttgatgctttttcttaatcatcataacacactttaactgtttaagcagccaaaaaaattatttgttatatctactagg

SEQ ID NO: 96989 - DNA, 105 bp, Zea Mays
gtgttctttccagcctaccagaaatgcctagctcagcttcgtgccttcatcaatcagcagttcaccacagcatgatggtttctcacgcgccaaaaaaaaaaagaa

SEQ ID NO: 96990 - DNA, 1944 bp, Zea Mays
ggggtggcgcggaggcgcgtcgcggtcgccgccctgctcctcgcgctcgcctacgccggggggctgctcatgttcctgctcgacgagaggctatccggcggctccgtgggcggggctgcggcgggaggcctgggtccgatggtgacggtggcttcctccgtccgccgccgccgccccctccctagccccgcggacgcgccccctcatgctcagcccgggtcggtgtaccgcagccacctcgtgttcgagcgtctcttgccggccatgcgcgacgacgccacgctcgcctcctccctctccgcctcggcctcgtggcgccgcaccatgctaatgacatcacattaccaaaattctggggacccatggatgccttgtgtcaacggtaggctgactcgatcagagttgccaccctcaaatggctatctcatgatagaagcaaatggcggtctaaatcaacaacggctttctgtctgtgatgctgttgctgtggccagcttgcttaatgcaactcttgtgatcccaacatttcatctgaacagtgtctggcgtgatcctagcaaatttggtgatatatttgacgaagatcatttcattgagacactcaaagaacatgtaagagttgtgaagaaacttcctgaagatgttttgctgcgcttcaatcataatatcagtagcataccaaatatgagaactaaagcctactcatctccaaaccactatgtgcaaaatgttcttccaaaactgcttgagttaggggctgtacgcatagccccattctcaaacagattagcccagtcagttccattgaacatccaggccttgaggtgtttggtaaactaccatgcattaagatttgctgaaccaataagaattctatctgatgaattggttggtcgaatgacaaaaaagagtttgttgactggtgggaagtatgtctcggtgcatcttcgcttcgaagaggatatggtagccttttcatgctgtacatatgatggtggctggagggaaaaaactgaaatggacaatgctcgtgaaaggagctggagaggtaagtttcgtcggcatggtcgagtgataaaccctgaggcaaacagaagggacgggaagtgccctcttactcctttagaggttggcatgatgctaaggggcatgggattcgataatacaacctccctatatgttgcttcgggtaaaatatacaactctgaaaaatatatggctcctcttcgccagatgttccctcttttaacgacaaaggattctcttgctttgcctgaagaacttgctcaattcaaggggcattcgtctcagctagcagcgttagattacactgtctgcgtgcacagtgaagtgtttgtgacaactcaaggggggaacttccctcactttctgatggggcacaggcgctatatgtttgggggtaatgcaaagacaataaaaccagacaaacggaagctggtcttatcttttgatgatccaaatatcagatgggatcagttcaagcagaacatgcaggaaatactgcagcatagtgacatgaggagcattgcattgagaaaaccaaacgattcagtatatacattcccaatgcctgattgcatgtgtaagcaagatgggatgatataaccctgagagcatacatatgacaaatcctttttgtgtttttggttttgaaacataggtaggtttaggcaggtaggtatattgtacatttgtaacctgtaggtagtctcaccatatccatatgctagcaagagatttgttgattcatgttggttctacactttattctaatgtggtctgtatagaggtctagaggagatacatccaacacttgagagggcttctaacaaagtgagaggctgtaccttactccttgcttgtacgtgtaaaggcgtagcctaactacagaggcgaaagcaaaactttatcttgttcttggaa

SEQ ID NO: 96991 - DNA, 1323 bp, Zea Mays
atgcgggcatctcagcaccacgcaccaccgcagccactgccgctccctccgcctccgctgtctctcccgtcaccgtccgcggcgcctcggcgtgggcgccacagcagcacccactcatcctcctcgtcgtcctcctcctgcatctccggcccgtcgccgtcctcggctccgttcccgcacgccagcaccacctcctcgctcgtgccattctcgtgggagcgccacgcgggcgtgcccaagaactcgtcccgtcacccgtggcgggccgcctcgcccacgtgcaccccgctgccgccgccgccgccgctccgcccggcccctcgacgccggcgcgccaaggccccggccacgtcgtcctccgacgccaaggaggaccccttcgtcgccgccttcgccgagtgcaccagggacgacgactacgctgccgacgtcgacggcgacagcaacaagctcgcgccggtgccggcgaagaaggcagcggtggtgtcaccaggccgcgccgagcgccggaggtggatggccggcggcggcgggctcgtggccttcctcgacatgcacgggtgcaagagcgccatggatgtcgtcgtcgctgacggcaccttccagccccgcgccggctcgtcgctgctgcgaatcatcgatcccaggccgcgccggcccggggagccccaaccccaagctaacatgatgatggtgggctggtggctgtggtctgtggatgctggtgcctgccatgcatgttcccaggccgggccttgtgtggctgcctcctccatgcgtgtccctatagatgtccaaacaagtttggggttctttcctctcgtccctccctctgtctccctgtgcctaaccctaacccttatcccatccggatctggtgactggaggtcctcattcctcggtgtgtcgattgtgcaagaggaggaggagcgccgatttgaggaccacaatgaggcagaggatgctaggttcttcattggtttcgatgacacccatggagattctattgagatcgatattgtcgtcggctccggaataggtactggcacaggctctatgagcccaccagattcagtccctaatcctgatgccggtggtagcaattcaaactcgaactcgaagaaaaggtctaaggactggaatgactttgatgtattgactaagattgtgattgtggttaaagctggtctggatcctattagaacttatcttgatgattttagaaccgctatatcatttttaaatgcttccaaccaacatatagctgcatgcaaaaggtattgtatgagtatatttggtgcaatagcttgtaatctggtgtaa

SEQ ID NO: 96992 - DNA, 1072 bp, Zea Mays
tctacacctccctcagcggcatcccatcgtcccggaccctccacagcaggattattgcatgtcaccaaatatttcagcgaaagcaaccaccctaccacgccaagcacgtaattctccggccatcgctaccatctggccgccctccatctcgcgcgtgcataaaaagcgtcgtgcgcgcccacacaccgtgagcacaccacacgcccacaccgcggaatagacctctcaagtctcaacccagaacccagcaagcaccatggccgccgccgtgcccctcctccagctgctaatactgccgctcctggtcgcgtcagcggcgggcggcggcggcggcggcgagaagagcacgcacatgaagctgtactggcacgacgtggtgagcgggccgagcccgacggcggtgcaggtggcgcgggcggcggtgaccaacacctccaagaccgccttcggcgccgtggtggtgatcgacgacccgctgacggagggcccggacctcaagtcctcgaagcccctcggccgcgctcagggcacctacatcggcgccggcaaggacgagctgtccctcatgatgagcatgaacttcgtgttccaggccggcaagtacaacggcagcaccgtggccatcatgggccggaacgcggtgttcgacgccgtccgcgagatggccgtggtgggcggcaccggcgcgttcaggatggcgcgcggctacgcgcaggcccgcacgcacgccctcgacctcaacaccggcgacgccaccgtcgagtacaacctctacatcaagcactgaactgactgaccatccagttggtttttgcttgggacggaccagttgttcccacgcttgtgtcgatctacagtggtttttggatcatgttgcggtaacactacgtaaagaataacctgatgatttttttttaggaatatgggacggcctttttagatcagtacgagcatgatctaaaaacataagtgtaaaatgtagttcagcataaaataatgtggatcggactagaactgaccacatgtatgtggtggacttgaggggcacaacctaataaagctcatattaatt

SEQ ID NO: 96993 - DNA, 398 bp, Zea Mays
agaagtcgaacagccatgcaaaaacatttattcacaagtacgaccaagtacagttcaaggaacaaataacaatccttaaaatgaaatgaaatcaaaaagggaaacacatgcagacacctgaccggacttcagaagctagctccagcttaaaccagcaatggaactccccaccttccatcatgctgatcatcagcaactgccctttcaaacacacataaagatttttctccggtttctcttgatgcagaaccttctcatctgcatgtcatctggcttgtcatgttgcataggcttctccaagccataagaatgaagtatagatgctattgtttggtgcagtgccaacctttgctttgctggaactaagtcctatgaaagctacatatgcttttatctga

SEQ ID NO: 96994 - DNA, 175 bp, Zea Mays
gatccatataatgctaatgaaatgagcccaagtgaccaaagacaaaaccatgtttcagcatcgagaaaaaagcctatttccctcccaaaaagtgaagaagcaaaaactgggaagagacagagagagaatgacgatgatatgatcccaacactagagaactatagacctgaagatg

SEQ ID NO: 96995 - DNA, 895 bp, Zea Mays
attctcgctagcaccattaccccctccatctcgcgcgtgcataaaaagccgcgtgcgtacacgccatgagcacacacaccacacacgtacgcccacaccagagaatacacagcacagcaccgacaacacctctcaagtaacccagcaggcaccatggccgccgccgtgcccctcgtcctcctgctactgccaacgaccctgatggccgcgtcggcggcgtccggcggcgagaagagcacgcacatcaagctgtactggcacgacgtggtgagcgggccgagcccgacggcggtgccggtggcgcaggcggcggtgaccaacacctccaagaccgccttcggcatggtggtggtgatcgacgacccgctgaccgagggccccgacctcaagtcctccaagccgctcggccgcgcgcagggcacctacgtcggcgccggcaaggacgagctctccctgatgatgaacatgaacttcgtgttccaggccggcgagtacaacggcagcaccgtcgccatcatgggccggaacgccgtgttcgacgccgtccgcgagatggccgtcgtgggcggcaccggcgcgttcaggatggcgcgcgggtacgcgcaggcccgcacgcacaccttcgacctcaacaccggcgacgccaccgtcgagtacaacctctacatcaagcactagctagctagcccatcggctttgtgtttctgattgttggtgctcatatatgaacacgatcgaactccataattgtcttgtgagcttaatttgtgccactagcttttgcagttttggtgaaaaagaagggggtaattaaaggacgatagcttcggtcgttgtaatgtaagctgacttcgatttaacttgcacaataattgaggacttaaagaataactag

SEQ ID NO: 96996 - DNA, 801 bp, Zea Mays
atgaagcagacaacctcctcctcgtcctccctctgcctggcgggccaggccggtaccaccgcgcccgccccgtctttcctcttgggcggcatcccccttccgcttctgcgcgagcggcggcatcggcgagggcgggggaggggcggccgcgtccccgatgatcgagctgaggaactatggatcgtccgtccccgcagctggcggcgacgcgaggaggcagagctcgggcggccagtcgggctcctcgggggtcggggatgccttgccggccccgtcgggcgcggcggcctccatggccctgagactcctgaggaagctgcaagagctaggcgaaagaactgcatctacattgagaatcagtacttccttggaagttcatacggctggaagcacgaaggcatcaaggcggaagaaatcggtgctctccaattgattccgaaggagctctcgctgaagattatcagcaagattgaagctggggagcggtttactgtttatgttgtggtgccaatgtggcctgagggtgttccagaaagcgcttctgttcaggtaattcttgactggcaaaggagaacgatggagatgatgtacactgacatcgcacaagctctcaaagccaacgagattgaagcaaaccccaatgactatctcactttcttctgcttaggtaaccgcgaggtgaagcaggatggagaatatgaaccagaggagcacccagaacctgacactgattacatctgggctcaagaggctaggaggtttatgatctatgttcataccaaaatgatgataggtttatga

SEQ ID NO: 96997 - DNA, 1540 bp, Zea Mays
gaaaccgtaaaccgtgaatggccatcgaggtccaaaaatccatctggattctggagagaggagaccccaaaatcgcagcgcgcgaaaacgcaggagcaacccgcccactcgccaccaccgcccgcgcgcacggcggcgaccgatggccccgctcgtgccgatgtcgcagccatgggtggagaaataccggccgaggcaggtcaaggatgtggctcaccaggaggaggtgattcgggtgctcaacaacaccctccagaccgccgacctgccgcacatgctgttctacggcccgccggggacgggaaagaccaccaccgcactagccatcgcctaccagctctacggtccagagctgtataagtcaagggttttggagctcaatgctagtgatgatcgtggaattaatgtggtgaggacgaaaatcaagaactttgctgctgttgctgttggtactgcacggaaagctggttatccctgcccaccttacaagattattatacttgacgaagcagattcaatgacagaagatgcccagaatgctttgaggcgtaccacagagacttactccaaagtgaccagattcttttttatatgcaactatatcagcaggataatagaaccacttgcatcaagatgtgcaaagtttaggttcaagcctctttcagaagaagtgatgagtagtcgcattatgcatatatgcaatgaagaaggcctcaatcttaatgctcaggcgatgtccacactgagtgtcatttctcaaggtgatcttcgtcgtgctataacctaccttcagagtgcagctcgcttatttggatcttctatctcttccagtgacctgatcagtgtttctggggttatccctgaagatgttgtcaagtcactgcttgcagcctgcagatctggtgaatttgacgtggcaaacaaggaagttagcagcattatagcagatgggtatccggtctcacagctgatggcacagtttctagatgttattgttagcgcggatgatattccagatgatcaaaaggcaaggatatgtaaaaagcttggggaaaccgataagtgcttggttgatggggcagatgagtatctacagctgctggatgtcgccagcgagactatccgctctcttttcaacatgccgcggacgctggtcttctaagagttcataaagaggaatggcggttccgatccttggcgaaaactttttcctgcctcttagatgccgcccaaggttaatctgcctcccctaccgctctgatgttggtagcttcggacgggttgaaaaagcgatgaactcagacttaaaatcccgctgaactgtgcctgtggatggatgcccaatatgacaatgaacatttctcagcgttcatcttgtgtgttatattccctcttctacttccgcctccagagtgcagcagttgacgttttttttttcgcactatggcattgcagtcagattttgttattgtgacttcttcgtggcacaggtcctataacaaagttacattttttgggtgcagtatataacaaggttgcg

SEQ ID NO: 96998 - DNA, 1906 bp, Zea Mays
ggaggacgaacaacacgtcagcactactcgcagtcccatcttcgccccccgcgacccgcccactatataaaacccgcctccccacccataggcccacaccaccaagaaaaataaattcagagaaaggaggaagggagactgggagaaacagacaggaaggagcccatccgcgtctgcctccacccctcggctcccagagtccccgctagccaagcccccacatggcaccaccgcccgcgggcctcgtgctcgtggctctgctcgcgctggtcctggcgctggcgctggcgccggcgccggcgcgcggggacaagccggcgaggggcggggcgtccagctccatcgccgccggggcggagacggagccgtcctccgccgtcttcccgctctacggcgacgtctacccgcacgggttgtactacgtggctatgaacatcggcaacccacccaagccatacttcctggacgtggactccggcagcgacctcacctggctgcagtgcgacgcgccctgcaggagctgcaacgaggtgccgcacccgctgtaccggccaacaaagagcaagctggtgccatgcgtgcaccggctgtgcgcttccctgcacaacgggctgaccgggaagcacagatgcgactcgccgcacgagcaatgcgactacgtgatcaagtacgcagaccaggggtcgtccaccggcgtgctcatcaacgacagcttcgcgctccgcctcaccaacggctctgtcgctcgccccagcgtcgccttcgggtgtggttacgaccagcaggtccgcagcggcgacctgagttcgcctaccgacggcgtgctggggctcgggaccggctcagtcagcttgctctcgcagctcaaacagcgtggcgtcaccaagaacgtggtcggccactgcctcagcctgaggggcggcgggttcctcttcttcggtgacgatctcgtgccttaccaacgcgcgacatggactcccatggctcgcagcgcgttccggaactactactcccctggctctgcaagcctgtacttcggcgaccggtcactgggcgtgagactggcgaaagtggtcttcgacagtggaagctcgttcacctacttcgctgcaaagccataccaagcacttgtcaccgctcttaaggatggcctgagcaggacgctggaagaggaacccgacacttcgctgcctctctgctggaaagggcaggaaccattcaagtctgtgcttgatgtgaggaaggagttcaagtctttggtgctcaacttcgccagtggcaagaagacgctcatggagatccctcctgagaactacctcattgtcacagaaaacgggaatgcctgtctgggcatcctcaacggatccgaaatcggtctcaaggacctgagcattattggagacattacgatgcaggatcacatggtgatatatgacaatgagaaagggaaaattggatggattcgtgcaccctgtgacagagcccccaagttcggatcctcctcctcctccgcccttctgtgatcatttcacacacatcccctgtacagtgtgtacatacacccccaaccccacttaattccaatttctatttctccgaacagcgacataaatacggttcatgggtttgaggaaggttactgttggcctcaattcctcccggggatcattggtcttcccaacgaagattgcccagcctattaccgttcaaacaaagagcgatttgccaaggcccaagggggaggccgctagaatgacagaaacagcagaaggatggtcacggaggctggtgtgtgttctttaggaaaggagagaaactagcccatgtaaacatcataatgttcatatgaaatataacgatgatcaccctgttacgagtacaatcttttcggaccttttctgtgtac

SEQ ID NO: 96999 - DNA, 2054 bp, Zea Mays
ggaggacgaacaacacgtcagcactactcgcagtcccatcttcgccccccgcgacccgcccactatataaaacccgcctccccacccataggcccacaccaccaagaaaaataaattcagagaaaggaggaagggagactgggagaaacagacaggaaggagcccatccgcgtctgcctccacccctcggctcccagagtccccgctagccaagcccccacatggcaccaccgcccgcgggcctcgtgctcgtggctctgctcgcgctggtcctggcgctggcgctggcgccggcgccggcgcgcggggacaagccggcgaggggcggggcgtccagctccatcgccgccggggcggagacggagccgtcctccgccgtcttcccgctctacggcgacgtctacccgcacgggttgtactacgtggctatgaacatcggcaacccacccaagccatacttcctggacgtggactccggcagcgacctcacctggctgcagtgcgacgcgccctgcaggagctgcaacgaggtgccgcacccgctgtaccggccaacaaagagcaagctggtgccatgcgtgcaccggctgtgcgcttccctgcacaacgggctgaccgggaagcacagatgcgactcgccgcacgagcaatgcgactacgtgatcaagtacgcagaccaggggtcgtccaccggcgtgctcatcaacgacagcttcgcgctccgcctcaccaacggctctgtcgctcgccccagcgtcgccttcgggtgtggttacgaccagcaggtccgcagcggcgacctgagttcgcctaccgacggcgtgctggggctcgggaccggctcagtcagcttgctctcgcagctcaaacagcgtggcgtcaccaagaacgtggtcggccactgcctcagcctgaggggcggcgggttcctcttcttcggtgacgatctcgtgccttaccaacgcgcgacatggactcccatggctcgcagcgcgttccggaactactactcccctggctctgcaagcctgtacttcggcgaccggtcactgggcgtgagactggcgaaagtggtcttcgacagtggaagctcgttcacctacttcgctgcaaagccataccaagcacttgtcaccgctcttaaggatggcctgagcaggacgctggaagaggaacccgacacttcgctgcctctctgctggaaagggcaggaaccattcaagtctgtgcttgatgtgaggaaggagttcaagtctttggtgctcaacttcgccagtggcaagaagacgctcatggagatccctcctgagaactacctcattgtcacagtaaacattgcatatcccgacggattattttatcagcggcggtaagctgttggtggctaaaacctggttcctctgtttgtgccaggaaaacgggaatgcctgtctgggcatcctcaacggatccgaaatcggtctcaaggacctgagcattattggagacattacgatgcaggatcacatggtgatatatgacaatgagaaagggaaaattggatggattcgtgcaccctgtgacagagcccccaacgacataaatacggttcatgggtttgaggaaggttactgttggcctcaattcctcccggggatcattggtcttcccaacgaagattgcccagcctattaccgttcaaacaaagagcgatttgccaaggcccaagggggaggccgctagaatgacagaaacagcagaaggatggtcacggaggctggtgtgtgttctttaggaaaggagagaaactagcccatgtaaacatcataatgttcatatgaaatataacgatgatcaccctgttacgagtacaatcttttcggaccttttctgtgtacattctttacttggttttctttctgttgatgtgatatatactcggttccaggtgtctcgcgactatgtgtgagtgtgatacgcaggcagcagattgtcttgttcttcagggtcgttgtgtggataacgtcaggaatttagacattttcagattcaatttaatctagaaatatagcacg

SEQ ID NO: 97000 - DNA, 1920 bp, Zea Mays
acacatgtgtgtgcagtgtagacgagcgcgtacgtaacttattgggaggttgcgcgtacggcaactcccgtcgcctccgcgctcccctaaccgcctcccccttgtctcatggtggaagtggaacaaccctccgcccgcgccgctgcgaagtgagaagggaaaacaagaaacgatcgagggaggggacgacggagcgagctagctagcggcgcggcgggcgtcgctcggcatggacgcggaggcggcggcggcggcggcggcgacggcggtggaggagagggagcggctgcggaggagcttcgcgtcggggaggacgcggccggcggcgtggcgggaggcgcagctgcgcggccttctgcgcatggccaccgagagggaggacgacatctgcgccgccctgcacgcggacctcgcgaaaccccttaccgagtgctacgtacacgagatatcgttggtcatttcttcgtgcaaatttgctctcaagaatctcaagaaatggatgaagccccgaaaggtccccggcgggctgctgaccttcccgtcggcggccagcgtcgcggcggagcctctcggcgtcgtgctcgtcatctccgcctggaactaccccttcttgctggccatcgacccggtcgtgggggcattcgcggcgggcaacgccgtggcgctgaagccgtcggaggtggcgccggccacgtcgctgctgctggccgacctgctgccgcgctacgtggacccctcgtgcgtcagggtcgtgcagggcggcatcgcggagaccaccgcgctgctggagctccagtgggacaagatcttctacacaggtaacagcagagtaggacgcatcgtcatgtcctacgctgccaagcacctgacgcccgtggtcttggagctcggtggcaaatgccctgtcgtcgtcgactccgacgtcaacctccacgtcgctgccaagaggatcgccgccggcaagtggggctgcaacagcggccaagcctgcgtctcgccggactacgtcgtcactaccaaatcgttcgcgccaaagctgctggagtccctgaagcgagtgctgttcgagttctacggggaggagccgctgcggtcgccggacctgtcgcgcgtcgtcaactccaaccacttcaacaggctcatggcgctcatggacgactactcggtctccggcaatgtcgcgttcggcggccagatcgacgagcggcggctaaggatcgccccgacgctgctgctggacgtcccgctcgactccgcgatgatgaaggaggagatcttcgggccgctgcttcccataatcacggtggacaagatcggcgagagcttcgctgtgatcaactccatgcccaagccgctggcagcttacctcttcagcaacgacgggcagctcaagcagcagttcgagaggaccgtctcggcgggagggatcatgttcaacgacaccggcatccacctgacaaacccgaacctgccgttcggaggagtcggggagagcggcatgggcgcctaccacggcgccttcagcttcgacgccttctcccacaggaaggccgtcctggaccgcagcttcctcggcgaggccagggccaggtacccgccgtacacgccggcgaagctcgccatcctcaggggcgtgctcaatggcagcccgcttgccacggttcaggcggctgcggggtgtacaggaggggcatcagctgactgactgactgaccccccttcatgcttattattaataataagcataaatattcaccgcatacacattgctgtgcttttattaaggttgttgtgagggcgaaaaatgtattgaccctttgcgtgtgcgcgtgcgtgtatagcaactattaataaaagaaaaaagtgatgttcatttcgtacagagtatactaaattaagatcacatcacgagttttaagc

SEQ ID NO: 97001 - DNA, 2559 bp, Zea Mays
cgagcgcgtacgtaacttattgggaggttgcgcgtacggcaactcccgtcgcctccgcgctcccctaaccgcctcccccttgtctcatggtggaagtggaacaaccctccgcccgcgccgctgcgaagtgagaagggaaaacaagaaacgatcgagggaggggacgacggagcgagctagctagcggcgcggcgggcgtcgctcggcatggacgcggaggcggcggcggcggcggcggcgacggcggtggaggagagggagcggctgcggaggagcttcgcgtcggggaggacgcggccggcggcgtggcgggaggcgcagctgcgcggccttctgcgcatggccaccgagagggaggacgacatctgcgccgccctgcacgcggacctcgcgaaaccccttaccgagtgctacgtacacgagatatcgttggtcatttcttcgtgcaaatttgctctcaagaatctcaagaaatggatgaagccccgaaaggtattgtggtatcctctgttatattttcgtacgtggccagcattgtatccatggaactttaaccaacaacagacctccgatcggccacattaacaaatacgaatactctcaatacgattagaacagtcaatattggtttaaaatgaatctttaaatagggaatgtttgtaattgagaactctatatatgttgctttgatggatggaccctagttaatcacttagtatgtcacaactcacaaatgctatacactccattttgttttaaaatggttatcattctcacttcgtaatacatctctctctttgcatcatatttttttttgtttctcccaaattctgtgtttaaaactaaaacattaactattttgggatgaagtgcgtaagattcgagaagtagcgtttaatttggtggtcattagtttctattggaagttggaacatactttctccgatcttttttatttatcgtaaatgaactagcggacgacgaatattcgaaaatagaggtaatacacatttattatacgcgcacgttgacaacaaacaattcatcataattaataaatgcaagtgcacttagcttcaagacggatctgtacaaggacactcatcatcacagtaccaagctggccctggtcctggtcctggtcctggtcctagactcctagttcctagtcttgcagccatgaatgaattcgatcaagcatcctgttctagcatagcctcgtcatcagctagcttttcatgccaaaaatcatcctagctcccccgaactgactcgcgtgcgctgctggcggaatcaatgcgcattgactgctgcttctggccggttttttgtttttgttttcgtttctgtttttgttttcctttgcaggtccccggcgggctgctgaccttcccgtcggcggccagcgtcgcggcggagcctctcggcgtcgtgctcgtcatctccgcctggaactaccccttcttgctggccatcgacccggtcgtgggggcattcgcggcgggcaacgccgtggcgctgaagccgtcggaggtggcgccggccacgtcgctgctgctggccgacctgctgccgcgctacgtggacccctcgtgcgtcagggtcgtgcagggcggcatcgcggagaccaccgcgctgctggagctccagtgggacaagatcttctacacaggtaacagcagagtaggacgcatcgtcatgtcctacgctgccaagcacctgacgcccgtggtcttggagctcggtggcaaatgccctgtcgtcgtcgactccgacgtcaacctccacgtcgctgccaagaggatcgccgccggcaagtggggctgcaacagcggccaagcctgcgtctcgccggactacgtcgtcactaccaaatcgttcgcgccaaagctgctggagtccctgaagcgagtgctgttcgagttctacggggaggagccgctgcggtcgccggacctgtcgcgcgtcgtcaactccaaccacttcaacaggctcatggcgctcatggacgactactcggtctccggcaatgtcgcgttcggcggccagatcgacgagcggcggctaaggatcgccccgacgctgctgctggacgtcccgctcgactccgcgatgatgaaggaggagatcttcgggccgctgcttcccataatcacggtggacaagatcggcgagagcttcgctgtgatcaactccatgcccaagccgctggcagcttacctcttcagcaacgacgggcagctcaagcagcagttcgagaggaccgtctcggcgggagggatcatgttcaacgacaccggcatccacctgacaaacccgaacctgccgttcggaggagtcggggagagcggcatgggcgcctaccacggcgccttcagcttcgacgccttctcccacaggaaggccgtcctggaccgcagcttcctcggcgaggccagggccaggtacccgccgtacacgccggcgaagctcgccatcctcaggggcgtgctcaatggcagcccgcttgccacggttcaggcggctgcggggtgtacaggaggggcatcagctgactga

SEQ ID NO: 97002 - DNA, 2655 bp, Zea Mays
caccaacagcacggcgtcgagatgagcggtggtggcgacggcggcgacaaggaggccttcttccactgcctggaccgcgtgccttccggcctgcacctcgacgccgatttcccttccgatgacgaagaagacgacgaggatgacgtccgcgtctccttcacctctgccgccggcgaccagcatttcaagagcttccggtaccaggcggccgtgccggtggaggatgacgaggatgacgacgacgatgacgacgacgacgaggacacgtccaagtacgacatgtggatgtccgacgagcccatgtccatccaggagcgccgccgccgcctgcaccaggggctcgggatggccagcagccgggacctcgcgctgcgccggcacagcatgaagaaacgccccgccgatgtcccgcgggccatgtcccggagcgtgtcgaggtcaaagccaccgccgtcgccgatcccagccaatgcggcctcggccgccaacgtgccgagcactacctctgtggcgcaggcggcggctgccgcgccgcggccggcgaaggaggtcatcacgaggcggcgctcggacagcaaccttgtcgtgcgcgacggtgcgtcggtctcggggaagccaccgtcgcagcagcccttgcgacgcgttctgtccttgccggctcggcctgacgcccgcgacagcacgcccgtcgtcgggaaacctcaagccggggctccgcgtgggttgcctgtcgtgccgccgcaggcagcgccagggattaaaggcggcaaaggcgatggcgacgaggggagcaagaacaatcgggacggcgagaaggaggtcgccgtcgtggccgccagcacgcccaaggacgcttcgtcgagcacccagcagcagacgggcgtgctggggcttgaggagttcgagaagttcatcggcaacacccccatcatgaagctcatgcggcgtggcacgagccagaaccagcccgcgccgctgcccgccggcgtgccgcccaaggccgacaagtcgggcggcaagaagaagggcggctggctcaagaacatcaagtcggtggccatagggttcatgcaggacaaggacgccaacgccaagtcgggcgtcgtgtccgcggcggcggccgtgcccaagtccgtcccaaccaatgcctccgccgggtctgctgcgccgccggccgcgggttccgagcggcccaaggtgcaccagtatggcaagtcgagcaaggagctcaccggactctacatgtgtcaggagatccaggcgcacgaggggtccatctggagcatcaagttcagcgcggacgggcggcggctggccagcgccggcgaggacagcgtggtgcgcgtgtggcaggtggtggagaccagcgccccgccgtgctcgctggcgatggatggcaagtcaggcccgctggccccgctgccgtcccccggcgcggccgacggggcgtcttcaacgacgacgccggcgctggcctccatgcccaagaagccggccaaggggaagagcggcggcagggacgcgctccccgagcacctcgtcgtcccggacaaggtgttcgcgctggctgagcagccggcgtgcgtcctcgagggccaccaggacgacgtgctcgacctcacctggtccaagtccgaccagcagctgctgtcgtcgtcgatggacaagacggtgcggctgtgggacacggagagccaggcgtgcctcaagacgttcgcgcacagcgactacgtgacttgcatccagttcaacccggtggacgaccggtacttcatcagcgggtcgctggacgccaaggtgcggctgtggagcatccccgaccggcaggtcgtcgattggacggacctcaacgagatggtcaccgcggcctcctacacccctgacggccagggggcgatcatcggctcgcacaaagggagctgccggctgtacaagacagcagactgcaagcttagcgcagaggcgcagatcgatatccaacccaagaagcgcaaggcgcaagcgaagaagatcaccggatttcagtttgctccggggaaccctgccgaagtgctggtcacatctgccgactcgcagatccgtgtcttcgacggcgtcaccatggtccaaaagttcagaggtttcaagaacacgagcagccagatcacggcggcctacacctcggacgggcggtacgccgtgtgcgcgagcgaggactcgcacgtctacctgtggcggaccacccgggtgccgccggccgcggccatcggcatcggcatgaagcccaaggcgtggtgcaccatccgctcctacgagaacttctactgcaaggacgtgtccgccgcggtcccctggacgcagtcgccgtccccgccgggcgccggcgacggcagccccactggcggcagcccagcgtcggcggacaagccgccgcagggcgcgtcatgcaacgacgagtcctgcagcgtcgccgccaagccggagggcggcgacccgagcagctgcagcgccgccgctgccgagcccagcagctccgcgcggcagggtggcgccaagggcgacggcggcaacgcgtggggcctggtggtggtcacggcgagcttgggcggggagatcagggtgtaccagaactttgggatgccgttcaggatcaaaggccaggccaattttttctag

SEQ ID NO: 97003 - DNA, 1408 bp, Zea Mays
gatttataaactttgttagcatcctctatgcatcaagtctcatgtgcacgcctccattagcctcgcattgacgcggtccgcaactcctctaaacccttcctctccctccggcgccggcgccgacatggccatccactacctcctccgccgcggggtctccggtggctcactgctccaccctatccgcggtctcttcctcgcctccaaggagcttgggaggcgtccgttgggctctgcggcggcgggagacgcagcggccgagctgaggggcgcgcgggaggacgtcaggcagctgctcaaggccacctcctgccatcccatcctggttcgattaggttggcatgatgctggtacatatgacaagaacattaccgagtggcccaagtgtggtggagctaatggtagcttgagattcgaagtcgagttgaagcatggggccaatgctggtcttgtgaatgctctgaagctgatccaacctatcaaggacaagttttcaggtgttacctatgcagatctgtttcagcttgccagcgccacagccattgaggaagcaggtggccccaaaattcctatgatctatggaagagttgatgttattgcccccgaacaatgcccaccagaggggaggcttcctgctgctggcccaccttcacccgcggaacatttgcgtgaagtattctacagaatgggcctgaacgacaaggaaatcgttgcactgtcaggagctcatacacttggacgtgcaagaccagagcgtagtggctggggtaaatcagaaacaaagtacactaaagatgggcctggtgcacctgggggacaatcttggacatctcattggctcaagtttgacaacagctatttcaaggctatcgaagaaagacgagatgatcacctcctagttctgcctactgatgctgtgctgtttgaggattcctcattcaagatctatgctacaaaatatgccaaggatcaggacacatttttcgaggactacgctgaagctcatgccaaattgagcaatcttggggcaaagtttgacccgccaaagggtatctcactcgagtagttgtggatggaggtgactgaacaggaagggtcatgtttctttgcgtgaccattttcgaaggttggcaaggaaaagttattggggttgaatgatagctccacaaattggattcaccgattaaaggatttttttcttagcgtgccctgtttttttagtagtatcctacactatgaataaagcaacacctgtcatttcaagataaatatttgttacactaactaactgaaagcatccgaatcctaagtggtttcggtgattaatgacgacataagatcgttataactaacttatgctttattgagtccatttaagttaggtcacaataataatgattatttggtc

SEQ ID NO: 97004 - DNA, 1506 bp, Zea Mays
gatttataaactttgttagcatcctctatgcatcaagtctcatgtgcacgcctccattagcctcgcattgacgcggtccgcaactcctctaaacccttcctctccctccggcgccggcgccgacatggccatccactacctcctccgccgcggggtctccggtggctcactgctccaccctatccgcggtctcttcctcgcctccaaggagcttgggaggcgtccgttgggctctgcggcggcgggagacgcagcggccgagctgaggggcgcgcgggaggacgtcaggcagctgctcaaggccacctcctgccatcccatcctggttcgattaggttggcatgatgctggtacatatgacaagaacattaccgagtggcccaagtgtggtggagctaatggtagcttgagattcgaagtcgagttgaagcatggggccaatgctggtcttgtgaatgctctgaagctgatccaacctatcaaggacaagttttcaggtgttacctatgcagatctgtttcagcttgccagcgccacagccattgaggaagcaggtggccccaaaattcctatgatctatggaagagttgatgttattgcccccgaacaatgcccaccagaggggaggcttcctgctgctggcccaccttcacccgcggaacatttgcgtgaagtattctacagaatgggcctgaacgacaaggtgtaaacagaatgctgtgtttaaattagactatgcataattctgaatttgctagtcacaactattttgtgctctgtaggaaatcgttgcactgtcaggagctcatacacttggacgtgcaagaccagagcgtagtggctggggtaaatcagaaacaaagtacactaaagatgggcctggtgcacctgggggacaatcttggacatctcattggctcaagtttgacaacagctatttcaaggctatcgaagaaagacgagatgatcacctcctagttctgcctactgatgctgtgctgtttgaggattcctcattcaagatctatgctacaaaatatgccaaggatcaggacacatttttcgaggactacgctgaagctcatgccaaattgagcaatcttggggcaaagtttgacccgccaaagggtatctcactcgagtagttgtggatggaggtgactgaacaggaagggtcatgtttctttgcgtgaccattttcgaaggttggcaaggaaaagttattggggttgaatgatagctccacaaattggattcaccgattaaaggatttttttcttagcgtgccctgtttttttagtagtatcctacactatgaataaagcaacacctgtcatttcaagataaatatttgttacactaactaactgaaagcatccgaatcctaagtggtttcggtgattaatgacgacataagatcgttataactaacttatgctttattgagtccatttaagttaggtcacaataataatgattatttggtcaattaaggttttttatgcc

SEQ ID NO: 97005 - DNA, 1065 bp, Zea Mays
gtgcacgcctccattagcctcgcattgacgcggtccgcaactcctctaaacccttcctctccctccggcgccggcgccgacatggccatccactacctcctccgccgcggggtctccggtggctcactgctccaccctatccgcggtctcttcctcgcctccaaggagcttgggaggcgtccgttgggctctgcggcggcgggagacgcagcggccgagctgaggggcgcgcgggaggacgtcaggcagctgctcaaggccacctcctgccatcccatcctggttcgattaggttggcatgatgctggtacatatgacaagaacattaccgagtggcccaagtgtggtggagctaatggtagcttgagattcgaagtcgagttgaagcatggggccaatgctggtcttgtgaatgctctgaagctgatccaacctatcaaggacaagttttcaggtgttacctatgcagatctgtttcagcttgccagcgccacagccattgaggaagcaggtggccccaaaattcctatgatctatggaagagttgatgttattgcccccgaacaatgcccaccagaggggaggcttcctgctgctggcccaccttcacccgcggaacatttgcgtgaagtattctacagaatgggcctgaacgacaaggaaatcgttgcactgtcaggagctcatacacttggacgtgcaagaccagagcgtagtggctggggtaaatcagaaacaaagtacactaaagatgggcctggtgcacctgggggacaatcttggacatctcattggctcaagtttgacaacagctatttcaaggctatcgaagaaagacgagatgatcacctcctagttctgcctactgatgctgtgctgtttgaggattcctcattcaagatctatgctacaaaatatgccaaggatcaggacacatttttcgaggactacgctgaagctcatgccaaattgagcaatcttggggcaaagtttgacccgccaaaggtaaatggaatcagggcactttccattctgagaggtagaaaataactatgttctcaggtc

SEQ ID NO: 97006 - DNA, 517 bp, Zea Mays
cccatcccattgctcgttctgtcccttcgttcacaacctcctccacgaccaaacgatccgggttccagcggcggcggcggcggcgaagatgatcataccggtgcgctgcttcacctgcggcaaggtgattgggaacaagtgggacctctacctcgacctcctccaggccgactactcggaaggggatgctctggatgctctggaactgttccgctactgctgcaggcgaatgctcatgacccatgttgacctcattgagaagttgctcaactacaacacactggagaagaccgagacaagttaagtgagcaagcatatcatgctctgaaagcactactgtttcgtagtatcatatatattgtaggcggtatgttgtttcttctctatcaggagaggattgttgtgagtgtgaacttgcttttgctctcgagcattcaaggactgacaagggcatgttgcatctatgttacgatgttggagattttaatcgatataacggctaactaatactctctgt

SEQ ID NO: 97007 - DNA, 517 bp, Zea Mays
cccatcccattgctcgttctgtcccttcgttcacaacctcctccacgaccaaacgatccgggttccagcggcggcggcggcggcgaagatgatcataccggtgcgctgcttcacctgcggcaaggtgattgggaacaagtgggacctctacctcgacctcctccaggccgactactcggaaggggatgctctggatgctttggaattgttccgctactgctgcaggcgaatgctcatgacccatgttgacctcattgagaagttgctcaactacaacacactggagaagaccgagacaagttaagtgagcaagcatatcatgctctgaaagcactactgtttcgtagtatcatatatattgtaggcggtatgttgtttcttctctatcaggagaggattgttgtgagtgtgaacttgcttttgctctcgagcattcaaggactgacaagggcatgttgcatctatgttacgatgttggagattttaatcgatataacggctaactaatactctctgt

SEQ ID NO: 97008 - DNA, 943 bp, Zea Mays
atgcagcatttcgcttcgttgacttccacagcatttcgcttcgttgacttccacaataggctgtacctgtacgtgctgctattattcatctgggactggcatatagtacgttcagattcttcatgttttggcctgatcaggtgtatttttcaccggatctcagtacccgtttggcctgatcaggctatggcgatatgcagacgatgttcaactttactaatctctctctctttttttctgtccaaactgtattattgcatccgtttgtgaatgcacgaattcatttgcaaggaggaacaaaactgtgatcaaagaacaaagaatcaaagagaacgaccgacctatgtacagttgtacacacacacacaaaaatggcgcgcgatccccgcaactgggggatcgagcaggcggcggattcgttcggccgccggccggtcagccctcgaagctggacgagcggctccatctccccctgaggtactcctccaacgacacggcggcggcggcggcgaagatgatcataccggtgcgctgcttcacctgcggcaaggtgattgggaacaagtgggacctctacctcgacctcctccaggccgactactcggaaggggatgctctggatgctctggaactgttccgctactgctgcaggcgaatgctcatgacccatgttgacctcattgagaagttgctcaactacaacacactggagaagaccgagacaagttaagtgagcaagcatatcatgctctgaaagcactactgtttcgtagtatcatatatattgtaggcggtatgttgtttcttctctatcaggagaggattgttgtgagtgtgaacttgcttttgctctcgagcattcaaggactgacaagggcatgttgcatctatgttacgatgttggagattttaatcgatataacggctaactaatactctctgt

SEQ ID NO: 97009 - DNA, 909 bp, Zea Mays
taccctcttccacctccattctgccacacccacactcctcttcactcactaacggccgtgcttgcactcgcagcgcatcacttgctactttggtagtggagagcagaaagaacagagctagattattcccaacaagctacagcaaattagttgctcttcatggccgtgtcacacaacgttgggagcaagcacggtgtcgcgccgctggaggtgtcggtggaggccgggaacggcggagccgccgagtggctggacgacgatggccggcctcgccgcacgggcacgttctggacggccagcgcgcacatcgtcaccgccgtcatcggctccggggtgctctcgctcgcctgggcgatcgcgcagctgggctgggtcgccggccccgccgccatgctcctcttcgccttcgtcacatactacaccgccacgctgctcgccgagtgctaccgcacgggcgacccggagacgggcaagcgcaactacacctacatggacgccgtgcgctccaacctcggcggcgccaaggtcgcgttctgcggcgtcatacagtacgccaacctcgtcggcgtcgccatcggctacaccatcgcggcgtccatcagcatgaaggccgtcaggagagctgggtgcttccacgcccacgggcacgctgatccctgcaacagctccagcaccccgtacatgatcctcttcggcgtcgtgcagatcctcttctcgcagatacccgacttcgaccagatttggtggctctccattgtcgccgccgtcatgtccttcacttactcttccatcgggctctccctcggcatcgcacagaccatctgtaagttgttgattcttcagaccttgctgtattcttggttactcactcacatgctgagagtgagagctcaatcgatgcaaatattg

SEQ ID NO: 97010 - DNA, 1635 bp, Zea Mays
taccctcttccacctccattctgccacacccacactcctcttcactcactaacggccgtgcttgcactcgcagcgcatcacttgctactttggtagtggagagcagaaagaacagagctagattattcccaacaagctacagcaaattagttgctcttcatggccgtgtcacacaacgttgggagcaagcacggtgtcgcgccgctggaggtgtcggtggaggccgggaacggcggagccgccgagtggctggacgacgatggccggcctcgccgcacgggcacgttctggacggccagcgcgcacatcgtcaccgccgtcatcggctccggggtgctctcgctcgcctgggcgatcgcgcagctgggctgggtcgccggccccgccgccatgctcctcttcgccttcgtcacatactacaccgccacgctgctcgccgagtgctaccgcacgggcgacccggagacgggcaagcgcaactacacctacatggacgccgtgcgctccaacctcggcggcgccaaggtcgcgttctgcggcgtcatacagtacgccaacctcgtcggcgtcgccatcggctacaccatcgcggcgtccatcagcatgaaggccgtcaggagagctgggtgcttccacgcccacgggcacgctgatccctgcaacagctccagcaccccgtacatgatcctcttcggcgtcgtgcagatcctcttctcgcagatacccgacttcgaccagatttggtggctctccattgtcgccgccgtcatgtccttcacttactcttccatcgggctctccctcggcatcgcacagaccatctccaatggtgggttcatgggcagtctcactggcatcagcatcggcgccggtgtcacctccacgcagaagatctggcatacgcttcaggcattcggagacatcgccttcgcctactccttctccaacatcctcatcgagatccaagtaagcaacaatcgagatcttgtactctacactgcactgcaacaggatttccctcccctgtttctaacaaaggccgctgttctaactctggttcttgttcaggacacgatcaaggcaccgccaccgtcggagtccaaggtgatgcagaaggcgacgcgcctcagcgtggcgacgaccaccatcttctacatgctgtgcgggtgcatggggtacgcggcgttcggcgacaaggcgccggacaacctcctcaccggcttcggcttcttcgagccgttctggctcatcgacatcgccaacgtcgccatcgtcgtgcacctggtcggcgcgtaccaggtgttctgccagcccatcttcgccttcgtcgagcgccgcgccgccgcggcctggcccgacagcgccttcgtctcccaggagctccgcgtgggccccttcgcggtcagcgtgttccgcctgacatggcggtcgtccttcgtgtgcgtcaccaccgtcgttgccatgctgctgccgttcttcggcaacgtggtggggttcctcggcgccgtctccttctggccgctcaccgtctacttccccgtcgagatgtacatcaagcagcgccgcgtgccgcgcggcagcaccaagtggatctgtctccagacgctcagcgtcagctgcctcctcgtctccgtg

SEQ ID NO: 97011 - DNA, 2084 bp, Zea Mays
taccctcttccacctccattctgccacacccacactcctcttcactcactaacggccgtgcttgcactcgcagcgcatcacttgctactttggtagtggagagcagaaagaacagagctagattattcccaacaagctacagcaaattagttgctcttcatggccgtgtcacacaacgttgggagcaagcacggtgtcgcgccgctggaggtgtcggtggaggccgggaacggcggagccgccgagtggctggacgacgatggccggcctcgccgcacgggcacgttctggacggccagcgcgcacatcgtcaccgccgtcatcggctccggggtgctctcgctcgcctgggcgatcgcgcagctgggctgggtcgccggccccgccgccatgctcctcttcgccttcgtcacatactacaccgccacgctgctcgccgagtgctaccgcacgggcgacccggagacgggcaagcgcaactacacctacatggacgccgtgcgctccaacctcggcggcgccaaggtcgcgttctgcggcgtcatacagtacgccaacctcgtcggcgtcgccatcggctacaccatcgcggcgtccatcagcatgaaggccgtcaggagagctgggtgcttccacgcccacgggcacgctgatccctgcaacagctccagcaccccgtacatgatcctcttcggcgtcgtgcagatcctcttctcgcagatacccgacttcgaccagatttggtggctctccattgtcgccgccgtcatgtccttcacttactcttccatcgggctctccctcggcatcgcacagaccatctccaatggtgggttcatgggcagtctcactggcatcagcatcggcgccggtgtcacctccacgcagaagatctggcatacgcttcaggcattcggagacatcgccttcgcctactccttctccaacatcctcatcgagatccaagacacgatcaaggcaccgccaccgtcggagtccaaggtgatgcagaaggcgacgcgcctcagcgtggcgacgaccaccatcttctacatgctgtgcgggtgcatggggtacgcggcgttcggcgacaaggcgccggacaacctcctcaccggcttcggcttcttcgagccgttctggctcatcgacatcgccaacgtcgccatcgtcgtgcacctggtcggcgcgtaccaggtgttctgccagcccatcttcgccttcgtcgagcgccgcgccgccgcggcctggcccgacagcgccttcgtctcccaggagctccgcgtgggccccttcgcggtcagcgtgttccgcctgacatggcggtcgtccttcgtgtgcgtcaccaccgtcgttgccatgctgctgccgttcttcggcaacgtggtggggttcctcggcgccgtctccttctggccgctcaccgtctacttccccgtcgagatgtacatcaagcagcgccgcgtgccgcgcggcagcaccaagtggatctgtctccagacgctcagcgtcagctgcctcctcgtctccgtggcggccgctgctggctccatcgccgacgtcatcgacgccctcaaggtgtaccggccattcagcggttaacctctctcgatgaatatagttattagctctagatcgacacgcagcgatgaagaggaacattcatttttagatttcaatggactgatttggcctaaccgtcaaggatttgatctcaactatagaagaatgtgcgcaaagagaagaaatcatgctatatatagctagactcgcactcagatccaaaactacaaaacacttagcttgtggtttatttactgtggtgtttcttgtaactttatttttagcttcagaagaagacattgaagcatttattttctcttatttgcagtacttgtcaatttttgttccaatttttcagtgacctcgaattattcgtatacttttacttcgcccatccacgaatccttgtggttcttcacaacgtccgagtcacttccagtaaatctcaaaatgtaatattctttttttattttgtaactaggtatgataacagtaaaatgattacagtatcattagggacg

SEQ ID NO: 97012 - DNA, 603 bp, Zea Mays
atggggaggaagagggcgggagcgaggacccgcggcgggcatcgcgttggagtttcccgacggggatcacagacggagacggggaagcagctacattcttgggaacgagaggcgactggcgcgctagagacggatggggacgggggtcacggatgttgcctcctctccgctcgcgatgcacgggccgaacgggagggacgacaacgtggattcctcgatccccttccatggagagcggattccttgatccccttccatgcacgcgcgtcaggtcccgactcctgctactctggggctctgcgtcgcgcaggcaggaacatgaccgatcaaattcgaaaggagacgaacctcgacggtgttggggaaggagagcgcgatgacgtggcccgggagaaatccggcgtcggcaacgagtcgtgcggccgccacgtctatgagagcgtcgagggcggcgtgcgtgagcaccagcctgcccgttctgtgtcctttattttactactgaagactgtcttagactctccaatgcaaggctatttaggcggtgatgggaaggatattcaaaatggtttgaacttacagcaacttcgtgctcaagtttgctga

SEQ ID NO: 97013 - DNA, 109 bp, Zea Mays
agtgtactaacacagcccctcggctgcaccaccggcgttgccgccctcctccgccgacgacacaacctccatgggcggaaccaagtgcttgctgttcactcctccgttg

SEQ ID NO: 97014 - DNA, 110 bp, Zea Mays
gatccaagtgatcctacacattcatgtgctatgagttttgataattttgttcagataactggtggtgctgaagctgttaaaaaagcactgtttggagtatcaaccatcat

SEQ ID NO: 97015 - DNA, 1483 bp, Zea Mays
agaaaaccacggctggcgctcctccgtggacgccatctaccgtggacaagagcggggctgcccgtctgcagtgcatccataaatgccggcacctgcctcaacctcgactgattccttccttgtgagctctgagctggttgctgccgccaggattggaggagtgcgcgcgcgcgcaagtgagccatcactgagctgtggacgtgaattgcgatcatccgttctcgctttctggggctcggctgctgtggccatggcgccgccgccgccgccgtacgcgcgggtgatggaggacatggtcaagggccgggagtacgccacgcagctgaaggcgctgctccgggagtcgcccgaggccagccgcctcgtggaccggatcctgcacgccatatccctcaccatccagacggccaaggccgcggccgccgccgctgaggaggaggaggaggaggaggcgtccgaggtgcagagcgaggtcacctgcaccggcaagaggaaggccgctggcggagcgggcaagagggccgccgcgtgtcggaggagagcccagccatcgtcggttgtgacgaagagcgtgagggatctggaggacggacacgcgtggcgcaagtacgggcagaaggagatccagaactgcaagcacccaaaggcctacttccggtgcacgcacaagcacgaccagcagtgcgcggcgcagcggcaggtgcagcgccgcgacgacgacccggacgcctacacggtcacctacatcggcgcgcacacctgccgggacccggccaccgcagccgacgacgagctccacgcggggtcccgcctcatcagcttcgcggcggccaacgccaccacggccagcaccaccaccaccaccggaaacgccagcaaccggcaggccggacacaagggcgccgtgctgcctgcggagcccccgaggcagctggagggcggcggcggcggcggcgagcgggagcaggagctggagctggaggaggtgcttagcagcctcaccccggcggggagctccgctgccacggccgaggcggtgcggaccgccacgcccggcccggaccagggcgacgtgacgtctggcctccagctgcagcagcagcagcagcactggttcggcggcggcggcctctcgggcgtggcgcacttggggtacgacgacacgttcgatctggaagacattgtgttcggctccatcaccggcggcatgtatgctgctgagtactgacggccggacgacgactggtcgacctgctgtgtgttggaggagagtaggagacggtaggtagggtggagtggagccagggcatgttgatggatcgagctgtgaataatggcctagtttagtttgtatttaatatacgatatatctactctgtaagattatgccgcgggtcttgtagatcatgttaagttcaggagcagaagcttggccaacagagaacgcgcctcaatgtggtgccctgctcttccactacgcgaa

SEQ ID NO: 97016 - DNA, 629 bp, Zea Mays
ctctgagctggttgctgccgccaggattggaggagtgcgcgcgcgcgcaagtgagccatcactgagctgtggacgtgaattgcgatcatccgttctcgctttctggggctcggctgctgtggccatggcgccgccgccgccgccgtacgcgcgggtgatggaggacatggtcaagggccgggagtacgccacgcagctgaaggcgctgctccgggagtcgcccgaggccagccgcctcgtggaccggatcctgcacgccatatccctcaccatccagacggcctctcgggcgtggcgcacttggggtacgacgacacgttcgatctggaagacattgtgttcggctccatcaccggcggcatgtatgctgctgagtactgacggccggacgacgactggtcgacctgctgtgtgttggaggagagtaggagacggtaggtagggtggagtggagccagggcatgttgatggatcgagctgtgaataatggcctagtttagtttgtatttaatatacgatatatctactctgtaagattatgccgcgggtcttgtagatcatgttaagttcaggagcagaagcttggccaacagagaacgcgcctcaatgtggtgccctgctcttccact

SEQ ID NO: 97017 - DNA, 297 bp, Zea Mays
atggccgggcctgggagctgcccgttcaccgccgtgatgacccgcggcggctggcaaagctggctcacggaaaggtttccgacattgaaggtgtgctccacgatcgaagcttcagcaacgcagcaacaagcaagcaccaacaaggcgacgctgggaccaagaggcaaagccagtggtgacaaccaaggtcgaggagccatgcccagcccccctgagctagctagcaatgacgatggccaaagacacacagaacagctaaagatctggttgatgatctctcgatcgtatgctcgatga

SEQ ID NO: 97018 - DNA, 195 bp, Zea Mays
actatttttaaaatatgttttatgtttcctggaaacgatttgcactggcggttttattacgtcgaccgccagtgaaaatcgattttcactggcggttttattacgccgagcactggcccctagcactggcggttacgaaaaacgccactataaataggtttacaaccgccactatagaacttctctgtactagtg

SEQ ID NO: 97019 - DNA, 830 bp, Zea Mays
catttaagccggagctcacagcagtgcgcgcgcatgagtgcgtggtcgttagatgtatatatatgtgcatgcatgagctgctcgaggcttgcaagaaggtggcagatttgatcgatggcgatgccggtggagacggcggtgtgcatcgcgcgcaacgtgctcttgctgctggacgcttgggtctggacgtgcgtgctcgccgccgacggcgccgcgcgcctcctccggtcggccacgcactgatcgatcgatcgtcccccgccgccgattcacggtgagtgatcagctggctgtagctgctgctgttatttgccttcctgttgattgatcaatatggctcgctcgctagcttcttcgaagtcacggcgaggtggtgcttttatttctttaaatttaggtcctgtttggataatatatattaaagggtcttaaaggaattttcaatgaacaaacgactcggaggaaagggaaatacttcattttaactacaagctagctagttatgtatatatattcagacatgatcgatctgtacatgatgcaaatttgagtttgtcattggaatgaagggttagttgagttctttctcaagaaaaggaaaccatcatagtgtttgttggaaacttggaatggagggaatcatcatagcgtttaattaattgtttctatgtttttttcattcctctatttaatttatattctttgtttcatcaaacaggccgtatgtgtctagatgcaaaacgaaagatatcatctgctccacccatatgacctcgtgagtcgatcgtcctcgtaatagtacaggtgatgtactttttcacaagtatttg

SEQ ID NO: 97020 - DNA, 2934 bp, Zea Mays
ggtctgaattcttctgtgcgccaagattctgtgagagaacttgttgattcctcaagagtagaggtggtctgtctacatgaaaccaagatgcaagttatttcagattgattcattctttcaatgctggggacatactttagtgactttatttatcttccttctgttggggcagccggggcattcttgtggcttggaggaggcatttgggtttcactggtcaaaaaagacgggataattacaatgtatcagtttagttttataacgatagggggaatgaatggtggctgaccagtgtttatggtcctcaaggaggcaatgaaaagattatgttcctacaagaaatcagagaaattagggctgagtgtcctggaccgtggatgttggctggcgacttcaacctcatttataaagattcagataggaacaacaataatttcaataaagcaatgatgggtagttttcgaagattaattgaggatatggccctaaacgaaattcccttgcatggcaggcagtacacttggtccaaccaacaaaatgtgcttgtactggtcaagctagacagagtgttttgttcagtggattgggagttgcacttccctaatgttcttcttcagagtactgcctcacaagattcagatcactatcctctactcctggggcttagggataataaatccagaaaaaggcgtttccactttgaatccttctggaccaagcttgaggggtttcatgatattgtccttgttgcatggaattatattgagtcgtctacatgcccttttaagtccctgaaaatgaagttacaaggagctgcaaaaaggttgcaggcctggagtgaaaagcaggtcgagcatgtgagatcccaacttgctcttgctaaagaaatcctccatatgctggaaatagtgcaggatggtagagtgctcagccctgctgaacgctagctcaaattcagactcaagaaatatgcattattattatcatcttgcaagagaactattgcaaggctgagagcaaggatttcatggctcaaagatggggatgctaatacaaagttattccaccttcacgcccgtcatcataagagaaaattttttgtggcatgtctggttgatggggaacaaatcctaaccagtcacgaggagaaagcttctcgtgtggactaattctacaccaatctgttggggaacaggacagacatggttcgtgcgattgagttagagactcttggaatgccaagttttgatctgaccgatctggaagcccctatttcagaacatgaagtctgggatgccatcaaatgtcttccttcagataaggctccagaccctgatggattcacaggaaggttctacaaggcttgctggacaattattaaaactaatattatggcagccatctcggctgtttggggcaggaaatttgccaattttgggcgccttaatacaacctatatcacattgatccccaaaaaagacggggttgacaatattaaagatttcaggcctatcagtttggtgcatagttttgccaagttggtcaccaaaatccttgctaatagattggccagcaagcttaatatgatggtgtcacctaatcagagcacatttataaaagggagattcattcaagacaatttcatgctggttcaacaaacctccaggctactgcatcagcaaaacaaggctagcttgctgctaaaattagatattacaaaagcttttgattctgtctcttggccttttctgatcgaggtaatgaagaagttgggtttcaggtagatttggagggatctgatatgtgggcgtctggccacctcctctactcagattcttttaaatggatttttaggtcatcatattaagcatcgtaggggacttcgacagggagaccccctctcccccatgttattcattttagttatggatgtccttgtctacctgttctcaaaggcagaaaatgatggtttgcttcagcagctttctagttcaaaaaagctccatcgagtctccatgtatgctgatgatgtagtccttttcttatgcccaacactgacagatattgacctcactcttagcattcttcaactgtttggagaagcctctgggttacacaataatgtgcaaaagtcaaatgtgtaccctattagatgctctgaggaggtgctgctcgaagtccaaaccttgatgccatgtgaaatttcaaccttttcgtgtcgttatttggggctccctttatccttacacatgttgacaagacaacatttccaacctttcgtggataagatagctgaccagcttcctaattggaaggctgacttaatgacaagggctggaagaagagtgcaagttcagcatgttcttactagcatgacggtatatttagcgatggcagtggataacccacagtggggtttggatgctattgataaaattagaagggggtttctatggagaggccgcaaagaagctagatggggtcattgtcttgttgtctggggaaaagtctgccgcccctaaagcttggagggcttggtatttctagtcttcgagaattatgttgggcgcttcgactaagatggttgtggttacaaaatactgatcactctcgcccctggtttggacttcaaatataagtcccaaaaaaggctagagctttcttttctgaagtagtgaccactgaagtggggaacggaaccaataccaaattctagaaggataaatggctgaatggaaaaagaattgcagatttgtttccaaggctgattggcgcaattccaaagcgggtaatcaattgtaggacaatgaatcagttgttagtgccaaatggatttctgatatcagaggagctttgtcagtgggggttttaacagattaccttcaaatttgggatttgatatatgatatcgagctgcaaccggaggttgacgac

SEQ ID NO: 97021 - DNA, 1058 bp, Zea Mays
cagcatcaccgtgtctgattctcaagtcctgattgaattcaacgcgcaagctcgctagaggaggaggatggggactggagtggcaaaggtacctaccagtacgagggccttgaggttgtcgtcggtgagtgggacctccagatctggtgacttctggactcggagcaggacgtcgacaaaatcctcttcacggtcaccagggatgcgctggcgcttgccgctgatgtgctcgtccacgatctcgtcgcagaccgcgcggaggtcggccaggcaactcttaagccggcggcggaggccagtgacggtgctagcgacaggctcgagctccgggaagaagtcgccgacggtgaagccggcgaagaggtcctgcgcctcggcgaggacgtcgccgagcttgtcgcccttgccgtgcgggaaccgccgcccgaacgcgacgcggcagagcacgtcgttggccaggttcaggaagcactcgctgaggtccacgggctgctgcgccggggaggtgttcttggtgaggcgcgcgaggaggcggcggagctccttcacccggacggcgccgtaggtcgccacgcggcgcgccgagaggagctcggagaccaccacccgccgcgccatgcggtggtagggccccgccggcgcgaacgtcacgtcggagcacccgaacgacaggaactggcccgacaggaggtgcggccgcgacgccagcgccgggtcgttggtggtcagcgcggcgcgtgccagctccggcttggagatcaccacggcccgcacgctgcccaggcgcagccgaagcagtggcgccttcatggtacgcgccagctcggccatcgcgtggtggggcatctcggacaacaggtggaggtgcccgatgacgggccaacccggcggcgacggaggcagccgctgcggcgaccggcgcctcgtcgtgtagtagacatacgcggcggagagcgccaggaggaggagggacgacacccatgacacgaggttcagctccatgcgggccgtcgatcagtggccacttcggtcacaagtttcgcttgtgtgctagtttg

SEQ ID NO: 97022 - DNA, 877 bp, Zea Mays
cagtacgagggccttgaggttgtcgtcggtgagtgggacctccagatctggtgacttctggactcggagcaggacgtcgacaaaatcctcttcacggtcaccagggatgcgctggcgcttgccgctgatgtgctcgtccacgatctcgtcgcagaccgcgcggaggtcggccaggcaactcttaagccggcggcggaggccagtgacggtgctagcgacaggctcgagctccgggaagaagtcgccgacggtgaagccggcgaagaggtcctgcgcctcggcgaggacgtcgccgagcttgtcgcccttgccgtgcgggaaccgccgcccgaacgcgacgcggcagagcacgtcgttggccaggttcaggaagcactcgctgaggtccacgggctgctgcgccggggaggtgttcttggtgaggcgcgcgaggaggcggcggagctccttcacccggacggcgccgtaggtcgccacgcggcgcgccgagaggagctcggagaccaccacccgccgcgccatgcggtggtagggccccgccggcgcgaacgtcacgtcggagcacccgaacgacaggaactggcccgacaggaggtgcggccgcgacgccagcgccgggtcgttggtggtcagcgcggcgcgtgccagctccggcttggagatcaccacggcccgcacgctgcccaggcgcagccgaagcagtggcgccttcatggtacgcgccagctcggccatcgcgtggtggggcatctcggacaacaggtggaggtgcccgatgacgggccaacccggcggcgacggaggcagccgctgcggcgaccggcgcctcgtcgtgtagtagacatacgcggcggagagcgccaggaggaggagggac

SEQ ID NO: 97023 - DNA, 210 bp, Zea Mays
tagactcgtacaccactgagaaagctttaaagaaagtaaaatgtttgccaaccttggttcctcagacaattaatgtcactgatgtcactatggaggacaaaggtgatggtgaattggaaaagcaatctgagcagatgcccagtgatgttcaacagataagcaaaggtggtgaggaccagcaaagttaaaaaggagattcacatgtcgttc

SEQ ID NO: 97024 - DNA, 1834 bp, Zea Mays
caaatcgaacccaccaccgaaagctgttgcaattacagactcgctgctttttcccggcctccctcactcacccgaattcgaaaaaccaatctgatacgcgtgctgcagatttccaccccaagggagtgtggcagctctcccacagatcctacccaaaccacaatctcgccgcggtctccaatgggagccgagccggtggacttctcgccgccgccgccgccggagccgacgctttcgccggagccggagatctccggcaaggacagaggagggaactggaaggcggacatgatgtcagctctcggggagtcggtttccttcggccgcttcctctcggagccgctcgaatgggggaagaggtccgccttcgcgcacaaccgctacctcgaggaggcggcggtgcaggcgcgcccgggctcagtcgcgcagaagaaggcattcttcgaggcgcactacgctaggaagaagcgcaagagcgaggaccacgccgccgccgccagtgatgatgttgcaggcggtgatggcgagctcgaggcggcagaggatggtggtgccgcgtcgtggtcgttgtctgctactgagtcttcctgcatgacggatgaaccaccggcaccagcagaggaagtgtgctgcggttgggaggaggacagagtggtggattgtggtggcagcgccagcgacaagccagtacacgtgccggaggagctcgcggacatcaccgatgccgttgggccctgttgcaggatggatgcgcccacggatgagacacagcacatggagggcggcgacgaagtggttggagcagttttgcccttgcagaagcaggatttgtgcatggatagtttgacggctgttgatgccactttgaaggaaatctctattttgaatcaggatatcacagattctgtcaagagaaggaggatccagatggcgtccctgcttccaaagccggcaaagctcagctctccccccacagcaaagaaagggcagaattcctcagctaaaagaaggtcaatgcggcattctgcaaaggagaataactcacctcctagtgcaggcagtaacaagctaagaacaacttcgacccccaaaaagaggtcaacgctgtcagccttgcatatgtctatgagtttcccgagatgtgaatctggcaatacttccatggcgtcaagaaatcttggtaccacaatcgctgctaggattagcgagttggaacatgcaaatgcaaccaagcctgcagaaaaaaacactaagcctcatgatttgaggctaccaagaaagaaattttccagcgctttaccagaaattgctccaaggacatctcaagtcgatgaagaaagatcatcacatataatgaaaatcaaagaaaagctatttggttcaacatttccaacactgcatcagaaatatggtataaccaaagaaaaagaggctactcaagaaatcctaagttcttcgaagtctggccatctatcaagggatattaatcaagcacaccaaacgggtaaagatgcacaaacgagtaaagatgcatctgatgccaaacaaatatgttgtttcccccttagaaagatgtattagatctattttatttagtgtttccattatatattagcctattcttttcattcatattcagtgacctatttgggacacctaatatgtagcaaggttatcttttaagccagcttggaggataacattctcaatccatccaatctcatggcataatgtttgtggtggtaatctagactaacttttcatggctttgaagtgtaatggttttgttttgagacagtgaactttctaaagctattaatccttgtaataaaaa

SEQ ID NO: 97025 - DNA, 1951 bp, Zea Mays
caaatcgaacccaccaccgaaagctgttgcaattacagactcgctgctttttcccggcctccctcactcacccgaattcgaaaaaccaatctgatacgcgtgctgcagatttccaccccaagggagtgtggcagctctcccacagatcctacccaaaccacaatctcgccgcggtctccaatgggagccgagccggtggacttctcgccgccgccgccgccggagccgacgctttcgccggagccggagatctccggcaaggacagaggagggaactggaaggcggacatgatgtcagctctcggggagtcggtttccttcggccgcttcctctcggagccgctcgaatgggggaagaggtccgccttcgcgcacaaccgctacctcgaggaggcggcggtgcaggcgcgcccgggctcagtcgcgcagaagaaggcattcttcgaggcgcactacgctaggaagaagcgcaagagcgaggaccacgccgccgccgccagtgatgatgttgcaggcggtgatggcgagctcgaggcggcagaggatggtggtgccgcgtcgtggtcgttgtctgctactgagtcttcctgcatgacggatgaaccaccggcaccagcagaggaagtgtgctgcggttgggaggaggacagagtggtggattgtggtggcagcgccagcgacaagccagtacacgtgccggaggagctcgcggacatcaccgatgccgttgggccctgttgcaggatggatgcgcccacggatgagacacagcacatggagggcggcgacgaagtggttggagcagttttgcccttgcagaagcaggatttgtgcatggatagtttgacggctgttgatgccactttgaaggaaatctctattttgaatcaggatatcacagattctgtcaagagaaggaggatccagatggcgtccctgcttccaaagccggcaaagctcagctctccccccacagcaaagaaagggcagaattcctcagctaaaagaaggtcaatgcggcattctgcaaaggagaataactcacctcctagtgcaggcagtaacaagctaagaacaacttcgacccccaaaaagaggtcaacgctgtcagccttgcatatgtctatgagtttcccgagatgtgaatctggcaatacttccatggcgtcaagaaatcttggtaccacaatcgctgctaggattagcgagttggaacatgcaaatgcaaccaagcctgcagaaaaaaacactaagcctcatgatttgaggctaccaagaaagaaattttccagcgctttaccagaaattgctccaaggacatctcaagtcgatgaagaaagatcatcacatataatgaaaatcaaagaaaagctatttggttcaacatttccaacactgcatcagaaatatggtataaccaaagaaaaagagagaaagatcaacaatgaacatgggtttaaagaatcacgacatagcttttgcttcaaagccacgctgttgccaaatttctatcgaagcaataaacaaccaaaggatacaagtcatcaggctactcaagaaatcctaagttcttcgaagtctggccatctatcaagggatattaatcaagcacaccaaacgggtaaagatgcacaaacgagtaaagatgcatctgatgccaaacaaatatgttgtttcccccttagaaagatgtattagatctattttatttagtgtttccattatatattagcctattcttttcattcatattcagtgacctatttgggacacctaatatgtagcaaggttatcttttaagccagcttggaggataacattctcaatccatccaatctcatggcataatgtttgtggtggtaatctagactaacttttcatggctttgaagtgtaatggttttgttttgagacagtgaactttctaaagctattaatccttgtaataaaaa

SEQ ID NO: 97026 - DNA, 99 bp, Zea Mays
ggaaaacacttttctccttttatatgatctcttacaatttaggtgttacatagatgcatcaaacaaaaatctcagcatgacaatgcagatataaattat

SEQ ID NO: 97027 - DNA, 321 bp, Zea Mays
atgtcatctgcacctgtagaattgtctgaagctgagactgaatactcagttaatgtcgtgaagcatatttttgatggacatgtgctccaatacaactgtaccaatacaattcctgaacaattgcttgaacaggttactgtttttgttgatgcttctgaggctgatgaatttttagaagttgcttcgaagcctttagaatcattaccatatgattctcctgggcagacctttgtcgcttttgagaagccagaaggtgtcattgctactggcaagttctcaaatatcctgaaattcattgttaaggaggcactaatatattga

SEQ ID NO: 97028 - DNA, 234 bp, Zea Mays
atggatagagttcttgcttggttggttgctccattgggcgatgacggagtacaccgctgcctgctgagatgcctaaagctcgagaccgtgcccggtaggccagatccgggctcctccagtggagtcgaccatggatctcgactccagaagctagatgtggaggtggcgatggtcctaggcgcgttagaggtggcggcagtgagcggctgtggacgggacctagcggtgcattga

SEQ ID NO: 97029 - DNA, 243 bp, Zea Mays
atgcctgggttgatgcttaggatgcagttgggacgtcatcatgttgacaaccaggacattaggatccatgagggcaagtgggttcgtgaagttgacaaggctgccaatgtgccaatgcaggagacaaagacaaccatggccatggcagcacaacagcagcggcagcaatttcagaggtcaagagctagtgccaaaggaatgatgtcatatgtgactgatttgtcgttctctggtgctagctga

SEQ ID NO: 97030 - DNA, 1186 bp, Zea Mays
cgcgtccacgcgcaaccgccggtgtcacgcatcgcgtagctacataattctgcaccatgcatcgccaccaccgccccgccccgtcctctctccatcggccatctctggcgcatgatcgaaccgcacgaccgaggcagcaagtgactcgcagacagcaccatgcaggcgatgcgtccggccgcggagggggaggcacaggagcaggcggtgagggcggaggcggacgaggtgaagagggaggtggcgaaggcgcacgaggaggaggaggcggtgcctgaggagaaagacgtggcggttgtaggggaagaggcggaggcggaggcggagacggagactgaaggcgaggcggaggcagaggtcgaggtcgaggccgaggtcgaggtggaggcggaggccggtgcatcgtctgcgaagaagaaccgtatccaggtgtccaccaacaagaagccgctctatttctacgtcaatctcgccaagaggtacatgcagaactacgacgaggttgagctctccgctctggggatggccattggtaccgtggtgaccgtcgctgagatcctcaagaacaatggcctcgccactgaaaagaagatcctcacatcaaccatcggcaccaaggatgaggcgaagggccggcttgtccgtaaagccaagatcgagatcctgctgtgcaaatcagagaacttcaacagcatcatgtcgagcaagaagtccgagcgcccgaagccgcccgccgaggaagagatcaaggtgtgatctatccgaccaacgaacttctccatcggccagcgcagcatgcatgcagagggccttcttccctagctagctagctagctaagctcccctgttccatttccagaggctggcagctcaccacacagctcagctcggattattgataatggggcatcgcggcagtctgattaagtactagtaaatcattcatgtcatgcatggcacattaattaccttattattagtccttgctgagatggatcagatcttgtgagttaagtaaagcatgcaagatatgtcgacagacactacatgagatgacacggttctacaactctaccggagtctctagtttgttctgcttctgcatgcctttggcgtaatgtaaacgaacgctaaggtttctgtaattttgctgctgtcgcgctggcagtttggttccagatgaacc

SEQ ID NO: 97031 - DNA, 2669 bp, Zea Mays
ctctccctctctcctcctttcgtctccttctcgcgtaagccttgccttgccctgccctcaaaatccctcacaaaatcatcacctccacccgccgcctctcccccaattctccccggcggcgcgccctccccgaggcaactcgaccgtgcggcggcggcgctccggctaatgcgcgtgctcccctcagcctttcctggtgattttgtgttatccgtgcgtcacacgtaactctgggtgccgtagtgttggtgaaactacctgcattgtgtgatcgagtttggcttcgtggactcttctggtactgatatggacgaagccccgggtaatcaggacaatctgccattccttggcaacttcactggagccatgttttatggggaacaatctgcagggtgttcttctctcgaggcagggtgggttcctatgagtgaaaggatccctgctcagcatgatatagcaatggcgcgaggtaactggaatggtctgggcataatggacaatgccaatttgtttgatgagcaggcattggtatctgcatttggtaacatgggattgagcctcactggtaatgctgctgctgattcttctgctcactctggcactgttggatccagggatggactcctttttgcagactctttgtttacatcggctgattacccaacaaatctgccacatcagccagcgtttggtcaagatgagtttgtgccttcatattatacggtccacaatgctggacacatgaaaacaaagtttggtgcacaaaatcctccaatgtacacagggatgcatggcacagataatgcgtttgtgactagaaccaatttaccgcaagctttgtctttccagcaacatcatattattgatacgcagccacagacatatgcaccttgttatcagcagatggactataaatttaagcggcatgatatcgatgccgagacgaattttttcatgcagccacagtatccttatcagcaatatccacaggctgctgatgttcattggatcaatagcaatcagtatggtgttatcaactcatcagacaagtatgcagctgcgcctcaccgtggagtgcctactgttcgtcatctgggacatggcagtcctgatatctacaggaatggtgctgtaattcctaatggaagtaaccgacggggtttgacacatgtgaataactgtccttttataagttatcctgactgcttatgtgaaacctgtgaatattgtcagattcatctatctgaaaatctcaaacgttcatttgcgctcagacatacacccaaatgttcatcagacgattgcatctctgataaagcgaaaagttcaccgtcatccttggattctgtggccatgaaatctgcccaactgccctatagttcagttgatgaagttgttggggaattgtaccacttggcgaaggatcagaatggttgccgtttcctccaaaggatatttattgaaggttctcgagaggatgctcgaaaggtctttgatggtgtaattgagcatatcgatgaacttatggtggatccatttggaaattatttgatacagaaaatatttgagaagtgcaatgataatcaaaagatgcatatactttatgaaataaccaaaatacctggccagctaattgaagttgcatgcaacatgcatgggacacgtgtggtgcaaaaggtgatagaatctattagtacctcagatgaagtgtccatggttgtatctgctctgagccacggtgccattactctgatgatggattccaatggctgccatgttgcagaacgttgcttgctgaagctgtcacctgagggcaaagcattccttgtcaacgcggccacgaaatactgcgttgagctagcaaaggatcggcaaggctgctgtatcatccagaaatgcatcgctcatgcgagcaaggagcagaggaacaggttactgtacagcatcacaactcgggctctcgagctcgcagaagatgagtacgggaactacgtgatacagttcgtgctggggctcggggttgcctgggcaacgaatgaggtactggacaagcttgagggcagctatgggtacctgtcgacgcagaagtgcagcagcaacgtggtcgagaagtgcctgagagaagcgccggagcgagaacgcgcgaggatcatccttgagctcatccacgaccccaggctgcttaacgtcctggttgataagtatgggaattatgtgatccagactgcactccgggagtctgagggtactgcggtggaggctgcgttgatccgagccatcaagccacacgccggcgctcttcggaacaacatgtatgggaagagggtcctgtcgaaagcctgcctgaagagcaggaagccctgatcccaacaatcccatgccgtcctgatcgcgctcaagtgtagtacaaatcctgtaataaggtagtgttatctaggaatggggaggaggaggagagtagtctgtggggtctggttggaggaggaatccacattttgggccagtgtagaacgatcccatgcgtgttgtagctgtagagttcttgggagagttcgttgcaaataagtaagcgttgtgtcgttgctacgattagtattacgtccgtcagacgatgctctgtatcttctttacattttcttacagcagtaaaatttccattttctggtaca

SEQ ID NO: 97032 - DNA, 113 bp, Zea Mays
aaaaaaattcttatctctctgttacagattttctgctctaacttaaacagactctttgacaagtatagcaacctcaaacgtaaaaactcacaacactaaagttgttgatctcg

SEQ ID NO: 97033 - DNA, 829 bp, Zea Mays
cccctttgtaaaagccgtgctgcgccactgctgccgctggaaccggtggtgtcgcgtctttgcagagcttctgcgcgatctccttgagcagcatcacctgcgccttctcggctcccatggacatgatggcttgcctcatggactcacggtctgcctccaacgcctgcatccgcacgctgaggcggcgcacctcctcgtcttctgcccacggagcgccgccgtagcagtcgctccccatgggcgtgctaccggcgtaggagccctcaggaaccgccaggggtgccccatgaatggcgtccacggtgtatacccggtcgctggcgccgcaatcgtcatccgggaagcagtcgccaccatcgtacaagtcaaggctgtcatccgagtaggcccgtgcatggtgcgggaaggcagaccccggcgcgacacggatgatgggcgtggtgttggtggcggccatcggggtcgcgccgcgctcgaggaggtggacacggtgggcgaggtggttgagctggtcgcgcggtgtctcgagcgcgtctgcttcggacgcggtgggcgggtggtcgatgctgcaccgcagaggcgggtagtaccctcctccggacgacgccgcgggggacagcgaggagggtgggtgacgcggcgtggccacagaggggcgtcgtggcgcctcgggtggggtccttcgcttcagcggcggccttgcgggggacacgctggccgccgcagacgtcgacggtgaaacggagaaggcagcggggtggccgcataaggggcagagcgagggaggaggctcgccgacgtcggccatggcggtggcgggggacgggac

SEQ ID NO: 97034 - DNA, 991 bp, Zea Mays
atgtgtttttaatatatgtatgtgggctgtacatgccctaatccaccatctcactcctgattccgacgccaaccccctgccctgccgccgtctctctctaacccgcttctccacctccctcacatcggctactctccgcgcgcctaccgttccgcgccgcatcggtgagtacctccgtcgcgcttacaggctaatctcaccctcacgtcctccgctcctccctttcccgtgctcggatttgggggtccagcggttccttgtccaccatgtttctcccatcatcgatgcggttttcggttctggaaaaaaaatgtaattgaattgaaagaactggtgttccgacccttggattgcaggattgggtggtcggggcctagtcgaggtttcgcgggacagcgtcggtccatggcggagcttgtgggaccgcgcgtctacagttgctgcacttgccggaaccacgtttgccttcacgacgacgtcatctccaaggcctttcaggggaggaatggccgtgcgtttctgttctctcatgccatgaacgtagttgtgggggcgaaggaggatagacacctcatgacagggctacacacagttgctgatatctactgtaatgactgccgtgaggtgttgggctggaagtatgtgagagcatatgaagagacgcagaaatacaaggaaggaaaattcatattcgagaagtcaaagattgtgaaggaaaactggtagtgcccccaagttgccaatcaccaaatgttctggtgaagatgaaatggccatttagtgtgcttttggatgtttgtgtccttgtaaatagcttttcctccgtggattgcagtgctaaggtgccccatgttcacgcctcagtgacaattgtaaagcacacacttgttcatgttcatttgtgtgaataaggtacttcatttggttatttggtatggaatggcctctaatgtgcataacatggtgggccctcaaaatttgttccatcctc

SEQ ID NO: 97035 - DNA, 799 bp, Zea Mays
atgtgtttttaatatatgtatgtgggctgtacatgccctaatccaccatctcactcctgattccgacgccaaccccctgccctgccgccgtctctctctaacccgcttctccacctccctcacatcggctactctccgcgcgcctaccgttccgcgccgcatcggattgggtggtcggggcctagtcgaggtttcgcgggacagcgtcggtccatggcggagcttgtgggaccgcgcgtctacagttgctgcacttgccggaaccacgtttgccttcacgacgacgtcatctccaaggcctttcaggggaggaatggccgtgcgtttctgttctctcatgccatgaacgtagttgtgggggcgaaggaggatagacacctcatgacagggctacacacagttgctgatatctactgtaatgactgccgtgaggtgttgggctggaagtatgtgagagcatatgaagagacgcagaaatacaaggaaggaaaattcatattcgagaagtcaaagattgtgaaggaaaactggtagtgcccccaagttgccaatcaccaaatgttctggtgaagatgaaatggccatttagtgtgcttttggatgtttgtgtccttgtaaatagcttttcctccgtggattgcagtgctaaggtgccccatgttcacgcctcagtgacaattgtaaagcacacacttgttcatgttcatttgtgtgaataaggtacttcatttggttatttggtatggaatggcctctaatgtgcataacatggtgggccctcaaaatttgttccatcctc

SEQ ID NO: 97036 - DNA, 1459 bp, Zea Mays
cggctcccctccacccatacgtaacacgttctcctcccacgcccccactaacaaatgccttcgcccttcgtgcgccacaacggaaaacccactactcgcgagcaagtgcaggcaccgttgcccatccattcatcgttcatgatcccagcctgcctccgcggcctctgcacctgcttcgacgtggacgacgacaaggctaacaaccacgagcaagagccgacgatggccgccgacgacgaccagacggcaagcaccatcatcgcccaccgcaccgtggagctgagcaccggcgtgcgcctgcacgtggcggaggccggcgcggcagcggcagcaggcgcgcccgcggtgctgctgctgcacggcttcccggagctgtggtacacctggcgccaccagatgcgggcgctggccgcggccgggtaccgcgccgtggcgccggacctgcgcgggtacggcggctccgacgcgccgccggcgcggggcgacgacgacgacgacgatccggccgcgcagtacaccgcgctgcacgtggtgggggacctggtggcgctcctcgacgcgctcggcgagagccaggtgttcgtggcggcgcacgactggggcgcgctcgtggcctggagcctctgcctgttccggcccgaccgggtgcgcgcgctcgtcgcgctcagcgtcgcctacacgccccgcagcgccgcgcggaagcccgtcgacggcctccgggcgctcttcggcgacgactactacatctgccggatccaggagcccggggaaatagaagcagaatttgcacgccttggcactgagttggtgctcaagaaattctttagttatcgctcccctggagctttgttcttcccaaagagtggttggggctcaccagatgatgaagtacctttaccgagctgggtaacagaggaggaccttaaatactacaccagcatgtttgagaagaccggcttcactgggggactcaactactaccgtgccctaaataagacatgggagctcacatcaccatggactttagctaagataaatgtacctgttaagttcatcattggagatttggatttgacataccataatcctggcatacaagatttcattcacaagggtggcttcaagaagttcgttccacttctcgacgatgatattattgtcatgaaagatgttgggcattttatcaatgaagaaaaaccaaatgaagttagtgagcacataatcaacttcataaagaaatttggttgactatagttccttaaaaacgccatgtggtgttataaatcacataattgcccacaataatacaaaatttggaattatttttaaactgttggcttgtggaatgtaattcatgttcaaatcttgttcaattgatattacctttcttgttgccattgtatttgtgtgaagcattaaatttatttaagaactgtggaatgaagtttaatgttatgat

SEQ ID NO: 97037 - DNA, 1553 bp, Zea Mays
ggcgcacagtcgcgctcgcgcacccagtcccctccaatccgtggcgcgcacccatcagaaagcctgagcctgactaccgaccagtgacgagccatggagctccgcgagctgggcggtacgggtctccgcgtcagcgccgtcggctttggtgcctctccgcttggcaacgttttcggggacgtgccccgcgacaccgcccgcgccgccgtccgccgcgcgctcgacctcggcatcaacttcttcgatacctcaccgtactacggtggcacgatatcggagtcagtcctcggcgattgcctccgccacgcggccgttccgcgggaccgagtcgtcgtcgccaccaagtgcggccgctacaaagacgagggtttcgacttctccgccaaccgtgtgacacgcagcatagacgagagcctcgcccgactggggctggactacgtcgacatcctccacgctcatgacatcgagttcacccatctcgaacagattgtgaatgagacaattcccgcactccagaagatcaaggagaatgggaaggcacggttcattggcatcaccgggttgcctctcagcatctacccttatgtcctcgaccgtgtagcaccaggctcggtggacgtgattctatcttattgtcactacgggatcaatgacacctcccttgttgatctgctcccctacttgaagagcaaaggtgttggggttatcagtgcttcgcccctctccatgggtcttttaacagataatgggccaccggagtggcaccctgcaccagaagaacttaagtcagcatgcaaggctgcagcagatcactgtagaaagaaggggaaaagcattacgaagctagctatgcagtacagcttaatgaacaatgaaatctcgacagttcttgttggaatgaactctttggaacaggtggaggagaatgtggcggctgcactggagttgtcaacatcaggcatcgatgaagaacttatgcgtgaagttgaagcaattctcgagcctgtgaagaatctgacatggcctagcggcatccaacaagcctgacggccagaagcagctttgcctaactggagaagctggcatgatgagcgtataactgctgttcgatgcagtcaattgtgcacaccagcatcattggctgctgattgcaaaatttgcaatgcccgtatggtcattgatggaaggggacgattgggactgttgggcttttatggttgggccctgtggtaatttagacatgtcgaataaacgcgatacgagcaatgaaagatcgatgctgatcattgaataagcctttcccatacggccatacatctagggtggagtaaaacacctgttagttttgctgccagacaagcaattgcgcacccctcttagtgttgtttggttcacataatttagtgttgtttggttcacataattgtacgggtaatcgataacgttaaatcatatttgtttaaatccaaccgtaattaaatatcacactagaacctgatattgatctatttaaatttgttaccgctgtcactcgagcatgaatcattactgtt

SEQ ID NO: 97038 - DNA, 1507 bp, Zea Mays
accacgctccaaccggacgcgcaccgcatcgtccgcgcatcccactccccaaagatgccaccagcgactccgtgaggccgtcgtcgccgccccatttcacttcccactgccgccttcgccaccgccgctccactgcaccaccactccagtctacccgtacacgcactctccgcggtccacgccatggcctcccagctccgcctccaccttgcggctacaccgcctctccttcctcaccgccgtccgcacctcgcgcggccgctctgccccaccctaaacccaatccgagcgccgctcccccctctctcacgcgttctctcccacgctcgtcccgcccgtgcggtcgggggaggcatcgagccgaaggagggcgttgttgcggagggagacgagtctggcggagggcccgtgctcgtgggtgaggattcggctgcgttcgagctcaaggaccagagcgtggcgtcgtgggcttacttcgccgggatactaggtgcggtgctcgttgcgctcaacgtgctgtggatcgaccccagtaccggggtcgggaccaaattcctcgacgctgtcgcctccgtctccgacagccacgaggttgttatgttgctccttaccataatttttgctgtagtccatagtggtatggcaagcctacgggaaagtggtgagaaaatagtgggggagcgtgtttaccgtgtgctgttcgcaggaatttcactgcctttagcagttactactattgtatacttcataaatcatcggtatgatggtactcaattatggcaagttcagggaatcactggcattcatgagcttctttggttctcgtcgttcatttcgttcttctttctgtatccatccactttcaatctcttggaagtggcagctgtggacaagcctaaattacacatgtgggaaacaggaataatgcgtattaccagacatccacagatggttggtcaggtaatttggtgccttgctcatacactatggattggcaactcagttgccgtagcggcctctgtcggacttatcagccaccatctctttggtgcttggaatggtgacaggaggctgttgtcacgctatggtgaagccttcgaagtactgaagaagagaacaagtgttatgcccttcgctgcgatcatcgatggacggcagaaactgcccaaagattatcacaaggagttctttcggttaccatatgtagcaatcacaatgttaaccttgggtgcatactttgctcatccattgatgcaagcatccagctaccaacttccctggtagtgctataaacctatatacatatatgctcagtgctggaactgaaaaaacatgaccagatcaaaaagaagagaaatatgtgctcctttggtatacatagttgaatgcataatcttatgtgtacaaatgtacaattatttatattattaacggaactttttgtatatggcattggtcaaaacttttatctatgatataccacaaaaaaattcatatcctgatggtg

SEQ ID NO: 97039 - DNA, 504 bp, Zea Mays
atgccgccgtcgccgcggcgcttgcgacagcctcgtcgttccaggcggcgtacctccacctgcaggccgcccacgcgccgttcctgccagatgcggcggccgccgcggacgccgccgctgtgtcgcacctccggaggctgtcggagctcaagcggatcgcgcgtgccggacggtggttgggccctcgcggcacacctcgaggtccaagtgcgcgagaaccaggcactgctgcggtcgttcgacgccgtggtgaaccgcctacaggccgcgctcgacgtcaaggacgccgcggccgccgcgctgcggctggacctcgaggcgctcgacgacgccaacgcgcggctcgcgggccgcctcgaccgcacgctcgcgcctccgccgggcggctccgcaatccgaatcacgcacgcaacctcggcggctccgcgccgtgaatctgcgccgaatcagaggcctaaatggtgggtcccgctgaagaaggatccgttgtggtgcggcacctga

SEQ ID NO: 97040 - DNA, 1966 bp, Zea Mays
cagacaataatccgctacggccactccgtcgcgcacccccaccagcagcagttacccttttggcttttgcgacgcgcacagacgaatcggaatttgatgcggttacacgcctgagagcgagcggtggccggcacgcatggcggcagagaagcaggcggcgatggacgggcggaaggacggggtggcgcgggaggtcatccggatggaacgggaggccgtcatccccatcctcaagcccaagctcgtcatgcgcctcgcgtatctcatagagcatgaagctgatcggaacgagttcctgaagctgtgcaagaaggtggagtacaccatccgggcctggtacctcctccagttcgaagacctcatgcaactgtactcactgtttgatcctgtttctggtaaggagaggttacagcaacagaacctgacgccggaagaaatcgagaccctcgaattcaatttcatgacatatcttttccaggtgatggaaaagagcaacttcaagttgctatcagatgaagagtttgatattgcgcaatctggaaaatatttgttgaatcttccgatcaaagttgatgaatctaagctagacaagaagttgttgacaaaatattttaaagagcacccacatgacaatctaccagagttttcaaacaagtatatcatctttcgtcggggcattggaattgatcgaacaactgactactttttcattgagaaagtagatgtaatgatatcccgagcttggaggtcattgctcagggttaccaggattgaccggttattttctaagaaacaacatttgaagccaaagaatggtacgaagaagactgatgaaattaatgaagatgaagaagatccagaattgtttgttgagagaattcgattagaaaaaattgaactaagtttgaaaaatctcatgagtaagatgacaattcaagaacctacattcgataggatgattgtggtgtacaggagggctggtacaaagactgaacctgatcggggaatatttgtaaagcacttcaagaatatcccaatggctgacatggaaattgttcttccagagaagaaaaatccgtcactaacaccaatggattgggtcaagtttctcatttctgctgttatcggtttggtcactctagttggctctcttgaaatgccaaaggctgatgtatgggttgtaatagcaatcttgtctggtgtgattggatactgtgctaagatatacttcacatttcaacaaaatatgacaatgtatcagaatttgattacaaaatcaatgtatgacaaacagcttgatagtgggaaaggaactcttcttcacttatgcgatgacgtgatacagcaagaagttaaagaggtcataatttgttactacattttaatggagcagggaaaagccactatacaagatcttgatttacggtgtgaagagctaatcaaagaagagtttggcgcagattgcaattttgatgttcatgatgctataaagaagttagagaagcttagcattgttcatcgggattcgattggaaggatcttatgcgttccgttgaagcgtgcgaatgagatcattggtacgacgaccgaagaactggtgatgcgagcacaacagaaccttgcttcctgattccatttccagtcacgatggattgctgtaccttccctgtcatctccctgcaaagcgcgcaccagaggggaagcttagcttctgatcatcccggaagtctattcctagtctcatctccctgcaaagcgcgcaccagtaataaggaggaagctcctggtcatcctggaagtctattcacctgtacatgtgtacgtgtgtatctttgcattgcagtgccttccctctcgtttggtttagcacggagtgtatatgtcaaaccctgctgttacacagttgtacataacaattatatgtattttttaaatatataacagtacaaattcgttagttctccct

SEQ ID NO: 97041 - DNA, 535 bp, Zea Mays
agtcgacaatcaaagtaagttgcatggtgtactaaaccgcacagttcacgatctgcacagcacgagtaataaggctttccttttgtcgcaggattcgattggaaggatcttatgcgttccgttgaagcgtgcgaatgagatcattggtacgacgaccgaagaactggtgatgcgagcacaacagaaccttgcttcctgattccatttccagtcacgatggattgctgtaccttccctgtcatctccctgcaaagcgcgcaccagaggggaagcttagcttctgatcatcccggaagtctattcctagtctcatctccctgcaaagcgcgcaccagtaataaggaggaagctcctggtcatcctggaagtctattcacctgtacatgtgtacgtgtgtatctttgcattgcagtgccttccctctcgtttggtttagcacggagtgtatatgtcaaaccctgctgttacacagttgtacataacaattatatgtattttttaaatatataacagtacaaattcgttagttctccct

SEQ ID NO: 97042 - DNA, 177 bp, Zea Mays
cggctttgtcctctatgaaaggaggtacagccttacaaacaaagtaacatcaaaagatcaacactcccaacatagagtgcaatcttacaccacaattcttaaaataaacacgacacccaacagacatactataacctcaatatgtaatcctgttcgtaaaactccaaccaaaataag

SEQ ID NO: 97043 - DNA, 444 bp, Zea Mays
gagattacctgccgagggcagcgcctccaaccgacgatgaccctgcagcaggtccgcgacaccatttggcggccagcagtgccggctgaggccgcagcggttttgccggcccccggctcacggagcactgaccacatcatgacgctgcattactgcaggagctagcatgcgcctctggccggtggtgagcggagcaacgagaggcacagccaacttaattttcacgctgtaattaattagatttttcactgcccactgcaggcaggcactgatccccccgttttttccccctccgcccctaacatctaatcctcctcaccacagagttcacagagaaagaagaacagtagaacaccaaggatcaatatatagtgtaacaccacccaaatgtaacttattttacttcaaaaccctgaggaattattcattcatatttattcagtt

SEQ ID NO: 97044 - DNA, 557 bp, Zea Mays
atggctgctgccggtggcggtgctagagcggaggcagggctgcgtaagttcctcgtggagcatcagccgtgctgcaatgccacggtgcccaaggggagtgttgtcgacggtggcaagaggaaagtggcggcggcgggcgtgccgacggagccgaggtacagggacgcgcagaggagacggcctagggggcggtactcggcggagatccgcgatcaacataagggcgtgtggctgtggctaggcacgttcgacactgctgaggaggcggccaggaggtacgacagtgaggcgtgccgactccgcgggccgtcggagaacaccaacttccttgcgacgcttgattatcgtgtcccgcttccggcgctgtcgctgcacgccttgctgccatgtgtaagaacactagtatggatcggggttgagcgctactcccagcactcgaagggtatcgtggtgttacacgacgagtccaccgcaagctagatgcaactgggcccgagttcctcccctcgtcccccttcatcattattccttacataatacataactccttctatcga

SEQ ID NO: 97045 - DNA, 1541 bp, Zea Mays
accgcgcctcgaaggttcttgctcccgaaggcaccggccgacgcgtcaccgcactgcaccgcaccggctataaaaactttcccttctcgccgcccgtcccgccaatcagccccatcactcttccgtcgtgtcttctcgcgctttccactcccaacgagatccatcacccccaacctctgtaagcttcccttgacgtcgtcgtcgtcatccatggagagcaaggacggtacccacgatcccgccacgacggccgcgccaccggccggcgcgccgcagcccgcgatgccttccgcggagacggcgcggtggggcacgcggcagatgggcccgccggcggcccccggggcgcacccggagaaccaagaggcggcgcggtggacggccgcgcgcggggaccaggagctgccgccgtacgtcatcatcggtgagcccgtggcggcgccgccgccgccacagcataggggcaagggggacagccccatggagcacatcctcgacttcttcaacacctggagccgcaaggccgaggagctggcctccaacatctgggtcaatctgaaggccgcgccatccatgtcggacgccgcgatggggaagctaagcctcggcgcgaaggcgctgtcggagggcggcttcgagaagctgtacaagcagacgttctcgtccagccccgacgagcacctgaagaagacgttcgcttgctacctctccacggccacggggcccgtcgccggcacgctgtacctgaccaacctgaacgtcgccttctgcagcgaccgcccgctctccttcgccgcgccgtctggccagaccgcctggagctactacaaggttatgatcccccttggcaagatcgcgacggtggagccggtgacgatgaaggagagcccgccggagaagtacgtccacgtcgtcaccgtcgactcccacgacttctggttcatgggcttcgtcagctacgacaaggccgtgcactacctcgtcgaggccgtctcccagcgcggcgtcgccactgccggcggcaagtgatgaggcgacgccgctccggagactgggcgttcggcacccgtcgtcgtgtatatataatatagctgatggctctgcctgtgcattactcgtgttctgctactactagcactacgatggtgtcccggcgtgtgtttgaatgttctcagtgtgtgtgtgtgtggcacagatgcgccactgctattctatgcacttgtgagtattatgctagctttcacggactcgtcgagaaacgagagtgaagttcttcctgtctgcagcacctacatcgagctcggactgtggtagaattacgaattcactgggcagatacgaatcgatcctaaatccttgccggcgggtaatttgaatgaatcttaatttgtgtacatgcagaatggctcattttgagcactcatacttctttaaagctaaagaagcactagtttcgtttattctttacttaattgtgtccacgcacgacacgttctgttactcctcgtttctcgtcttcgtgagaaaccacgacaaataag

SEQ ID NO: 97046 - DNA, 1772 bp, Zea Mays
ccccgcttcctcctcctccttccgtctaggcccggttgagtctccctcacgccactgcaactgcgaccctcccacactccactctcctcgccttccttcctcctcgtcgccgtctcctactataaatcgatccccgtcgtctccctcctcctcccccctcgaccacgcacgcaaatgaaagcgctcccctcgattgggcggcacgtaacccaccaccaccaatacccggacccatcaagcaagcgctgcgtcgtcccctgcaaagaccgcgcattccgtgcgtgccgtgtccacgcgcgcgcgcgcgcggtggcgttaagttgtcgagcgccagaggaggagcgccactagtcgtcggtcgatttgacccaggcgaggaggcgtaggcgtaggcgtaggcgcgtaggggagtctagctagctactggtgttgggtcgctagcttccgacgatggaggtgaagaaggagggcgcgaaggcgacgctgccgccggggttcaggttccggccgacggacgaggagctgatcgtgcactacctgcggcggcgcgcgctggcctcgccgctgccggccgccgtcgacatcccggacgtccgcatcctggcgcacgacccgtccgacctgctgcccccagggttcggcgagcaggagcgctacttcttcacgtgcaaggaggccaagtacgtgaagggccggcgcgcgaaccgcgccacgggggccgggtactggaaggcgacgggcaaggagaagccggtggccgtggcggtccggggcgtgcaggggcagggccagggccagggcgtgctggtgggcatgaagcgctcgctggtgttctaccgcgggaagccgccgacggggagcaagacggagtgggtgatgcacgagtaccggctggcgggcgccgggctcgcgccgtgccgccgccgccacgccgacgccgacggagacggcgtggcgcgggcgccggccgagggctgggtgctgtgccgcgtgttccggaagaagggctccgccgccgtcgcgaggcggcccggcgaccgcagcgacggcgagggcgacgagagcgcgggcggcggtggaggatgcggcgggcgcgggttcatcgacttcttcgcgcgcgcggacgccgccgggcgaaggcgccgcgctccgtcgcccgccgtgtcgagccggtggcttgcggacgcgtcgccccagccggagcaggaggccaccagcagaggcccgtgacgagacaagggccggccggctggctggcgtgaagcgatcaagcaaggtagagagagagagagagggaagcttttgttgcattggcagtacctaatgaggggagggtccagtacagtaggtaggagcaaagtgaattcgttttagcaacgtgagagagagaggcccgatagtcagtgcagtatcagttgttgagcgtagatggtgaaactaatgtagcagctcagttgtactcctcccaaccacctgatgaatcctacacaattgtagagtgtggctgcagcaaatcccggccatggcaccggagctcctccaggaacgcaagtccaccagctgctgctgctgcttgccatggcggtggcggattgctagtgctaatgttccacaggctgttgattgctgagaagcaagtggcgggggtggtggcgggcagcagacggaagatggcgggtgtctgatactggtggtggtggtagtagtcgtgcgtaatctgttgcctggacttggacttggtttctttaatgcaattatgatgatgaagtgaa

SEQ ID NO: 97047 - DNA, 851 bp, Zea Mays
aactgcgaccctcccacactccactctcctcgccttccttcctcctcgtcgccgtctcctactataaatcgatccccgtcgtctccctcctcctcccccctcgaccacgcacgcaaatgaaagcgctcccctcgattgggcggcacgtaacccaccaccaccaatacccggacccatcaagcaagcgctgcgtcgtcccctgcaaagaccgcgcattccgtgcgtgccgtgtccacgcgcgcgcgcgcgcggtggcgttaagttgtcgagcgccagaggaggagcgccactagtcgtcggtcgatttgacccaggcgaggaggcgtaggcgtaggcgtaggcgcgtaggggagtctagctagctactggtgttgggtcgctagcttccgacgatggaggtgaagaaggagggcgcgaaggcgacgctgccgccggggttcaggttccggccgacggacgaggagctgatcgtgcactacctgcggcggcgcgcgctggcctcgccgctgccggccgccgtcgacatcccggacgtccgcatcctggcgcacgacccgtccgacctgctgcccccagagtgtggctgcagcaaatcccggccatggcaccggagctcctccaggaacgcaagtccaccagctgctgctgctgcttgccatggcggtggcggattgctagtgctaatgttccacaggctgttgattgctgagaagcaagtggcgggggtggtggcgggcagcagacggaagatggcgggtgtctgatactggtggtggtggtagtagtcgtgcgtaatctgttgcctggacttggacttggtttctttaatgcaattatgatgatgaagtgaa

SEQ ID NO: 97048 - DNA, 259 bp, Zea Mays
tcaggaattccactactatatgtgccacttgaagttgttatgtcaaaatattatggtgaaagcgagcgtctattgggatctgttttttatcttgcaaatggtcttcctgaaggaggtaatatattcttagatgaggtatatatcgtaatccttatagcatacacactcaagccattgcaaaatgtattgaaaataattattgtgtgtatgtgcgtgttgagacaccaaaattcatgaagctacacgaacgatcttgtcc

SEQ ID NO: 97049 - DNA, 331 bp, Zea Mays
tgatgtcaacgacagcaaccggtgcaatgcattccattacattacattacatgcagaagacaatagcaatatgagcatgtgcagactgacctaggcatgatgcagaatagaggaaaaacaaccaggctcaaaatgttttttttttcctctccttccagaagtaacgtggaaacaacgaaaatcgatggaattcaggagggcgcaaaggtgctcggaactgatgtaagcaggagagaggaggggggggggggcagcaaagtcaaggcttcagcttatcaagcataggtaggtcacaggacctgctccagttgtgctccaagctactgttgtt

SEQ ID NO: 97050 - DNA, 289 bp, Zea Mays
atgccgcccctctgcaagccctcacagcaagctctggtgagtcctgctccccctctcccgccctcacagcaacatgagccgctcctctgcaagccctcacagcaagctctggtgagtcctgctccccctctcccgccctcacagcaacctgcgctgcccctctgcaacatgcctaatgatgatgaagaaagtggatgactttggtgaatccccacatagcaatccaaatcaagctggtgctggtggtgaagaaaatgcaatggatgatcttgatttgggagatatttag

SEQ ID NO: 97051 - DNA, 1330 bp, Zea Mays
cagaaacaacgcagagaactcagagctcttcgtgccctcctgcaagcgccaaggaggaagagaagtgtgcgtactgcgtagttccatagacccggacaaaccagcgccatcatacaacaccagcaactgttggtttagttgtatatctgccttgcagccgtattatctgtatcaccctttttgtgtcgcgatggctggcctatctttggaacatccttgggcgttcgccttcggcctcctaggcaacgtcatctccttcatgaccttcctagccccgataccgacgttctaccgcatctacaagagcaagtcgacggaaggtttccagtcggttccctacgtggtagcgctgttcagcgccatgctgtggatcttctacgcactgatcaagtccaacgagaccttcctcatcaccatcaacgccgccggctgcgttatcgagaccatctacatcgtcatgtacttcgtctacgcgcccaagaaagccaagctgttcacggccaagatcatggccctcctcaatggcggcgtctttggggtcatcctcctgctcacccttctcctcttcaagggtagtaagcgcgttgtgctgcttggctggatctgcgtcggcttctccgtcagtgtcttcgtcgcgccactaagcatcatgaggcgcgtgatccagacgaagagcgtagagtacatgcccttctccctctccctctcgctcaccctcagcgccgtcgtctggttcctctacggcctcctcatcaaggacaaatacgtcgcgctaccaaacgtccttgggttcatcttcggcgtggtccagatggtgctctacgtgttctacatgaacaagacgccggtggcggctgccgtgggcaaggatgccggcaagcttccctcagctgcagacgagcacgtcctcgtcaacattgccaagctcaaccccgccctcccggagaggacctccgggatgcacccagtcacccagatggcggccgttcctgccaggagctgcgctgctgaagcaatcgcgccggcgatgctgcccaacagggacgtggtcgacgtcttcgtcagccgacacagccccgctgtccacgtggtctagcttctccatcatcgcaagcaagcatgaatcgagtcgagtccgaacgcataattaagcacccaatctattggatatataaatacgcgcgccccaacatgtgcgccatatagccgtttattccaacccttagctttgtttaattctcaaatatgcatttgaagtaatgtactttcatgcaaccaggaatttcattttcccctccaaaataaccataagaattttctatagcacgtt

SEQ ID NO: 97052 - DNA, 1319 bp, Zea Mays
cgcagctctcacacgagctctgtctgtgtgaagatgaggaggcgctgcaaccagctggggctgcctctcgcgctcttgtttgccgctcttcttggcggcgcgcaatgccagagctctcacggtggtggcggcgccgccgctaacctcacggtggtgggcaccgtgttctgtgacgcctgctccaccagctccttctccaagaatagctacttcttgccaggtgtccgagtccggctggactgcatgatcaaagtgaactcgaactccaaggaggagatcaagatcacggccgagaaggtgaccaacagcgacggcgcgtaccagctggacatcccggcgatcgacggcttcgagtgcgcggcgcccggcgcgaccgccggcgagtccttctgccgggcggccgtgctggacaacccgtccgcgctgtgcggcgtgccggccgtgaccaccacggtcggccacatctctctgccgagccaggaccccagcgcctgcttctacagcctcaactcgctctactaccgccccagcaagccgggcccagctcagtgcggcggcgccgccggcctgtcaccgcctgcggcggcgctgaacacgtccctgttctactgcccgccgtggccgtggccgcccatcccgttctgcacgccgcggccgtggttcccgcccataccgttcttcaccccgccgccgccggcgttcccgttcccgctgccaccgctgccgttcttcaccccgccgtcgcctccgccaccggcgttccctttcccgctgccaccactgccatggacgacgccaccgtcgcctccgccgtcgccttcgttcccgtttcctcatctgccgccgatctttacaacaccatcgcctccgccaccgccgccgccacaattcccgttccctatgccaccgcttccacacctgcctcctctcccgcacttcccaccgctaccgtcactttactcaccgccacctcctccacctccaccaccgcctccgccgccgtcgttcccgtggacgtttccgccgttaccgtttttccctcctggtcctggttcgtctgggccatctcctccaccgttgatgagtggttctcgtaaagatccaaccacttggtctccttccaataaacaaccatgaagtaaataatacttggctccttctgggaaggataatgtgcattgcaaaagactatgttatatgtattttttttctgttttatatccctgagctgtatggatacgaatgtaagtttctgcttgcccccgatacgtatatacataaaattcctaggttttgaacacaatgcaatacaaacttgc

SEQ ID NO: 97053 - DNA, 1563 bp, Zea Mays
gcctatataaagccacccacagccctgcctatcattgcaagagtttgagccaacacacacagagagaggacaactcctcacaactctcccttccctcctgtaggggccaaaagggttagagagtaggagaagtagttccctagcccaacacaagaaaaacaagctcgatctcctcatcaccctaatccaagcaactgctttgtgtgttgggaaattcttgtgacccctgttatattattatccgtgtagctactagcttcattcccccctttgtacccatcaaatggctggcatgtctctgcaacacccctgggcgtttgctttcggtctactaggtaacgtcatctccttcatgaccttcctggccccgataccgacgttctaccgcatctacaagagcaagtcgacggaaggcttccagtcggttccctacgtggttgccctgttcagcgccatgctgtggatcttctacgcactgatcaagtccaacgagaccttcctcatcaccatcaacgccgccggctgcgtcatcgagaccatctacgtcgtcatgtacttcgtctacgcgcccaagaaagccaagctgttcacggccaagatcatggtcctcctcaatggcggcgtctttggggtcatcctcctgctcacccttctcctcttcaagggcagtaagcgcgttgtgctgcttggctggatctgcgtcggcttctccgtcagtgtcttcgtcgcgccactcagcatcatgagacgagtgatccagacgaagagcgtggagtacatgcccttctccctctccctctcgctcaccctcagcgccgtcgtctggttcctctacggcctcctcatcaaggacaaatacgtcgcgcttccaaacatcctggggttcaccttcggcgtggtccagatggtgctctacgtgttgtacatgaacaagacgccggtggcggcgactgccgagggcaaggatgccggcaagctttcctcagctgcagacgagcacgtcctcgtcaacatcgccaagctcagcccagccctcccggagaggagctccggggtgcacccagtcacccagatggcgggcgttcctgtcaggagctgcgctgctgaagcaaccgcgccggcgatgctgcccaacagggacgtggtcgacgtcttcgtcagccgacacagccccgccgtccacgtggcatagattctcgatcgatcgcgtgcatggcccatgcatgcgcccgccacacgtacgctagcttttatatattcgaaggacgacttgctgctggtcgtgagcatatatatgatggagaaaatgattaagtagtatatatataagtaattaactgccatgcatggaagctagctaatggatggaggcagaggccagaacgatgaagggggaagctatacatatatgtgtgtaattaatatagatatatgggctttgtgttcatctttgcagctatgtattaatttgcatggatatctgttattcctttttatgtgtaacgtcttctaataaaatgtaattgaacccacactactgttgttagctaccacaagtttccc

SEQ ID NO: 97054 - DNA, 2294 bp, Zea Mays
agtccacaaagcccagcaagcagcccaaccgatcccaatcccaaattcccaacacgaagcccagccagcccttccccactaggctagctagctagtagtatcttttttagtacgtggccagccgacaggcgcttgtcggagtcgagcacttgagtccccttctctccttcccttcacctcccgattgccgccgccaccaccaggcaccaggcccaccaccgcgtctcccaaccccaagcactcgacgccatggtgtcggatgccagcaagaagaaggccgcccagaagaaggccgccgcggctgccaagaggggaggcaaggccgcggcggcgtcctcctcgtcgtcgtctgcggccgcggccgcggccgtcgacaaggcggcgaacggcgtcgcggcgctcaagctatcggaccggacctgcaccggcgtcctcgcgtctcacccgctctcccgcgatatccacatagagtctctctctttaacattccatgggcatgaccttattgtggattctgagttggagctgaactacgggaggcgatacggtttgcttgggatgaacggctgtgggaaatctactcttctcacagcaataggctgcagagaacttcctatccctgaacacatggacatataccatctaagccatgagattgaagcttctgacatgtccgcactgcaagctgttgttacttgtgacgaagaaagagtgaaattggaaaaggaagctgaaattttggctgcacaggcgagctcctggaatcacagaattgttactttcatatgttccttctctatgtactgcctttttcatgttgcaaactataaattaaagctggttgcatttttaggatgatggtggtggtgaagctttggaacgtgtttatgagcgtctagatgcaatggatgctggaactgcagaaaagcgggctgctgaattattattcggtctgggctttaacaaacaaatgcagacaaagaaaactaaagatttctctggaggttggcgtatgaggattgctttggcaagagcactttttatgaatccaacgatccttttgcttgatgagcccacaaaccatctagatcttgaggcttgtgtctggttggaagagacactgaagaaatttgaccgcatacttgttgtcatatcacactctcaagattttctaaatggagtgtgcactaacattatccatatgcaaagcaagaagctcaagttatacactggtaactacgatcagtatgttcaaactcgctctgagcttgaagagaatcaaatgaagcagtacaaatgggagcaggaacagattgcttcaatgaaggagtacattgctcgcttcggtcatggttctgcaaagcttgctcgtcaggctcagagcaaagagaaaactcttgcaaagatggagcgaggtggtctcacagagaaggttgttagggacagagttctagtgttccggtttacagatgttggcaagcttcctccgcccgtgcttcaatttgttgaagtcaagtttgggtatacaccagataatctcatatacaagagccttgactttggtgttgatcttgactctagaatcgcattggttggtcccaacggggcagggaagagcactcttctgaagcttatgactggtgaccttgttccattagatggcatggttcggcgccacaatcacctgcgcattgcgcagtaccatcagcatctggcggagaagctggacctggacatgtcagccctggcttacatgatgaaggaataccctgggactgaagaagaaaagatgcgtgccgctgttggcaggttcggcctgtcaggaaaggcgcaggtgatgccgatgaagaatctttctgatgggcaaaggagccgcgtcatctttgcatggctggcatataggcagccgcaactgctactgcttgatgagccgacaaaccatctggatatcgagaccattgactcactggcagaggcgctgaatgagtgggatggtggtttggtcttggtgagccacgatttcaggctgatcaaccaggtcgctcaggagatctgggtgtgtgagaatcaagaggtgacaaggtgggaaggcgatatcatggatttcaaggcacacttgaagagcaaggctggtttatctgattagaatgcttttctagtaaccatgaactttttaactctgtatgatgaagtccctgttttacagtagcgaactatcaaatatactcgaatgtgtcagactcctacttccctcgcaaccatactaccttgtactacctgaaatttttatttat

SEQ ID NO: 97055 - DNA, 2428 bp, Zea Mays
agtccacaaagcccagcaagcagcccaaccgatcccaatcccaaattcccaacacgaagcccagccagcccttccccactaggctagctagctagtagtatcttttttagtacgtggccagccgacaggcgcttgtcggagtcgagcacttgagtccccttctctccttcccttcacctcccgattgccgccgccaccaccaggcaccaggcccaccaccgcgtctcccaaccccaagcactcgacgccatggtgtcggatgccagcaagaagaaggccgcccagaagaaggccgccgcggctgccaagaggggaggcaaggccgcggcggcgtcctcctcgtcgtcgtctgcggccgcggccgcggccgtcgacaaggcggcgaacggcgtcgcggcgctcaagctatcggaccggacctgcaccggcgtcctcgcgtctcacccgctctcccgcgatatccacatagagtctctctctttaacattccatgggcatgaccttattgtggattctgagttggagctgaactacgggaggcgatacggtttgcttgggatgaacggctgtgggaaatctactcttctcacagcaataggctgcagagaacttcctatccctgaacacatggacatataccatctaagccatgagattgaagcttctgacatgtccgcactgcaagctgttgttacttgtgacgaagaaagagtgaaattggaaaaggaagctgaaattttggctgcacaggatgatggtggtggtgaagctttggaacgtgtttatgagcgtctagatgcaatggatgctggaactgcagaaaagcgggctgctgaattattattcggtctgggctttaacaaacaaatgcagacaaagaaaactaaagatttctctggaggttggcgtatgaggattgctttggcaagagcactttttatgaatccaacgatccttttgcttgatgagcccacaaaccatctagatcttgaggcttgtgtctggttggaagagacactgaagaaatttgaccgcatacttgttgtcatatcacactctcaagattttctaaatggagtgtgcactaacattatccatatgcaaagcaagaagctcaagttatacactggtaactacgatcagtatgttcaaactcgctctgagcttgaagagaatcaaatgaagcagtacaaatgggagcaggaacagattgcttcaatgaaggagtacattgctcgcttcggtcatggttctgcaaagcttgctcgtcaggctcagagcaaagagaaaactcttgcaaagatggagcgaggtggtctcacagagaaggttgttagggacagagttctagtgttccggtttacagatgttggcaagcttcctccgcccgtgcttcaatttgttgaagtcaagtttgggtatacaccagataatctcatatacaagagccttgactttggtgttgatcttgactctagaatcgcattggttggtcccaacggggcagggaagagcactcttctgaagcttatgactggtgaccttgttccattagatggcatggttcggcgccacaatcacctgcgcattgcgcagtaccatcagcatctggcggagaagctggacctggacatgtcagccctggcttacatgatgaaggaataccctgggactgaagaagaaaagatgcgtgccgctgttggcaggttcggcctgtcaggaaaggcgcaggtgatgccgatgaagaatctttctgatgggcaaaggagccgcgtcatctttgcatggctggcatataggcagccgcaactgctactgcttgatgagccgacaaaccatctggatatcgagaccattgactcactggcagaggcgctgaatgagtgggatggtggtttggtcttggtgagccacgatttcaggctgatcaaccaggtcgctcaggagatctgggtgtgtgagaatcaagaggtgacaaggtgggaaggcgatatcatggatttcaaggcacacttgaagagcaaggctggtttatctgattagaatgcttttctagtaaccatgaactttttaactctgtatgatgaagtccctgttttacagtagcgaactatcaaatatactgttagggatagtttggtaactacaaatccggagggggttggaggggctagaatccccttcttattcaattttgaataagtctattctctccaatcctctccggttttctggctcccaaactaaccccttcgggattgaagggtattgaagaggaaattagttcatttccaccttaattccctcccaatcccgaaggggatttgaggttcacaaagtagcgaatgtgtcagactcctacttccctcgcaaccatactaccttgtactacctgaaatttttatttatatatatatttgaaatgtta

SEQ ID NO: 97056 - DNA, 106 bp, Zea Mays
gggtccacatgagtcaatgacatgtggggtccatggtatatatctaaagtttggatcttttaatggtatagatcaaattgttccttttttaaatcgtttgaagtcg

SEQ ID NO: 97057 - DNA, 1978 bp, Zea Mays
aacaaatttgtttcatacacgagtgcccatctaatctgtctcttcctgctgtcgcagtcgcaggacgcacctgcacgcgtccaccaagcccccgactccccgaggccccgacctgcgcacccacgggatccctacctatccggccgtcacccctccccctgcccctcccgagttggattgttcgcggaattggcggaggggcagccggatatgtcgtcgtcggttgggggcggcagcgcgggcggcggcggagtggacatggtcagcctgctggagaaggccaaggatttggaccagctaaagaaggaacaggacgaaatcgttgccgatatcaacaagattcacaagaagctcctcgcatccccagagatggttgataaaccagttgacaccattttgctcaagcttcgtggtttatatgcacgtgcaaaggagctctctgagaatgaaatcagtgcctcaaatgctttgattggattattagatggtttgttgcaatctggagcttcaactgcacaaaagaaaaagatagaagttggtgagcagaaaaagaagaggatcaagtctgatacagattctgcacgattttctgctgcatctatgaggaatcaacttgaccaagctgcaagccttaaaggagagcaggttgctgctagggtaaaatcagatgacgaaaaagatgagtggtttgtcgtgaaggtcatacatttcgataaggaaacaaaagagtatgtgtctactttatatttttctctctgcagggcagacatttatttttgatatgaaagtttactcgaggggaaaattacctttctgaatggaggtaacgttaataacatactacttccttgactattttattacttgaaataggagtgtgatgttatgaacctttcttacaagatcctgggttggtaaggtcgtaaggcaccacgttattgataggaaagtaggaattttcaaggtatctgctgtattgctgaaattgccccgcaaaaactgagagctatggcgatgacatctccagcactgaatctcagcattatagtaaataagaaaaggaggaaaagtgggcattgcatttatcatgtagagaggaggtaataataagctgttactgattcggcatgcaatatagtttgatgagatttatatcattgtttgtgataacccttcgttagtgatttctccttgccaaacaatttgtggtagtgctcctggacaacttatcattaccatgtacatgcacattttcgtgtgcctgttactgttgccttatatgtgaccatcatcctgtaagtatcactcatttaatattgatgcacgtgcaggtatgaagtacttgatgaagaaccaggtgatgacgaagagagcactcaaaagaagtacaagttgcctatgtcttacattattccatttccgaagaaaggggatccttcgagtgccccggattttgggcagggtcgacaagttttagctgtttatcctggcacaacagcattatacagagctaccgtagcttctcatcgtaagaggaagtctgatgattatattctggagttcgatgacgatgaggaggacggtgctctgccgcagagagccgtgccgttctacagggtggttgccctgccggagggccacaggcagtagtgacatttgacgcagttctgcattcctagtgtaacatatagcgcaaggtagggtgtcttcagtgtgacaatgtggtggtcatatctacgcgaaacgagagagaaaacaaggacgtgcatgtagcacttacatgtggggtccttgtataaaagacgatgacgtttttttttcaatctgctagagcacgtctatgtaattgcaatccagttttaatctcttatattatactttagagagaaagggcatactgtaagggtctatttggcaacaatatttctcaaaattatagttttataatactaaaaatatcgtagtttttgtcagctcc

SEQ ID NO: 97058 - DNA, 1375 bp, Zea Mays
aacaaatttgtttcatacacgagtgcccatctaatctgtctcttcctgctgtcgcagtcgcaggacgcacctgcacgcgtccaccaagcccccgactccccgaggccccgacctgcgcacccacgggatccctacctatccggccgtcacccctccccctgcccctcccgagttggattgttcgcggaattggcggaggggcagccggatatgtcgtcgtcggttgggggcggcagcgcgggcggcggcggagtggacatggtcagcctgctggagaaggccaaggatttggaccagctaaagaaggaacaggacgaaatcgttgccgatatcaacaagattcacaagaagctcctcgcatccccagagatggttgataaaccagttgacaccattttgctcaagcttcgtggtttatatgcacgtgcaaaggagctctctgagaatgaaatcagtgcctcaaatgctttgattggattattagatggtttgttgcaatctggagcttcaactgcacaaaagaaaaagatagaagttggtgagcagaaaaagaagaggatcaagtctgatacagattctgcacgattttctgctgcatctatgaggaatcaacttgaccaagctgcaagccttaaaggagagcaggttgctgctagggtaaaatcagatgacgaaaaagatgagtggtttgtcgtgaaggtcatacatttcgataaggaaacaaaagagtatgaagtacttgatgaagaaccaggtgatgacgaagagagcactcaaaagaagtacaagttgcctatgtcttacattattccatttccgaagaaaggggatccttcgagtgccccggattttgggcagggtcgacaagttttagctgtttatcctggcacaacagcattatacagagctaccgtagcttctcatcgtaagaggaagtctgatgattatattctggagttcgatgacgatgaggaggacggtgctctgccgcagagagccgtgccgttctacagggtggttgccctgccggagggccacaggcagtagtgacatttgacgcagttctgcattcctagtgtaacatatagcgcaaggtagggtgtcttcagtgtgacaatgtggtggtcatatctacgcgaaacgagagagaaaacaaggacgtgcatgtagcacttacatgtggggtccttgtataaaagacgatgacgtttttttttcaatctgctagagcacgtctatgtaattgcaatccagttttaatctcttatattatactttagagagaaagggcatactgtaagggtctatttggcaacaatatttctcaaaattatagttttataatactaaaaatatcgtagtttttgtcagctcc

SEQ ID NO: 97059 - DNA, 1393 bp, Zea Mays
aacaaatttgtttcatacacgagtgcccatctaatctgtctcttcctgctgtcgcagtcgcaggacgcacctgcacgcgtccaccaagcccccgactccccgaggccccgacctgcgcacccacgggatccctacctatccggccgtcacccctccccctgcccctcccgagttggattgttcgcggaattggcggaggggcagccggatatgtcgtcgtcggttgggggcggcagcgcgggcggcggcggagtggacatggtcagcctgctggagaaggccaaggatttggaccagctaaagaaggaacaggacgaaatcgttgccgatatcaacaagattcacaagaagctcctcgcatccccagagatggttgataaaccagttgacaccattttgctcaagcttcgtggtttatatgcacgtgcaaaggagctctctgagaatgaaatcagtgcctcaaatgctttgattggattattagatggtttgttgcaatctggagcttcaactgcacaaaagaaaaagatagttgctttctacatttcagaagttggtgagcagaaaaagaagaggatcaagtctgatacagattctgcacgattttctgctgcatctatgaggaatcaacttgaccaagctgcaagccttaaaggagagcaggttgctgctagggtaaaatcagatgacgaaaaagatgagtggtttgtcgtgaaggtcatacatttcgataaggaaacaaaagagtatgaagtacttgatgaagaaccaggtgatgacgaagagagcactcaaaagaagtacaagttgcctatgtcttacattattccatttccgaagaaaggggatccttcgagtgccccggattttgggcagggtcgacaagttttagctgtttatcctggcacaacagcattatacagagctaccgtagcttctcatcgtaagaggaagtctgatgattatattctggagttcgatgacgatgaggaggacggtgctctgccgcagagagccgtgccgttctacagggtggttgccctgccggagggccacaggcagtagtgacatttgacgcagttctgcattcctagtgtaacatatagcgcaaggtagggtgtcttcagtgtgacaatgtggtggtcatatctacgcgaaacgagagagaaaacaaggacgtgcatgtagcacttacatgtggggtccttgtataaaagacgatgacgtttttttttcaatctgctagagcacgtctatgtaattgcaatccagttttaatctcttatattatactttagagagaaagggcatactgtaagggtctatttggcaacaatatttctcaaaattatagttttataatactaaaaatatcgtagtttttgtcagctcc

SEQ ID NO: 97060 - DNA, 1413 bp, Zea Mays
aacaaatttgtttcatacacgagtgcccatctaatctgtctcttcctgctgtcgcagtcgcaggacgcacctgcacgcgtccaccaagcccccgactccccgaggccccgacctgcgcacccacgggatccctacctatccggccgtcacccctccccctgcccctcccgagttggattgttcgcggaattggcggaggggcagccggatatgtcgtcgtcggttgggggcggcagcgcgggcggcggcggagtggacatggtcagcctgctggagaaggccaaggatttggaccagctaaagaaggaacaggacgaaatcgttgccgatatcaacaagattcacaagaagctcctcgcatgtaagctactctgaagctgctgttgaccgccgcctcggccccagagatggttgataaaccagttgacaccattttgctcaagcttcgtggtttatatgcacgtgcaaaggagctctctgagaatgaaatcagtgcctcaaatgctttgattggattattagatggtttgttgcaatctggagcttcaactgcacaaaagaaaaagatagaagttggtgagcagaaaaagaagaggatcaagtctgatacagattctgcacgattttctgctgcatctatgaggaatcaacttgaccaagctgcaagccttaaaggagagcaggttgctgctagggtaaaatcagatgacgaaaaagatgagtggtttgtcgtgaaggtcatacatttcgataaggaaacaaaagagtatgaagtacttgatgaagaaccaggtgatgacgaagagagcactcaaaagaagtacaagttgcctatgtcttacattattccatttccgaagaaaggggatccttcgagtgccccggattttgggcagggtcgacaagttttagctgtttatcctggcacaacagcattatacagagctaccgtagcttctcatcgtaagaggaagtctgatgattatattctggagttcgatgacgatgaggaggacggtgctctgccgcagagagccgtgccgttctacagggtggttgccctgccggagggccacaggcagtagtgacatttgacgcagttctgcattcctagtgtaacatatagcgcaaggtagggtgtcttcagtgtgacaatgtggtggtcatatctacgcgaaacgagagagaaaacaaggacgtgcatgtagcacttacatgtggggtccttgtataaaagacgatgacgtttttttttcaatctgctagagcacgtctatgtaattgcaatccagttttaatctcttatattatactttagagagaaagggcatactgtaagggtctatttggcaacaatatttctcaaaattatagttttataatactaaaaatatcgtagtttttgtcagctcc

SEQ ID NO: 97061 - DNA, 669 bp, Zea Mays
gtgtctccactcgcacttccgcgacgcgcaacccaaagcaaacgcaccggctcgagccaatccaccacccagccatgcctcccaagcgcaagtccccggcgacgattgcccctgccgcggggtccccgaggaagacgcggagcatggttgctgctgctgctgcagggaagcgggcaacggagcctgctccggcgaaggcagtgccggccaagaaggaagacgaggcggcggttgccgagttgaaagggaggaagaggggcaagaaggaagccgaggcggtgacggtggccaccgagccgaaagggaggaagagggacaagaaggaagccgaggcggtgacggtggccaccgagccgaaagggaggaagaggggcaagaaggaagccgaggcggtggcaccagcggcagaggaggaggatggggttgatgtggcggctggagcgaagcgtgtcatcgtcgaggcctgcactcagtgcagacagtttaagatccgagctcagaaggtgaaggaggacctggaaagttatgtttcgggggtgtctgtgataatcaaccctcagaagccacgccgtggttgccttgagatacgtgaagaaggcggtgaagtgttcatatcactgctggtaatattcctaactatcattttcttaaatcttgtaggtttaggct

SEQ ID NO: 97062 - DNA, 1067 bp, Zea Mays
gtgtctccactcgcacttccgcgacgcgcaacccaaagcaaacgcaccggctcgagccaatccaccacccagccatgcctcccaagcgcaagtccccggcgacgattgcccctgccgcggggtccccgaggaagacgcggagcatggttgctgctgctgctgcagggaagcgggcaacggagcctgctccggcgaaggcagtgccggccaagaaggaagacgaggcggcggttgccgagttgaaagggaggaagaggggcaagaaggaagccgaggcggtgacggtggccaccgagccgaaagggaggaagagggacaagaaggaagccgaggcggtgacggtggccaccgagccgaaagggaggaagaggggcaagaaggaagccgaggcggtggcaccagcggcagaggaggaggatggggttgatgtggcggctggagcgaagcgtgtcatcgtcgaggcctgcactcagtgcagacagtttaagatccgagctcagaaggtgaaggaggacctggaaagttatgtttcgggggtgtctgtgataatcaaccctcagaagccacgccgtggttgccttgagatacgtgaagaaggcggtgaagtgttcatatcactgctgaacatgccacgccccttcacaccaatgaagaagctcgacatggacaaggttatcaaggacatcgccaagaagatctcctaaaccatgttggctggctatggctcggcggcaccattttgtgattgaaatattcaatctaagatcgtaatcttcaaagggtacggtgtaccttaggtgtaggttccaatcagtggcgtttcctattgcattggccatgtgcccatgtctcgtactcgtacctatgcttgtcctgcattgctggggcatatcgttttctgttatatgatatatgccctgaaaattccttgacttctgatctaccgtgttctctgccacccgcgtttgaagtgttggagttttcattgttcatgtcagtggcaatctacttttttcttggtatacaagagctgaagagatctccaagagtgcccaaagaaaaaaaaa

SEQ ID NO: 97063 - DNA, 2131 bp, Zea Mays
gctttgtcaccggcccctccctcacctaccaggatgaacctgctgacgtcgacctctgtcaccattcccgcccatgctcaactcccctagagaccggtcccacgcgccggcggagccctgcttttttcgtcgtcgctctcccagcgagccgtgcccgtctgctcctcctctctccctccatgctcctcgctgcgctctcttccccgcacacttatctttccagctcagtgtccgtccctctcctcgacacgcacatcttccattgctcgcttgcttcctcgtgtcgtctagctctatccgattccaacacagctacctataaatacatctctctctctctctctctccccgagcagagctaggcagagggcagaccattggcgagaggattgttggagctcggccgagcagagcacgcacagtgtgattgtgtgtgtgtgtgtctgacatggcgtcgctctggctagcgagagcgtcgtcccagctggcgcgccgtgccgccgccaggaggcctcctccgcgtcctgcgcgccacggctccggccaacccaccagttcgtggttcttgggctcggtgccgcaggcggcccttgggtcaccagcgctggacacaagccgccggggcttctgctccgtccggcgcttcgcaggggagagcagcgctgctgctgctgcggcggctgtcgtcgacgaggagccggagagcgggttcgcagccggcgatcagcaggcagttgactttccaggagggaaagtatcctttgtggccgaaatgaacttccttccagaatcgacgagggaaaggatcaactgctaccgcgtgcttgacgacgacggcagaacgatatcaggaagtagattccaagaggtcagtcgggagctggctctgaagatgtacagcgagatggtgacgctccagatcatggataccatcttctacgaggctcagaggcagggcaggatctcgttctacctcacttccaacggcgaggaagcgatcaacatagcctctgctgctgcgctcagtatggatgacattgtgctgcctcagtacagggaacctggtgttcttctatggcgtggcttcactctgcaggagtttgcaaaccagtgctttgggaacaagctggactatggtaaagggaggcagatgcccattcactatgggtcgaaccgtctgaactatttcacagtctcgtcacctatcgcaacacagctccctcatgctgttggagctgcctactctctgaagatggacaagaaggacgcgtgtgccatcacatactttggggacggtgggacaagtgagggagacttccatgcagcgctcaacttcgcggctgttatggaggcaccggtgatcttcttctgccgcaacaatggctgggccatcagcactccgactactgaacaattcagaagtgatggagttgtcatccgtggccaggcttatgggatccgtggcatccgagtagatggcaatgatgctcttgctgtgtacagcgcaatccatgctgcccgagaaatggctgtaactgaaggaagaccaattttagttgaggcactgacttaccgagtcggccatcactcgacatccgatgattcgaccaagtacaggccagttgatgagattgagcattggcgaacagcgagggatccgatttccagatacagaaaatgggttcagggtaatgactggtggtctgatgctgaagaatctgagctcaggagcagagtgagaaaagagcttctccaagccatccaggttgcagaaagaatgccaaaaccaccagttactgagcttttcactgatgtttacgacaagatcccttccaacctgcatgaacaagagcaattgctgcgggatacaatcatgaggcaccctgcagactacccaactgatgtacccgtttagttttcttggccttagatgagcagtatcgttgtgtaattattgatgagtcaggtccatagcattttgaataatacagtgattcagccagtgaactgctgattcaacacgttcttaaacaataattcaacctggcagattgccctgttgctggcactcgtgagccatgctaagatatttcattgcctgcacagcgtaccttataataataatagctac

SEQ ID NO: 97064 - DNA, 2021 bp, Zea Mays
cccagcgagccgtgcccgtctgctcctcctctctccctccatgctcctcgctgcgctctcttccccgcacacttatctttccagctcagtgtccgtccctctcctcgacacgcacatcttccattgctcgcttgcttcctcgtgtcgtctagctctatccgattccaacacagctacctataaatacatctctctctctctctctctccccgagcagagctaggcagagggcagaccattggcgagaggattgttggagctcggccgagcagagcacgcacagtgtgattgtgtgtgtgtgtgtctgacatggcgtcgctctggctagcgagagcgtcgtcccagctggcgcgccgtgccgccgccaggaggcctcctccgcgtcctgcgcgccacggctccggccaacccaccagttcgtggttcttgggctcggtgccgcaggcggcccttgggtcaccagcgctggacacaagccgccggggcttctgctccgtccggcgcttcgcaggggagagcagcgctgctgctgctgcggcggctgtcgtcgacgaggagccggagagcgggttcgcagccggcgatcagcaggcagttgactttccaggagggaaagtatcctttgtggccgaaatgaacttccttccagaatcgacgagggaaaggatcaactgctaccgcgtgcttgacgacgacggcagaacgatatcaggaagtagattccaagaggtcagtcgggagctggctctgaagatgtacagcgagatggtgacgctccagatcatggataccatcttctacgaggctcagaggcagggcaggatctcgttctacctcacttccaacggcgaggaagcgatcaacatagcctctgctgctgcgctcagtatggatgacattgtgctgcctcagtacagggaacctggtgttcttctatggcgtggcttcactctgcaggagtttgcaaaccagtgctttgggaacaagctggactatggtaaagggaggcagatgcccattcactatgggtcgaaccgtctgaactatttcacagtctcgtcacctatcgcaacacagctccctcatgctgttggagctgcctactctctgaagatggacaagaaggacgcgtgtgccatcacatactttggggacggtgggacaagtgagggagacttccatgcagcgctcaacttcgcggctgttatggaggcaccggtgatcttcttctgccgcaacaatggctgggccatcagcactccgactactgaacaattcagaagtgatggagttgtcatccgtggccaggcttatgggatccgtggcatccgagtagatggcaatgatgctcttgctgtgtacagcgcaatccatgctgcccgagaaatggctgtaactgaaggaagaccaattttagttgaggtgctcagtagatccatggagtttcattacctgaaatgcacaaaaaaaacttcagtatataattaatctgagtatcgactaatgagatttcaggcactgacttaccgagtcggccatcactcgacatccgatgattcgaccaagtacaggccagttgatgagattgagcattggcgaacagcgagggatccgatttccagatacagaaaatgggttcagggtaatgactggtggtctgatgctgaagaatctgagctcaggagcagagtgagaaaagagcttctccaagccatccaggttgcagaaagaatgccaaaaccaccagttactgagcttttcactgatgtttacgacaagatcccttccaacctgcatgaacaagagcaattgctgcgggatacaatcatgaggcaccctgcagactacccaactgatgtacccgtttagttttcttggccttagatgagcagtatcgttgtgtaattattgatgagtcaggtccatagcattttgaataatacagtgattcagccagtgaactgctgattcaacacgttcttaaacaataattcaacctggcagattgccctgttgctggc

SEQ ID NO: 97065 - DNA, 2050 bp, Zea Mays
cccagcgagccgtgcccgtctgctcctcctctctccctccatgctcctcgctgcgctctcttccccgcacacttatctttccagctcagtgtccgtccctctcctcgacacgcacatcttccattgctcgcttgcttcctcgtgtcgtctagctctatccgattccaacacagctacctataaatacatctctctctctctctctctccccgagcagagctaggcagagggcagaccattggcgagaggattgttggagctcggccgagcagagcacgcacagtgtgattgtgtgtgtgtgtgtctgacatggcgtcgctctggctagcgagagcgtcgtcccagctggcgcgccgtgccgccgccaggaggcctcctccgcgtcctgcgcgccacggctccggccaacccaccagttcgtggttcttgggctcggtgccgcaggcggcccttgggtcaccagcgctggacacaagccgccggggcttctgctccgtccggcgcttcgcaggggagagcagcgctgctgctgctgcggcggctgtcgtcgacgaggagccggagagcgggttcgcagccggcgatcagcaggcagttgactttccaggagggaaagtatcctttgtggccgaaatgaacttccttccagaatcgacgagggaaaggatcaactgctaccgcgtgcttgacgacgacggcagaacgatatcaggaagtagattccaagaggtcagtcgggagctggctctgaagatgtacagcgagatggtgacgctccagatcatggataccatcttctacgaggctcagaggcagggcaggatctcgttctacctcacttccaacggcgaggaagcgatcaacatagcctctgctgctgcgctcagtatggatgacattgtgctgcctcagtacagggaacctggtgttcttctatggcgtggcttcactctgcaggagtttgcaaaccagtgctttgggaacaagctggactatggtaaagggaggcagatgcccattcactatgggtcgaaccgtctgaactatttcacagtctcgtcacctatcgcaacacagctccctcatgctgttggagctgcctactctctgaagatggacaagaaggacgcgtgtgccatcacatactttggggacggtgggacaagtgagggagacttccatgcagcgctcaacttcgcggctgttatggaggcaccggtgatcttcttctgccgcaacaatggctgggccatcagcactccgactactgaacaattcagaagtagcaacagcgtgtcttcatatactgatccatggcagttacaagtaaacaatgcaatgtcgtgttaaaattctagtcgtgttgcaggtgatggagttgtcatccgtggccaggcttatgggatccgtggcatccgagtagatggcaatgatgctcttgctgtgtacagcgcaatccatgctgcccgagaaatggctgtaactgaaggaagaccaattttagttgaggcactgacttaccgagtcggccatcactcgacatccgatgattcgaccaagtacaggccagttgatgagattgagcattggcgaacagcgagggatccgatttccagatacagaaaatgggttcagggtaatgactggtggtctgatgctgaagaatctgagctcaggagcagagtgagaaaagagcttctccaagccatccaggttgcagaaagaatgccaaaaccaccagttactgagcttttcactgatgtttacgacaagatcccttccaacctgcatgaacaagagcaattgctgcgggatacaatcatgaggcaccctgcagactacccaactgatgtacccgtttagttttcttggccttagatgagcagtatcgttgtgtaattattgatgagtcaggtccatagcattttgaataatacagtgattcagccagtgaactgctgattcaacacgttcttaaacaataattcaacctggcagattgccctgttgctggcactcgtgagccatgctaagatatttcattgcctgc

SEQ ID NO: 97066 - DNA, 1381 bp, Zea Mays
cgctgcgctctcttccccgcacacttatctttccagctcagtgtccgtccctctcctcgacacgcacatcttccattgctcgcttgcttcctcgtgtcgtctagctctatccgattccaacacagctacctataaatacatctctctctctctctctctccccgagcagagctaggcagagggcagaccattggcgagaggattgttggagctcggccgagcagagcacgcacagtgtgattgtgtgtgtgtgtgtctgacatggcgtcgctctggctagcgagagcgtcgtcccagctggcgcgccgtgccgccgccaggaggcctcctccgcgtcctgcgcgccacggctccggccaacccaccagttcgtggttcttgggctcggtgccgcaggcggcccttgggtcaccagcgctggacacaagccgccggggcttctgctccgtccggcgcttcgcaggggagagcagcgctgctgctgctgcggcggctgtcgtcgacgaggagccggagagcgggttcgcagccggcgatcagcaggcagttgactttccaggagggaaagtatcctttgtggccgaaatgaacttccttccagaatcgacgagggaaaggatcaactgctaccgcgtgcttgacgacgacggcagaacgatatcaggaagtagattccaagagtcgggagctggctctgaagatgtacagcgagatggtgacgctccagatcatggataccatcttctacgaggctcagaggcagggcaggatctcgttctacctcacttccaacggcgaggaagcgatcaacatagcctctgctgctgcgctcagtatggatgacattgtgctgcctcagtacagggaacctggtgttcttctatggcgtggcttcactctgcaggagtttgcaaaccagtgctttgggaacaagctggactatggtaaagggaggcagatgcccattcactatgggtcgaaccgtctgaactatttcacagtctcgtcacctatcgcgtaagtctcaagcatctcttccgcgtcggaaaggtcttgcgagtgaaggtcatatgttccattcttccttatttttcccagaacacagctccctcatgctgttggagctgcctactctctgaagatggacaagaaggacgcgtgtgccatcacatactttggggacggtgggacaagtgagggagacttccatgcagcgctcaacttcgcggctgttatggaggcaccggtgatcttcttctgccgcaacaatggctgggccatcagcactccgactactgaacaattcagaagtagcaacagcgtgtcttcatatactgatccatggcagttacaagtaaacaatgcaatgtcgtgttaaaat

SEQ ID NO: 97067 - DNA, 1715 bp, Zea Mays
ggcagagggcagaccattggcgagaggattgttggagctcggccgagcagagcacgcacagtgtgattgtgtgtgtgtgtgtctgacatggcgtcgctctggctagcgagagcgtcgtcccagctggcgcgccgtgccgccgccaggaggcctcctccgcgtcctgcgcgccacggctccggccaacccaccagttcgtggttcttgggctcggtgccgcaggcggcccttgggtcaccagcgctggacacaagccgccggggcttctgctccgtccggcgcttcgcaggggagagcagcgctgctgctgctgcggcggctgtcgtcgacgaggagccggagagcgggttcgcagccggcgatcagcaggcagttgactttccaggagggaaagtatcctttgtggccgaaatgaacttccttccagaatcgacgagggaaaggatcaactgctaccgcgtgcttgacgacgacggcagaacgatatcaggaagtagattccaagagtcgggagctggctctgaagatgtacagcgagatggtgacgctccagatcatggataccatcttctacgaggctcagaggcagggcaggatctcgttctacctcacttccaacggcgaggaagcgatcaacatagcctctgctgctgcgctcagtatggatgacattgtgctgcctcagagcccaaaatgtagtacagggaacctggtgttcttctatggcgtggcttcactctgcaggagtttgcaaaccagtgctttgggaacaagctggactatggtaaagggaggcagatgcccattcactatgggtcgaaccgtctgaactatttcacagtctcgtcacctatcgcaacacagctccctcatgctgttggagctgcctactctctgaagatggacaagaaggacgcgtgtgccatcacatactttggggacggtgggacaagtgagggagacttccatgcagcgctcaacttcgcggctgttatggaggcaccggtgatcttcttctgccgcaacaatggctgggccatcagcactccgactactgaacaattcagaagtgatggagttgtcatccgtggccaggcttatgggatccgtggcatccgagtagatggcaatgatgctcttgctgtgtacagcgcaatccatgctgcccgagaaatggctgtaactgaaggaagaccaattttagttgaggcactgacttaccgagtcggccatcactcgacatccgatgattcgaccaagtacaggccagttgatgagattgagcattggcgaacagcgagggatccgatttccagatacagaaaatgggttcagggtaatgactggtggtctgatgctgaagaatctgagctcaggagcagagtgagaaaagagcttctccaagccatccaggttgcagaaagaatgccaaaaccaccagttactgagcttttcactgatgtttacgacaagatcccttccaacctgcatgaacaagagcaattgctgcgggatacaatcatgaggcaccctgcagactacccaactgatgtacccgtttagttttcttggccttagatgagcagtatcgttgtgtaattattgatgagtcaggtccatagcattttgaataatacagtgattcagccagtgaactgctgattcaacacgttcttaaacaataattcaacctggcagattgccctgttgctggc

SEQ ID NO: 97068 - DNA, 1710 bp, Zea Mays
ggcagagggcagaccattggcgagaggattgttggagctcggccgagcagagcacgcacagtgtgattgtgtgtgtgtgtgtctgacatggcgtcgctctggctagcgagagcgtcgtcccagctggcgcgccgtgccgccgccaggaggcctcctccgcgtcctgcgcgccacggctccggccaacccaccagttcgtggttcttgggctcggtgccgcaggcggcccttgggtcaccagcgctggacacaagccgccggggcttctgctccgtccggcgcttcgcaggggagagcagcgctgctgctgctgcggcggctgtcgtcgacgaggagccggagagcgggttcgcagccggcgatcagcaggcagttgactttccaggagggaaagtatcctttgtggccgaaatgaacttccttccagaatcgacgagggaaaggatcaactgctaccgcgtgcttgacgacgacggcagaacgatatcaggaagtagattccaagagtcgggagctggctctgaagatgtacagcgagatggtgacgctccagatcatggataccatcttctacgaggctcagaggcagggcaggatctcgttctacctcacttccaacggcgaggaagcgatcaacatagcctctgctgctgcgctcagtatggatgacattgtgctgcctcagagcccaaaatgtagtacagggaacctggtgttcttctatggcgtggcttcactctgcaggagtttgcaaaccagtgctttgggaacaagctggactatggtaaagggaggcagatgcccattcactatgggtcgaaccgtctgaactatttcacagtctcgtcacctatcgcaacacagctccctcatgctgttggagctgcctactctctgaagatggacaagaaggacgcgtgtgccatcacatactttggggacggtgggacaaggagacttccatgcagcgctcaacttcgcggctgttatggaggcaccggtgatcttcttctgccgcaacaatggctgggccatcagcactccgactactgaacaattcagaagtgatggagttgtcatccgtggccaggcttatgggatccgtggcatccgagtagatggcaatgatgctcttgctgtgtacagcgcaatccatgctgcccgagaaatggctgtaactgaaggaagaccaattttagttgaggcactgacttaccgagtcggccatcactcgacatccgatgattcgaccaagtacaggccagttgatgagattgagcattggcgaacagcgagggatccgatttccagatacagaaaatgggttcagggtaatgactggtggtctgatgctgaagaatctgagctcaggagcagagtgagaaaagagcttctccaagccatccaggttgcagaaagaatgccaaaaccaccagttactgagcttttcactgatgtttacgacaagatcccttccaacctgcatgaacaagagcaattgctgcgggatacaatcatgaggcaccctgcagactacccaactgatgtacccgtttagttttcttggccttagatgagcagtatcgttgtgtaattattgatgagtcaggtccatagcattttgaataatacagtgattcagccagtgaactgctgattcaacacgttcttaaacaataattcaacctggcagattgccctgttgctggc

SEQ ID NO: 97069 - DNA, 1518 bp, Zea Mays
ttggagctcggccgagcagagcacgcacagtgtgattgtgtgtgtgtgtgtctgacatggcgtcgctctggctagcgagagcgtcgtcccagctggcgcgccgtgccgccgccaggaggcctcctccgcgtcctgcgcgccacggctccggccaacccaccagttcgtggttcttgggctcggtgccgcaggcggcccttgggtcaccagcgctggacacaagccgccggggcttctgctccgtccggcgcttcgcaggggagagcagcgctgctgctgctgcggcggctgtcgtcgacgaggagccggagagcgggttcgcagccggcgatcagcaggcagttgactttccaggagggaaagtatcctttgtggccgaaatgaacttccttccagaatcgacgagggaaaggatcaactgctaccgcgtgcttgacgacgacggcagaacgatatcaggaagtagattccaagagtcgggagctggctctgaagatgtacagcgagatggtgacgctccagatcatggataccatcttctacgaggctcagaggcagggcaggatctcgttctacctcacttccaacggcgaggaagcgatcaacatagcctctgctgctgcgctcagtatggatgacattgtgctgcctcagtacagggaacctggtgttcttctatggcgtggcttcactctgcaggagtttgcaaaccagtgctttgggaacaagctggactatggtaaagggaggcagatgcccattcactatgggtcgaaccgtctgaactatttcacagtctcgtcacctatcgcaacacagctccctcatgctgttggagctgcctactctctgaagatggacaagaaggacgcgtgtgccatcacatactttggggacggtgggacaagtgagggagacttccatgcagcgctcaacttcgcggctgttatggaggcaccggtgatcttcttctgccgcaacaatggctgggccatcagcactccgactactgaacaattcagaagtgatggagttgtcatccgtggccaggcttatgggatccgtggcatccgagtagatggcaatgatgctcttgctgtgtacagcgcaatccatgctgcccgagaaatggctgtaactgaaggaagaccaattttagttgaggcactgacttaccgagtcggccatcactcgacatccgatgattcgaccaagtacaggccagttgatgagattgagcattggcgaacagcgagggatccgatttccagatacagaaaatgggttcagggtaatgactggtggtctgatgctgaagaatctgagctcaggagcagagtgagaaaagagcttctccaagccatccaggttgcagaaagaatgccaaaaccaccagttactgagcttttcactgatgtttacgacaagatcccttccaacctgcatgaacaagagcaattgctgcgggatacaatcatgaggcaccctgcagactacccaactgatgtacccgtttag

SEQ ID NO: 97070 - DNA, 362 bp, Zea Mays
gtcatacatgacatctgaaactgcctgttaacttgtgtgcagcttctccaagccatccaggttgcagaaagaatgccaaaaccaccagttactgagcttttcactgatgtttacgacaagatcccttccaacctgcatgaacaagagcaattgctgcgggatacaatcatgaggcaccctgcagactacccaactgatgtacccgtttagttttcttggccttagatgagcagtatcgttgtgtaattattgatgagtcaggtccatagcattttgaataatacagtgattcagccagtgaactgctgattcaacacgttcttaaacaataattcaacctggcagattgccctgttgctggc

SEQ ID NO: 97071 - DNA, 1660 bp, Zea Mays
ctctttccaaccttgccgggtcgttgccaaatgccaacgcaggcgccgggcagtgcacgcacatggctgcgcgcgtgggcctgctcccgcacgcgatcctcgtctcctcccgagctctacccacgccccgagctcgcgtcccttatcctcttccacccgtcccttcctacctccgccacgcctcctcctccgcctcccgctcctgccgcgcgtcgccgcgttttgtcgcagtccgcgccatggcttcggggaacccctacgccgccgagctcgccgccgccaagaaggccgtcaccctcgccgccaaactctgccagacagttcaacaggatattatgcattctggcgttcaggctaaggcagacaaaagtcctgtcacagtggctgattatggatctcaaatattggtcggtttttccttaaagatggatgtatcatctggaccattttcattggtggctgaagaggactcagatgaattgagaaaagatggcgctgaagaaattttggaagatattactgaccttgtcaatgaaaccatctttgatgatggttcatataacatttcgtttacaaaggaaggtatactctctgcaattgatgatgggaagtctgagggaggtccatctggacgacattgggtgcttgatccgattgacggtactaaaggtttcttgaggggcgaccaatatgccattgcattggctctgcttgatgaaggtaaagttgttttgggtgtattggcttgtccaaatcttccattgtcatcaataaacaacatcaatggtaactcttcgggagataaagttggtgccctgttttctgctacaattggttgtggggctcaagtagagtccttagatggctctccaccacaaaagattagtgtttgctccatcgacaatcctgtcaatgcatcattttttgaatcctatgaaagtgcacactccatgcatgatttgactggctctattgcagagaaacttggtgtccaagctcctccagttagaatcgacagccaagcaaaatatggtgctctggcccgaggtgatggcgccatttacttgcgctttccacacaaaggttatagagagaaaatatgggaccatgcagcaggatcaattgtcgtgacagaagctggaggcatagtaacagatgctgcgggaaacgacttggatttctccaaagggagatttctggatctcgacacaggcatcatcgcaaccaacaaggagttgatgccgtcgctcctgaaagctgtccaagaggctattaaagagacgaaccaggctgcctccctcttatagctgttgtagtggtcgacaaaaaagtagttgcaaaattttcgtactggcaaacaggtgtgcatcatttctccgtggtattacagagtctagcaaatttatagcatcaacctgattggtgatcagacgtccattcgttttactgaatcaccttcttggtgcagcattgctagaagtggacaacatgaataatttgagtgagtccatagttgcctgaactcagctttggcatttgaactggttatagaaattgtgaaataattaatggatatttggaagacaaacttgaacttcagttggaatccaaatgtagcatacaaagtctgtaaaaacaagaatcccgaaacatgaaatgc

SEQ ID NO: 97072 - DNA, 1653 bp, Zea Mays
ctctttccaaccttgccgggtcgttgccaaatgccaacgcaggcgccgggcagtgcacgcacatggctgcgcgcgtgggcctgctcccgcacgcgatcctcgtctcctcccgagctctacccacgccccgagctcgcgtcccttatcctcttccacccgtcccttcctacctccgccacgcctcctcctccgcctcccgctcctgccgcgcgtcgccgcgttttgtcgcagtccgcgccatggcttcggggaacccctacgccgccgagctcgccgccgccaagaaggccgtcaccctcgccgccaaactctgccagacagttcaacaggatattatgcattctggcgttcaggctaaggcagacaaaagtcctgtcacagtggctgattatggatctcaaatattggtcggtttttccttaaagatggatgtatcatctggaccattttcattggtggctgaagagatgaattgagaaaagatggcgctgaagaaattttggaagatattactgaccttgtcaatgaaaccatctttgatgatggttcatataacatttcgtttacaaaggaaggtatactctctgcaattgatgatgggaagtctgagggaggtccatctggacgacattgggtgcttgatccgattgacggtactaaaggtttcttgaggggcgaccaatatgccattgcattggctctgcttgatgaaggtaaagttgttttgggtgtattggcttgtccaaatcttccattgtcatcaataaacaacatcaatggtaactcttcgggagataaagttggtgccctgttttctgctacaattggttgtggggctcaagtagagtccttagatggctctccaccacaaaagattagtgtttgctccatcgacaatcctgtcaatgcatcattttttgaatcctatgaaagtgcacactccatgcatgatttgactggctctattgcagagaaacttggtgtccaagctcctccagttagaatcgacagccaagcaaaatatggtgctctggcccgaggtgatggcgccatttacttgcgctttccacacaaaggttatagagagaaaatatgggaccatgcagcaggatcaattgtcgtgacagaagctggaggcatagtaacagatgctgcgggaaacgacttggatttctccaaagggagatttctggatctcgacacaggcatcatcgcaaccaacaaggagttgatgccgtcgctcctgaaagctgtccaagaggctattaaagagacgaaccaggctgcctccctcttatagctgttgtagtggtcgacaaaaaagtagttgcaaaattttcgtactggcaaacaggtgtgcatcatttctccgtggtattacagagtctagcaaatttatagcatcaacctgattggtgatcagacgtccattcgttttactgaatcaccttcttggtgcagcattgctagaagtggacaacatgaataatttgagtgagtccatagttgcctgaactcagctttggcatttgaactggttatagaaattgtgaaataattaatggatatttggaagacaaacttgaacttcagttggaatccaaatgtagcatacaaagtctgtaaaaacaagaatcccgaaacatgaaatgc

SEQ ID NO: 97073 - DNA, 1847 bp, Zea Mays
ctctttccaaccttgccgggtcgttgccaaatgccaacgcaggcgccgggcagtgcacgcacatggctgcgcgcgtgggcctgctcccgcacgcgatcctcgtctcctcccgagctctacccacgccccgagctcgcgtcccttatcctcttccacccgtcccttcctacctccgccacgcctcctcctccgcctcccgctcctgccgcgcgtcgccgcgttttgtcgcagtccgcgccatggcttcggggaacccctacgccgccgagctcgccgccgccaagaaggccgtcaccctcgccgccaaactctgccagacagttcaacaggatattatgcattctggcgttcaggctaaggcagacaaaagtcctgtcacagtggctgattatggatctcaaatattggtcggtttttccttaaagatggatgtatcatctggaccattttcattggtggctgaagaggactcagatgaattgagaaaagatggcgctgaagaaattttggaagatattactgaccttgtcaatgaaaccatctttgatgatggttcatataacatttcgtttacaaaggaaggtatactctctgcaattgatgatgggaagtctgagggaggtccatctggacgacattgggtgcttgatccgattgacggtactaaaggtttcttgaggggcgaccaatatgccattgcattggctctgcttgatgaaggtaaagttgttttgggtgtattggcttgtccaaatcttccattgtcatcaataaacaacatcaatggtaactcttcgggagataaagttggtgccctgttttctgctacaattggttgtggggctcaagtagagtccttagatggctctccaccacaaaagattagtgtttgctccatcgacaatcctgtcaatgcatcattttttgaatcctatgaaagtgcacactccatgcatgatttgactggctctattgcagagaaacttggtgtccaagctcctccagttagaatcgacagccaagcaaaatatggtgctctggcccgaggtgatggcgccatttacttgcgctttccacacaaaggttatagagagaaaatatgggaccatgcagcaggatcaattgtcgtgacagaagctggaggcatagtaacagatgctgcgggaaacgacttggatttctccaaagggagatttctggatctcgacacaggcatcatcgcaaccaacaaggagttgatgccgtcgctcctgaaagctgtccaagaggctattaaagagacgaaccaggctgcctccctcttatagctgttgtagtggtcgacaaaaaagtagttgcaaaattttcgtactggcaaacaggcatcatcaagacaggcgagcgcttggtgccggtgctcttaaaggccatccaagaggttatcaaggagaaagttgagcagtcgtaatgatgaacagaaattttagttgcacgtgtgacttacatatttcagctgtaccacttttgatcagacacgttcccagtgggtgcttagcagataacagttcttttactgaatactgtaaaagcctttttttttcaaaaataaactaggtttcctccgttttctttctagtgtaaaatctgtttacatcctgcggatcgatgacccgtctgcgaaagccactggaggcagcaacaacatcttcactaatgctcatgtcgctcaactcatttttttagtttttttttttttgcttcgaagcctttatatagcattatagcttgcttcaccgaacgatgttcagttttcaaatggaacatagtatacacttttacaagggaaaatggagttcctaaactagtcc

SEQ ID NO: 97074 - DNA, 853 bp, Zea Mays
acacccccaccatagaaaccatatccccccgcacacacctttgtttctgaattctgagccagacaatcaaaagctaccccctatccgatccaaccctttctggctgctcctccgtccggccggcatcggcagtgcaggatggctctgaggatgtgggcgagctcagccgccaatgcgctcaagctctcggcgggcggcgccggagcccgggctgctgccttctctatctccaggttcttctccactgttcacgatgggttgaagtacactcagtctcacgaatgggtcaagacgacgggcgacgtcgccaccgttggcatcacggaccatgctcagggccacctgggagaggtggtgttcgtggagctgccggaacccggcacgaaggtggccgcgggaggacccttcggcaacgtggagagcgtgaaggccaccagcgacgtcaactccccgatctccggcgaggtcgtcgaggtcaatgccaaactgtcagagacgcccggcctgatcaacacgagcccgtacgaggacgggtggatgatcaaagtgaagccgagcagcccgggggaggcggacgccctgctggacgccgccaagtacaccaagcactgcgaggaggaagacgctcactagacccaggcccagccagcaagcgtggatgcttacaacgacagcgcgcgtttggtggtgttgatcctccgctcagtctctctttgttgcaaaaactccaccaagcagtccgccatagccaagaaggccacactcacctttatcatccatgccttccgtttttttttggtgtgtgctactaccttttttttaaaagaaaagaagtggttctgaatatcgatcg

SEQ ID NO: 97075 - DNA, 285 bp, Zea Mays
ttctttcgttctttcacttactcctttctattattccattacatttcataatttgataggggcatcagacaatgggtttttgatgagcacaactatggatacaagatgaacagagcaacaagtgcacctgtgcttgctacaatttccataaaacacacaagtctcagtttttttctggctaaaaaattgagtcttgagccaacatcactagatcagcgttatgtgacaacactacagcaatcacctggtggcctctgacagactactcccccttcccttcacttg

SEQ ID NO: 97076 - DNA, 1080 bp, Zea Mays
atggcggccgtggagggggaagaggccagcatcagtctaacggcgctcgcagtcatgcctcgggtcatcaccagcatggcggcgcggaggccggtgcaggggaggaaaccagccgcggcaaatggtggcgggggtgctgctaggaatgtcccagacaatacctgggaacagattgtcactctgctgctgcagtctgtggggaagaatcagtccatgtccaattctaggtgtaaaaccaaaggacaccagttgagtgaccgcaatattgagttgttttgtgaagtttgtgatgtcaaaacacacttaacttcaaaatgtccagtggtccgtaactgcagaacttttgcagtaccttgtgggtatgcggtagagggtttcatgttttactatatacctcaactcaatccagtcaagtcgaggaagggtggttgtaatggtacagtgactgttgtggagggttctctgacagaggagcagattatgaatgaactgaaaaggttggtgtcttctgagtgggaatggagggaagatggtgagggagaggaaataaagtacgagatgactaagatatgggtgcaatttactggactccctaaggagctaagagagtgctcggtaatcaaggtggttggttctatgttaggcatctcaaatgaggtggatatggtgtttacgaggaaatttgatagggcaaggatgcaggttgcagtgcttgacccgaatttgattccacaatttatccatgtagtaattggagattatttgtatgaactgaaattcaaggtagaggtggctggcgatggagagcagcctacgcctatggatatggatcacttcggggcaaatgatgatgatgaatttcatgagcaaaacaaggatgacaatttgggtgacaaggggaacagtaggtccaaactgctggaaacttcaaagggttcagcacgtgtggttaacaaagtgtcagcctctaagcactgcagcaacaattccaatggtaaatcactgagagtgggatatcagctgttgtacatggccttacgtagcaggatttggaacagcaacaggtcactaggcccttag

SEQ ID NO: 97077 - DNA, 836 bp, Zea Mays
atgggatccagactgcaagcgccgcctaaggttttggattcgagcaggggaggcagaatggggatcaggggaggcagattggggatcgtgggcagggaggagattttcaaccagccttttgactatgagaactgtttgagagataataggtattgttctcttagcccatttggttttctcccaagtctcaggcatgcccacgaaggaatttattctcaattttgtcacttcacaatcatgcacaagttttgtggtgttttgaattcttttgtcaagcgaacatccaatggaaagcatgtgagttcattgccaccaaagcccttgaatagtgctgcagtcgtcgcgcggtctaagcctagtgttactccaaaggagcagtttgttactgctcggcggcaagatttgcctgtaagttcaaagcagggagcaggcactaagtctgagaaggataattccacaatattagataaggttggcaatggtcctgttgtcaaagaacaatcagttgatacctatgcaagcaaaagtaaagctcaaaatggaaaggccatgcctagtaatggtggatcgctggctaacatgtggggccgtgcatcagcaaaacctatgcctccaagtaccactaattctacagctgtagcaagtgttgcagctactgctgatgcacaaatttgtgcgaaggaagaagcagatggaaatagcagcgatgatgaacatgggataaagtacaagaggggatccactaatgcaaataacagaaagagaagagtggtatttgattattcagatgatgaggaagatgagtagatgacaatattgtaagcattgcatctcat

SEQ ID NO: 97078 - DNA, 96 bp, Zea Mays
gagctaccaaaacagcataccccagaccttgttgttggaattgctgacgacgctgaagtaaatcaaaagagcttggaaaatgaatacgatctacca

SEQ ID NO: 97079 - DNA, 562 bp, Zea Mays
ttcactatgtgctgtaggtatccactatctaactttgttggactaaagagcccagaccaatcgacccattttcgtggaggtcatcatccttctttgttgagccatctgggtgaccttgcaaattggataagtgccatacaatacctactgcatatgaattttgagcctttatcaggagctgaataagaactttgttcatagaatcacactgtttatctatagacacccacaatagaatacctactgctcattatggagaaaatgtacctatgatagccctcacatggcagctgcatagttgtgctaagtgtgaagatataacaatttcttgaaggggtgttaacacaaatatgtttattgaatcccaccatcacttaagcattcattttactgttagtttgaattgcaatccctcataattttatcatgtgtgcttaactgcttatgcatatacatatcttgataggattttgtatggaactgcaaaggttgttttaagaataaattctagcaaaattctggatggacaatcaacacctcaaaactctctcatctttgtaac

SEQ ID NO: 97080 - DNA, 4007 bp, Zea Mays
ccgagtcgcagggatttttttctactgctactgcgaagtgcattctctccccttccgttcctggctccggccttcccttccttccttcctccgctcgctcgcttccgcttcctcctcctcctgctcgccgcggctcgcgagggaagttccaggcttccagcggagtcgtcctcgcgggagtgcggagccccggcacggcccggcggcgccacctcggcgccggaggagggacgtttgcgctgctcccgagggccgaggcccggatcgccggattcctccacgggctcgctcggatcgaggaggcgcggaggtgggctcggttggtgggtttttcgccggccgtaattcttgtggtggcttccttgctttcggagacgcggggctggggagctcccgtgcttgcttctggctaatccgcgcttccttgcgtcgccctgctcggtgctgctactcgcttggtttcgctggattacaggacgaaaggtgacgaggaggtgcgctgacgcttttgctcggctccggttttggctgccggcggagtcgcaatctcggctagatttgccgagctgcggcggtgtcgcaatcccggctagatttgccgcgctgcggcggatgcttcgacgcgcaccggatctccaccgttcctgcggcgcggagtgaaggtacggttcccgaccggattttgggaagatggtgccgtcggggcagcacaacccgatgggcccgggccagcaggtgggcgcgtcgctgctccggactagctccagcctccttggcggcggcgccggcgccggcgccggtggccagccggggatggggatgggcgtcggggtgctcccgtcgcagtcgcccttctcgtccctcgtctcgccgcgcacgcagtatggcggtgttggcggcgggaacggcttgctggcgggcgcgtccagtgtcgcgtccatgctcagcagacagcagtcctatgggaatgggggaactggggtaatgccgggcagcggcgctgggctcccgatcggtgggctgcagcacagaggcggccttgatggcgttggtgacttggttggcactggagggccggattccatggcgttctcttcctcgggccctggtagcttgggcaatcaacttggcgtggacagcttgcagcagcagcagcagctggatgcaccacaagattcacaaaatcagcaagagcatcaacagcaaatgtcaatgacatataatcagcagcatatgatgtcacaaactcagcagcagcagcagcctgcagtgaagttggagaatggaggcgtccttggtggggtcaaactggagcagcagatggggcagcctgatcagagtgtttccgcacagatgctgcgcagttcgagtggtggtgtgaagctcgagccacagttgcaagcgttgaggagcttgggtgctatcaagatggagcaccaaagctcagacccatctgttttactacagcagcagcaacatatgttgcagctgtctaagcagaacccccaggctgcagctactcagttgagcctcctacaacaacagcagcgtttcttacaactgcagcagcagcaacaacagcagcagattctcaagaacctgcctttgcagagaaaccaattgcagcagcagcaacaacagcaacaacaacaacagcaacagcagttgcttcgtcaacaaagtctaaatatgagaaccggtaaatcagctgcttatgaaccaggaacctgtgcaaagaggttgacacattacatgtatcaccagcaaaacaggccacaggacaataacatcgagtactggagaaactttgtcaatgaatactttgccccaagtgccaagaagaggtggtgcgtttctctgtatggcaatggccgtcaaactaccggagttttccctcaggatgtttggcattgtgagatatgcaataggaagccagggcgaggttttgaaacaacggttgaggtcttgccacggttgtgccaaatcaaatatgccagtggtacactcgaggagcttctgtatgttgatatgccgagagagtcccagaattcatctggacagattgttttggactataccaaagcaatccaggagagtgtctttgagcaactgcgtgtagtccgtgaggggcatctaagaattgtattcaaccaagacttgaagattgcatcgtgggagttctgtgcccggcgtcacgaggaacttattcctcggagatcaatcataccacaggtcagtcaacttggtgctgtagtgcagaagtaccagtcttctgttcaaagttcagcatcactatcaagtcaggacttgcaaaacaattgtaactcgtttgtcgcatgtgctcgccagttggctaaggcactggaagtgccattggtaaatgatttaggatacacaaaaagatatgttcgctgcctccagattgcagaggtggttaattgtatgaaagatttgatcgatcatagcaggcagactgggtctggtccaatagagagcttacataaattccctaggagagggaattctggggttagttctgttcaagcccagcagcaatctgaggagcagaagcctgttccacagaattctaaccagagtggtcaaaattctgctcccgcaactggaatgcaagtctctgcctctggaaatggcgatgctacatcaaacaattcactcaattttgcaccatctacttcggcaccatcttcatctgttgttggtctccttcaaggctcagtaaattgcagacaagaccatccaacaagcagcggcaatggtctgtataatggtggaaacagtggtccggttgctaaggccaactcaacaaactccatgcaatcaaatgcaccagcatcgtttcctttgccagcaccctcggcatcaaatggcaatatgatgcctgctcctcagcactcaagccaaatgaattcaccaaccatgtcatcaaacctacctcctatgcaaacacctgcaagccgacctcaggaacccgagccaattgagtctcaaagctcggtccagaggatattgcaagacttgatgatgcaatcccatattaatggtgttggcccagttggcagcgatatgaggagagcaaacacaattactcctggtatgaacggtgtcaactccttagttggtaaccccatgacaaataaccctggaatcaatgggatgggatttgcggccatgggtggccttggtcaacaaatgagaacggcgatggggaacaacgcattggcaatgaatggaaggaccgtgatgaatcacagtgcgcatgacctgacacagttggcccaccagcagcaacagcgcgatttaggaaaccaattgcttgggggccttagagctgcaaacagcttcaataaccttcaatacgactggaagcctgctcagtagagtgagcaggagtcagaaagctcgcacctaatattatacagttatccttgctgggtcggtccatcactgacaacacaaaagttacgcctcaccacaacctgccctccctcagaagcggagtgttcttactgatggtgcatgctacatgttacagcgaatatgaaacatgagcgctgatcggtacatgttacatcaactgtctgtatggctgtctcccattgtgttctgcaaaagtgaggccccgtgaatcagagcctactttcacatgggactcattgtgggtgcaagtgttggcggattccaaactggggcaagatcagggcgtctttctttcccctgtttttccaggttggatgacaacgatttctctcttgcagtctgtactcttgtgtaccatggctctccgtaagttgtgaaagcatgagcacctatttccacctttgatggccaagaatctcattgtagctttgctgtaccatgtataagctgttattaactagtggaaagcagcaggaaaaaaattctgaagggagtgtgaatcttggtgtgtcatctgtgtacctgtgtttctgataaatgctctcgtttaagcaggttgatctttcaca

SEQ ID NO: 97081 - DNA, 2116 bp, Zea Mays
ctttttgcaagttttgagagcggcaaagcgttaggcgttagggcatccacctcgtcgtaggcggcggtctccatgtcgaccgcatccggcaacggcaacggcggctcctcctcttccatgttatacgacttgtacggccctaatgcaaagcctgatgtggtttttaaggaggctgctttaaactctacgttaaatctgcaggatgttcagggtctagttacttgggttattggtgatggcatgctgccttcttgggtgtttgttaagaacaaacctcttatacccaaagttgtcctactatatgttcctggccttgatgcaactttatatatgtcacacactcgacttctttcttctctgaaagaattatgtggcaatccaaaacctgttttagcttcaagccgtatgccggatgagaggcacaccattgatgcgctcctaacctgcagagtaaagagaaagcgtgatgtaaaaacatcaaatgagtcatctaaacctgacatagatggaaaactatcaagtctggatgatcttggggacataccattccctgttacatattacactctctcagagaaagacttggaagataatggctactctttcaatttaccaggttttgtccctactgtttcagctccttcaggttcctcgccacataaagttcttgcacttgattgtgaaatgtgtgtgacaaaagctggatttgagctcacaagagtgacattaattgatattaaaggattggtggtgctagatagactagttaagcctgctaattcaatcattgattacaatacaaggttcagtggaatcactgctgagatgttggctgacgtgtccacaaccctgcaggaaattcaggaagagtttgttggacttgtatataaagaaacaattcttgttgggcattccttggaaaatgaccttatggcattacagatatcccatggtttaatcatcgatacagctgttttgtacaagtataagcgagggtctcgctgtaagattgctttgcgtgtcttgacgagaaagtttctcggccgggagatccagaacacaggatctggacatgacagtgtggaagatgctaaagctgctctagaacttgctatattgaaaatcaaacatggtcctgattttggttttcaaccatcgttgtcaaggcagaaattgacatctatactgcatgagagtgggaaaaaatgctcccttgttgatgatgtatctgttctcgagcggtattcagatacttcttgcaattcaattgctgttttttgtgatgatgatgccctctccagatcaatgaaggaggtgaagaataacaaagtcaccttcatttggactcagttctcaggattgatttcttacttccaccgaagagctcaagatccagaaaagttgaaatcatgtgtcgcagaggctattgcattaaaaacatgtgatggaaaaactgcttcaaaagaagcaagaagtaaaatttgtcctgaattaaaggaaattctgtgtggattggataaaaagataaagaaattatatggtgccctgcccgagaatgctatgcttattgtatgcactggccatggtgatactcctctagtacaaagattacggaaaatgcttcaccatgaagaagaaacaatagacagccgagaaactattgttcaagctttgggagatttacaagcccaagccgaagttgctctatgcttctgctgcgtcaaacgttaactgcatctttgaattagtgtgctgatgggtatggcttcggcgattataggagggtgtcaggcatgcatgctgacccgctgatgtgaaaagttccggcaggcagagattgaattttggaagctattctcatgctgtcttttttttcttttttctgtcagatactatgatcaggctgtagatgtcagcgtaaggcatagtgatgcattatcagaactggtctttcggtagcaggccagcatgtcagcatattaataggatcatttttcagatgaatatacggatcgcagaggaatgtaggaaactattgtaacagccatattattgtgataattaaaaccaagttctggaatcgatgatactacgaggcttgccatttacagttgcg

SEQ ID NO: 97082 - DNA, 728 bp, Zea Mays
ctcagtttcctccaccggacacctgctgccacccacacgatcaaaaacaaaaccaagctccaagcacccatagccacacaccacaccaggtcaaagcaaggagctcgatcgagagcaacaagccaacaacggccatcatgaactccagcttcatcgggctcaagcccgctgcggcagcagcccaggccaacaccgcggctgcctcgtcgccgatgaagcagcaggtgcaggtcgcgcccgagggccgccgcgccgcgctgctcggcctggcggccgtcttggctgtcactgccaccacggccggatcagccaaggctggggtcttcgacgagtacctcgagaagagcaaggctaacaaggagcttaacgacaagaagaggatggccaccagcgctgccaactttgcgcgcgcctacacagtcgagttcggcagctgccagttcccctacaacttcactgggtgccaggacctcgccaagcagaagaaagtacccttcctcagcgacgacctcgagatcgagtgcgaggggaaggagaagttcaagtgcggctccaacgttttctggaagtggtgaagcagcgtgcgtctgatatgatggaggagacctggtgtacatgtacgtgtgtatctagatgcatgtgcccagactgcaggaaacatgatatcaaatttgactgtcattctgtcaaccaaggttcaccgaaccggttccttacaaaaaccggtc

SEQ ID NO: 97083 - DNA, 125 bp, Zea Mays
gatttcaatggaaagtcttgaaacaattaatagtatttatagaaaaaatagcatcaaatttgtttaaaatttataaaatattccaaattcagataagtaaacctgtgatacgactaaaccgttcg

SEQ ID NO: 97084 - DNA, 273 bp, Zea Mays
atgacctcatcgggagtcgacacgcagccggaagcacagcaggcgcactacctagagtcacactccccaacaacacagtgccactccactccaaggaagtgcttgcctcccgctctctgcctctcctaccaatttcagctcagctcagctctgttctgctcccgcagcaccagtacagaacaccccagaggcagcgagtcctgttcggtgtccggctggaaggccatgggggctccaacgtcttctggaagtggtgaagcagcgcgcgtctga

SEQ ID NO: 97085 - DNA, 2453 bp, Zea Mays
atgacctcatcgggagtcgacacgcagccggaagcacagcaggcgcactacctagagtcacactccccagcaacacagtgccactccactccaaggaagtgcttgcctcccgctctctacctctcctaccaatttcagctcagctctgttctgctcccgcagcaccagtacagaacaccccagaggcagcgagtcctgttcggtgtccggctggaaggccatgggggctagggctacctcccctccgccatggaggcgtcactgcctctgccgcgccctccacttcctcgttctcttgctctggggtacttccgaggcaaacaaagaacaggccatgttgcctccaagagggtggaactcgtatgattctttttcatggattgtagacgaaaatgcatacctgcaaaatgcacagatcatgacagagaagttactcccacatggatatcagttattgatttcctctggtaccggaaatatgttgacggtgcatacacagattcctatggatttgacaacattgatgaatggggtcgaccttttccggaccttcaaagatttccatcgtctagagttgatagagggttcagtcaaattgccagtaaggttcatggaatgggcttgaaatttggcatccatttgatgaaagggataagtgtgcaggctgttaatgctgacacgcctatcttggacataaagacgggaaaaccatatctagaggatggccgtcagtggacagcacgagacataggtctcagtcacagaacttgtgcgtggatgactcatggatttatgagtgttaatacaaatattggagctggaagggccttcttaagatctctttatcgacaatatgctgattggggtgttgattttgtaaaggtcgattgtatcttcggcacagattatagcccagaagaaatcatcactatttcagaggaactgcagttactccagcattagctgagaatattagtgatcatgttaacatgtataggataactggagatgattgggacaactggaaggatgtgagctcgcattttggtgtatcaagttccttcgctactgctaagaagattggggccactgggttgcgaggaagatcttggccagacttagacatgcttccatttggatggcttactgatccaaaccctatttcttttgttaatgcaggtgtaaatcagggccctcacaggaaatgtaaccttactcttgatgaacagaaagcacaggttgttgatgatcacttcaaatttgagtgttctgtatcttttttgtatagtaatgaactcttttttctttgacatgaccttacagatggcactttggtcaatgactaaatcacctctcatgtatggaggagatttgaggaatcttgacgatagtacattaaacataattaccaattctggtttgttgaagataaaccactatagtagaaataacatggagttccattatgtgcacagtgaaaggacatcaaatggagaacattctggtcactttaggtctccttatcctgttcgtgttaccaagaatgatggcatatttgtcagtctcactgcttgcagcgacgatgcagctaaaggatggtatatgtttccacaagatgggaaaccagatcatatatgcaggaactatgaaatactgaatgataaaaatgtctcattttgcctcggaaaaacaaaacgttttcttgcatcggatgtccttaccatggacaccaaggaacaccaatcaaagtttcatatttcagttacaaacactgatgatacttgtttggatgcatctgctggtcgaaggcagactgcctcagagatcaggcttcctatgttctctgcatgcaggtggcatgcaaaacagatgtgggagttaaatgcgaatggaaatcttgtgagcagctattcaaggttatgtgccacagtggaatcaagggacgaaggaggtatatattacataacttttttattttgaactaagtgacatcactatattttcctatgaaatataggtaccagtggaggtcgggcatggattgcaactggaagtgaaggagaaatctatctcgcattcttcaatctcgactccatgagcaggaagatgaccgttcaaatatcagaccttggaaaggttctcggaagaaaccttttggagaaaaacccatgtagctacactgaagtttggagcgggaagaatttcggcccggtgaaggaagagatttcagcggtggttcattcgcatggctccatggtgttcgaaatcatatgttgagattgcagtactgggcaagttgttcgagaagtttgcagtgataatttagttgtaagctccattcctgttgatccttttttacccttagtccggagatggaagagatacgttgatgaaccattaactagatgtctgctggatttgacttcaatgaataacaaaacaaacaaacaaac

SEQ ID NO: 97086 - DNA, 2331 bp, Zea Mays
atgacctcatcgggagtcgacacgcagccggaagcacagcaggcgcactacctagagtcacactccccagcaacacagtgccactccactccaaggaagtgcttgcctcccgctctctacctctcctaccaatttcagctcagctctgttctgctcccgcagcaccagtacagaacaccccagaggcagcgagtcctgttcggtgtccggctggaaggccatgggggctagggctacctcccctccgccatggaggcgtcactgcctctgccgcgccctccacttcctcgttctcttgctctggggtacttccgaggcaaacaaagaacaggccatgttgcctccaagagggtggaactcgtatgattctttttcatggattgtagacgaaaatgcatacctgcaaaatgcacagatcatgacagagaagttactcccacatggatatcagtatgcagttattgatttcctctggtaccggaaatatgttgacggtgcatacacagattcctatggatttgacaacattgatgaatggggtcgaccttttccggaccttcaaagatttccatcgtctagagttgatagagggttcagtcaaattgccagtaaggttcatggaatgggcttgaaatttggcatccatttgatgaaagggataagtgtgcaggctgttaatgctgacacgcctatcttggacataaagacgggaaaaccatatctagaggatggccgtcagtggacagcacgagacataggtctcagtcacagaacttgtgcgtggatgactcatggatttatgagtgttaatacaaatattggagctggaagggccttcttaagatctctttatcgacaatatgctgattggggtgttgattttgtaaaggtcgattgtatcttcggcacagattatagcccagaagaaatcatcactatttcagagctattgcaagaaattgatcgtccgatcatcctgtcaatctcaccaggaactgcagttactccagcattagctgagaatattagtgatcatgttaacatgtataggataactggagatgattgggacaactggaaggatgtgagctcgcattttggtgtatcaagttccttcgctactgctaagaagattggggccactgggttgcgaggaagatcttggccagacttagacatgcttccatttggatggcttactgatccaagtgtaaatcagggccctcacaggaaatgtaaccttactcttgatgaacagaaagcacagatggcactttggtcaatgactaaatcacctctcatgtatggaggagatttgaggaatcttgacgatagtacattaaacataattaccaattctggtttgttgaagataaaccactatagtagaaataacatggagttccattatgtgcacagtgaaaggacatcaaatggagaacattctggtcactttaggtctccttatcctgttcgtgttaccaagaatgatggcatatttgtcagtctcactgcttgcagcgacgatgcagctaaaggatggtatatgtttccacaagatgggaaaccagatcatatatgcaggaactatgaaatactgaatgataaaaatgtctcattttgcctcggaaaaacaaaacgttttcttgcatcggatgtccttaccatggacaccaaggaacaccaatcaaagtttcatatttcagttacaaacactgatgatacttgtttggatgcatctgctggtcgaaggcagactgcctcagagatcaggcttcctatgttctctgcatgcaggtggcatgcaaaacagatgtgggagttaaatgcgaatggaaatcttgtgagcagctattcaaggttatgtgccacagtggaatcaagggacgaaggaggtaccagtggaggtcgggcatggattgcaactggaagtgaaggagaaatctatctcgcattcttcaatctcgactccatgagcaggaagatgaccgttcaaatatcagaccttggaaaggttctcggaagaaaccttttggagaaaaacccatgtagctacactgaagtttggagcgggaagaatttcggcccggtgaaggaagagatttcagcggtggttcattcgcatggctccatggtgttcgaaatcatatgttgagattgcagtactgggcaagttgttcgagaagtttgcagtgataatttagttgtaagctccattcctgttgatccttttttacccttagtccggagatggaagagatacgttgatgaaccattaactagatgtctgctggatttgacttcaatgaataacaaaacaaacaaacaaac

SEQ ID NO: 97087 - DNA, 1624 bp, Zea Mays
aaaccaagatctcctgaccaccaacatctttcccatccagctagcagcagttaataaattaaaaagagatgacggagaaggtgctagttctgatcgttggtgcaggtccatcaggccttgctgtagcagcatgcctcggcgagcacggcatcccgtaccacattgtggagcgcgaggactgcagcgcttcgctgtggcgcaaacgcacgtacgatcgcctcaaactccacctcgccaaggagttctgcgagctccctcgcatgtcgcatccgagcgacgcccccaagtacatcacgagggagcagttcgtgaggtacgtcgacgactacgtcgagcgcttcaacatcctccccaggtacagcacctcggtcgagtcctgcgagtacgacgaggccagcggccgctgggacgtcagagcgcgtgacctagcggacggcggcggccgagtggccgagtacacgaccaggttcttggtcgtagccaccggcgagaactgcgagggagtcatcccggatatccctgggctgcgcgatttcccggctggtgaggtcgtgcactcgtcgagctacaagtcgtggaagaactatgccgggaagagagtcctggtggttgggtgtggcaactctggcatggagattgcatatgatcttgcctacaatggagtggaaacctccttggttatccgtagcccggtgcatgttatgaccaagggtctgatttacttgggcatgaggctgctgaaatggcaccttcccgtgaaacttgtggacttcatcatcttgaccttggcaaacatccagttcggtgacctctcccgctacggcatagtcaggcccgacatgggcccgcttcttctcaaggccaagactggccggtcagctgtcctagacgttggcacaactcagttaataaagactggcgatatcaaggtggttggggcaatatctcgcatcagaggaaacacagtggagttcgaggatgggaaggagagggacttcgattctctcgtgttcgcaacaggatatagaagcactgcgaacacgtggcttaaggacggtgggagcttgctagacgacaatggcatgccgaagaagaaggcggcggggccgcagcagggcagtcggccatggaagggcggcaacgggctctactgcgttgggctggggatggctggactggctggcatctctcgtgacgcagtgagcgttgctgcggacatcaaggccgcggtggattccatggtggggccgccggcgttctggttctgatcgaacagcttagatctatctgctagctcgatcgtcgatgcatggacggagtgaagaataataacgttacgtacgtacgtaccgcgcgatcgagaggagatcatcgatctctatccatccgacgtgtggtgcgtgcgtgcgtgctgctggttaagaataattaagtaagagtgtttgttattggctagctatagctagctttgtgaacgtaccctttattgtctgtgtgtgcagtgtgtgtgttgtaccgtcgttccgctagctctgtgtttgtttccttgatagcagctttgtgtttgtatatatgtgtgtcgtgtttaattaatatttatatatgctgtcatttgtcatacata

SEQ ID NO: 97088 - DNA, 104 bp, Zea Mays
gcatggagacatcacaacttcactttccaaaagtcatcactccgaggaaaacatgtatgcttaacacatttcctgtttgcttttctaaatatgcaccttttaat

SEQ ID NO: 97089 - DNA, 1342 bp, Zea Mays
ctctgcttcactgcaggtggtcgaagaagaagaaggccctcgatctcctgccctccactccaccagagccggtgcgatcccggtcccgaccgacctcagcacagcatgttcgtggtcgaggacaagggcggcgccatcgcgctgatgctggcgtcgctgctgttcctgggcacgtggccggccgtgctgacgctgctggagcgccgaggccggctgccgcagcacacgtacctggactactccgtcacgaacctcctcgcggccgtgctcatcgcgctcaccttcggccagctcgggggcgccaggcgcggcatgcccaacttcctcacgcagctcggccagcccaactggccttccgtgctgttcgccatggccggaggcgtcgtgctcagcgtcgggaacctctccacccagtacgcttgggcctacgtcggtctctccgtcaccgaggtcgtcagctccagcatggtggtcgtcattggcacgacgctgaactacttcctggacaaccgcatcaacagggcagagattctgtttcccggcgtggcatgcttccttgttgctgtcatccttggctctgctgtccacgcctccaacgcagctgacaacgaggagaagctcagtgcctccacaaatgcctaccagcttggtaggacagctggggctgcggaaccaagcaagcatgtcctagacaaagatgttgccaaggacttggagaatggagtctctggaacaaagcaagctgacaaagcggaggcaggcaccgcagaatacctcattcaactcgaagagcggcggtcaatcaaggtattcggttcaaacacgttcatcggtctggggatcgtgttcttcgcgggggcgtgcttctcgctcttctccccggcgttcaacctggcaaccaacgaccagtggcgcacgctcaggggcggcgtgccgcacctggtggtctacaccgccttcttctacttctccgtcgcgtgcttcgccgtcggcgtcggcctcaacgtgctgttcctctaccgccccatggccggggtgcccaggtcctcccctcggggcctacctcggggactgggacggccggcactgggcgctcctcgccggcctgctctgcggcttcggcaacggcctccagttcacgggcgggcaggccgcgggctacgccgccgccgacgcggtccaggcgctgccgctcgtcagcaccttctggggcgtactgctctttggggagtaccgcaagtcgtcgcggaagacgtacctcctgctcggcttcatgctcttcatgttcgtcgccgccgtcgccgtgctcatggcttcgtcaggtcacaggaccacagagtga

SEQ ID NO: 97090 - DNA, 1488 bp, Zea Mays
ctctgcttcactgcaggtggtcgaagaagaagaaggccctcgatctcctgccctccactccaccagagccggtgcgatcccggtcccgaccgacctcagcacagcatgttcgtggtcgaggacaagggcggcgccatcgcgctgatgctggcgtcgctgctgttcctgggcacgtggccggccgtgctgacgctgctggagcgccgaggccggctgccgcagcacacgtacctggactactccgtcacgaacctcctcgcggccgtgctcatcgcgctcaccttcggccagctcgggggcgccaggcgcggcatgcccaacttcctcacgcagctcggccagcccaactggccttccgtgctgttcgccatggccggaggcgtcgtgctcagcgtcgggaacctctccacccagtacgcttgggcctacgtcggtctctccgtcaccgaggtcgtcagctccagcatggtggtcgtcattggcacgacgctgaactacttcctggacaaccgcatcaacagggcagagattctgtttcccggcgtggcatgcttccttgttgctgtcatccttggctctgctgtccacgcctccaacgcagctgacaacgaggagaagctcagtgcctccacaaatgcctaccagcttggtaggacagctggggctgcggaaccaagcaagcatgtcctagacaaagatgttgccaaggacttggagaatggagtctctggaacaaagcaagctgacaaagcggaggcaggcaccgcagaatacctcattcaactcgaagagcggcggtcaatcaaggtattcggttcaaacacgttcatcggtctggggatcgtgttcttcgcgggggcgtgcttctcgctcttctccccggcgttcaacctggcaaccaacgaccagtggcgcacgctcaggggcggcgtgccgcacctggtggtctacaccgccttcttctacttctccgtcgcgtgcttcgccgtcggcgtcggcctcaacgtgctgttcctctaccgccccatggccggggtgcccaggtcctcccctcggggcctacctcggggactgggacggccggcactgggcgctcctcgccggcctgctctgcggcttcggcaacggcctccagttcacgggcgggcaggccgcgggctacgccgccgccgacgcggtccaggcgctgccgctcgtcagcaccttctggggcgtactgctctttggggagtaccgcaagtcgtcgcggaagacgtacctcctgctcggcttcatgctcttcatgttcgtcgccgccgtcgccgtgctcatggcttcgtcaggtcacaggaccacagagtgatcctggtcctgtcagtcaggctgtcacgccctaacatgcatgaaatcttcggtacaaaggaatggagatgtacataaaaatgtttctgttgtgattgatcaggtatatagcaccatataaaaattaaagctatttatattctttcc

SEQ ID NO: 97091 - DNA, 560 bp, Zea Mays
ttcttcacgcgtgtctctctctccctggtgcctgctcgcgacaagctcctgctcccttccgtggtcgcgtgctcagctcttctgcaggccgcgcccagcttctcaccctcggcgctcacagctctctctctcccctagtccctgccatggccgccgttccctgatcggagtttgttctagctcggatctcctccctacggcgcccgagctccatggctgctgcgttcttcagccgacgcgtcctgccgagtccctctccatccccacggcgtccagccatggcgccccagctcgcggcgtccctattttttttcctatcgtcggcgctctgctcgctctctggtcttcctgcgcgctctccactcggcttctgcttattccaatgccgcgcatggtgcttcggctagccgtggccgcgcgctgtgaagctcccagcgtcgcgtccccgagctcccaaccatggcgcttcttccagccgcgccgtcgccttgctactcgcccatccttgcggcatttcgtccatggccgctgtcccccgtcgagtccctgcgcgcgcagct

SEQ ID NO: 97092 - DNA, 561 bp, Zea Mays
ctgtcttttgtttctatggatatctcaaaattgttgatttggaatgtaaggggactcaataataagtctcgtcgggattctgttcgtagtttgattgattctgtgaagccagaagtggtttgtttgcaagaaacaaaaaaggaaaatatttctagatggacagtcatgtcgacccttggggctgattttgatgaatttgtgttcctcccagcagagggttctcggggtggcatcttggtggcttggaagggcattgtgtgcaaggctattgcatcaagggtggatgttttttctgtttctgttcagttccagcagagtgagggccccccttggtggttcactggagtttatggcccacagtcggacgtcctgaaggtgcaatttctgcaagaacttcgtaacattcgccttacgtgtgctggaccgtgggctgttggaggggatttcaacctcatttataaagtggaagacaaaaataatcaaaatgttgacagggcaatgatgggccgttttcgtcgtcttcttaatgagcttgaattggtggaaattgatcttttgggt

SEQ ID NO: 97093 - DNA, 113 bp, Zea Mays
ctatttctcaaatgtgtagaatatatatttattgtttcattaatataagaggagagaaaaacaaaagtggaagggaaggcactctcccactcaaaaagacacaaccagacaag

SEQ ID NO: 97094 - DNA, 545 bp, Zea Mays
aggccgtaattactgaaatcaatgaaaatattggtactactggtgtagtcagccaggagtgcaaggctattgtttctcaatgcggacaacaaatcctagatcttttgctagctgagcactcaagcaagaggcagcccttccgatcttatgagatcaagatattttctggtcctaaacccatgaagatagttatgcacaagcttgttgctgggatattgcttcttgatgcaggagctgagaagagtcgactatttcagcagcaaggaattgccacaagtattggaaaggataatgaggaagaagcttcgctttttgtcatactgtatttgcttctggccagtgttatttttctaccattattttagaaaatcgctggaggattccaagtttgccattccttcggaggaggcactggatctggaatgggcacccttctcatcacaaagatcggggaggagtaccttgatcggatgatgctcacttttttgtctttctctcacccgaggtttccgacattgtttgctgacagtccaacaattggttga

SEQ ID NO: 97095 - DNA, 390 bp, Zea Mays
tattttagcagcttcacgatgaagttgcttgaggaaggttttgatctttgtgcacatctgctagctctgtgacggtaccgtttcatggaaatatctgactaggcagattctttattactcaatttatcttaaggaaaatggtcatttgttaaatctgagcagaaaagatcggaaatccaagggcttatggaattggtattgcagagatcttcatgtgattcggatccttataaggaataatttatatacatgagggagccacctattgattcttttgatgtctctacatgtggtcttgatttgctggatgacatcttgttgggttataaagctgaatggccaatgaatattggcattacagtagacgcactaaaaatacatgctaaaata

SEQ ID NO: 97096 - DNA, 94 bp, Zea Mays
tattgattcttttgatgtctctacatgtgttgatgcggaggaagccggtagcgcggctatggtcactgagaagaaggtcgccgcggctgtgtag

SEQ ID NO: 97097 - DNA, 513 bp, Zea Mays
atggattccgcacgaccgccgtggattccgcgcccacgccgccagccatggcgcggaacggccgcctccctacgcccgcggaacaaccgcgcagaaacctccgcgcgccgtgcctacgcgaaccccaccccagccgcaaacgcccgcgccgcccgcacgccacgcaatccgctcctcccttcgcctgagattgtcgtcatcagtctgcgccgcgccggatccgtctgctccccccgctcgcgatggcagccccagctatgcccgcgtcgagccctcaccaacggatccgaggatctcctacctctctgcgccggatcagctcctccctccacccgagattgtcgtcatcagtccgctctacgtcagatccgtctgctcccccgctcgcgatggcacccgcgtggaacagcctcctcccttattggacctcgccaccgtgctcgtcgtccgtctctgcccaagcccatctacctcatcaactttgcatgctacaatctggccgacgagctcaag

SEQ ID NO: 97098 - DNA, 851 bp, Zea Mays
tataaaaatacactgcagtgcatagttgagggatataacttagtttttcaagcctgtccatctccagcagatggtttagttggggaagaatcttatgctcaggtacaaattggtaggcaaattctaggcaaaggagttgggttaacatgggaagaggccaagctccaggtggtggcatcaatggactggcttgaaatcaccaagtacagagttctggtttctactcaaccacacctactgagtttgatttctacttgtgtagtcatgctggcattcagggcaacagacttcaccagcaccccttcctccatcggcacaggtacaatccctagcgagaagatgcatcttagcgagatcgaggggattgagggtctgcgattcacggtgaccagcgggtacaggacaatgttggagttgggagttttagataggaggagcagagggtgatcgaggtgcagattaggatgtggcagcagggggtacaggacaatgtagagcagatgaaggacaagcagactgcaactggctccatgctggcctaatccatttggttgtgaacatgctaagtttgttgtttattggaatccgccttgagcagcaatttggatttgttcgcattggtgcaatatacctactgtctggttttggtggcagcgtgttgtctgcactcttcctacggaacagctacatctccgttggtgcttctggagctctatttggcctgctgggatccatgctttctgaactactcatgaactggactatatactccaacaaggccagtataagcaataaatgaataacattttattttatccagttgattgataatcgcttagctcatctactta

SEQ ID NO: 97099 - DNA, 1325 bp, Zea Mays
gaatagcaaggatcgaatggacagctgattgcttgagcccatcggacggccgcgtggctcccaggagccctatatcaccatccttgcccaccgcctcccctcatcaccagcgtccgccaccgccgccgcctttcgtaccgcggcccctaaacccctttcctcgttcccctccgtctctcagttaggcacaatgatgctagctaataagcttggtggtctgctcaagaatgctacgagttcaaatatgtctgtctaccaagcaatcagatgcatgtcatcatccaagctttttgttggagggctttcttatggaaccgatgatcacagtctcagagacgagtttgccaaatatggacaagttattgaagctaagattatccttgatcgtgagtctgggaggtccagaggttttggctttataacttacacgtcttctgaggaggcttcggctgccatcactgccatggatggaaagactctggatggacggaacatacgggttaatcatgctaacgagaggacaggtggcttccgcagcagcggtggttatggtggtggcggctatggtggtggtggtggtggctatggtggcggtggctatggtggcggctatggtggtggtagcggtggctatggcggcggcggcagtggtgactatggtggcggcagcggtggatatggtggcaactacggcgacagggctggtggtggctatggtggtggtggtgattatggagttgcaggtggggctgaaggcagttttgctgctggaggtagcgacagctttggcagcagtaactttgctgacagtggttttggtgaaaaccctgctggtagctttggcgcaatgggtggttccagtggcgctgatgggttctctgccggcacacctggtgacggtaacaagaatgatgaaatcatggatgatctcttcaaggacgatgagcctgacagctacgccaacaagaggagctaatttgtgtccaccaccaccatgcgaggccgtgtggattctaggccatatgtattcggtagtgttttctgttaacatgataggtgtctgatgtctaaataatggaacgagtccttttgttgagtttgagttgtggaactttcaaagcgtgcgttgcatgctggcgcttgtgccggcaaacatggcatactttcatgttatattgttatttgctagtacctgtgtgccttggtgggagtcgatctggcttacaaatggggtcttgtccgagaattgccagcagaccgtgtagactgcactgttgccggtcgtgcggcagaactgcagtaagacattatgcagcagtttatcc

SEQ ID NO: 97100 - DNA, 1058 bp, Zea Mays
gagccctatatcaccatccttgcccaccgcctcccctcatcaccagcgtccgccaccgccgccgcctttcgtaccgcggcccctaaacccctttcttatggaaccgatgatcacagtctcagagacgagtttgccaaatatggacaagttattgaagctaagattatccttgatcgtgagtctgggaggtccagaggttttggctttataacttacacgtcttctgaggaggcttcggctgccatcactgccatggatggaaagactctggatggacggaacatacgggttaatcatgctaacgagaggacaggtggcttccgcagcagcggtggttatggtggtggcggctatggtggtggtggtggtggctatggtggcggtggctatggtggcggctatggtggtggtagcggtggctatggcggcggcggcagtggtgactatggtggcggcagcggtggatatggtggcaactacggcgacagggctggtggtggctatggtggtggtggtgattatggagttgcaggtggggctgaaggcagttttgctgctggaggtagcgacagctttggcagcagtaactttgctgacagtggttttggtgaaaaccctgctggtagctttggcgcaatgggtggttccagtggcgctgatgggttctctgccggcacacctggtgacggtaacaagaatgatgaaatcatggatgatctcttcaaggacgatgagcctgacagctacgccaacaagaggagctaatttgtgtccaccaccaccatgcgaggccgtgtggattctaggccatatgtattcggtagtgttttctgttaacatgataggtgtctgatgtctaaataatggaacgagtccttttgttgagtttgagttgtggaactttcaaagcgtgcgttgcatgctggcgcttgtgccggcaaacatggcatactttcatgttatattgttatttgctagtacctgtgtgccttggtgggagtcgatctggcttacaaatggggtcttgtccgagaattgccagcagaccgtgtagactg

SEQ ID NO: 97101 - DNA, 1711 bp, Zea Mays
aacgacgatgaaatcaatacctgagggtgtgcaacgcaagctcctcctccacctccaccctctaaaataagacgttgcagccaaccaggggaggccctccgcggtccgtggctccgtgccatcctctcctgggcagcgagcagtggtggccgcgggttcccccgcctcgtcctcccggatccggcgacgaagattaattgaataacttcgataagatgggtcgtggtattagcagtgggggtggtcagagttccttgggctatctctttggcagtgacgaagctccaaaatcatttgagaagcctgcaccagttcaaaagccaactcctccatcctctgcagagagactaaaagatatcgctgctggtattcaaagtagtaaatcaaacaattacaaaagatctgaaggccagaactgtggaaatttccttacggtcagtatccaatgacacctgtgaacattttgattatgctattttggagcaccagttgagtgctgtgcaggtggagcaagaaaaagtttatacttgctctcattcatagtttgttcttagcctatgatctagaagtacttgtttaggttttgctgcaagaagcacccttcataatatgattacggtgctgtgttctgtatttacattaatatgacatggaacatggttatgatgacaagttctctctactgatctcaccttgttgtacttctatggtttgcccttcttctctgtggtagatgaagtcatactaaatcatttgcagttataagagcctggtatttgacattatgacaataaatacttgtagcattttatcggaatcatggttgttaatcctatagtatgtcattagtgccagccagaataatctctgttgtctgttggtatgtgttgagctttggtaatttaacaagagttctacttgtgggtttacaatttacttgtgctttacagtaatccaaacttccaaacttgtgcttcacatgctgatgcaatttgcgttaaatatacctgcttgcttgtctgtccttagaatattctgatggatagtcccttcgattgtttcaattctttgcttttgcacttctactcatagtgaatagtttgccaaataccttttacatgacaacggaatctttgtggccatttatccaaacagcctgtttgttaatgttcttagattgcggctgaaaatgcacaaaggcaaaatctctaccttgaaatatttgtacatttgcggatattagctgttgtgggatgctgcaggaccgtccgtcgaccaaggtgcaagcagctccaggtggcgactcttcactcggttatctttttagtggcagcaaagatggcaagtgatgtacacctgctgttagtgttcgccatgatcatgggagaaggtttctgcttaacaaaggaaaaagggaaaagaatcttgtattcccatgagtaaatatcaaactgctcatggtatctatgttgttgggattgcttgtatgtgtgtacatgttcgtgtgtgtcgtgtgttgatccacagctactggtagcaagagcttctatccctgctgatggaattgtgcgcaatgccaatgttgacattatcgtgggtgatgctattatgttgtggtgtattattggatatgtttgctgtttaatacacattgttgtagaaaaaaacatccacagttctgttcaatttcagagtgtcctgttcaattttc

SEQ ID NO: 97102 - DNA, 884 bp, Zea Mays
aacgacgatgaaatcaatacctgagggtgtgcaacgcaagctcctcctccacctccaccctctaaaataagacgttgcagccaaccaggggaggccctccgcggtccgtggctccgtgccatcctctcctgggcagcgagcagtggtggccgcgggttcccccgcctcgtcctcccggatccggcgacgaagattaattgaataacttcgataagatgggtcgtggtattagcagtgggggtggtcagagttccttgggctatctctttggcagtgacgaagctccaaaatcatttgagaagcctgcaccagttcaaaagccaactcctccatcctctgcagagagactaaaagatatcgctgctggtattcaaagtagtaaatcaaacaattacaaaagatctgaaggccagaactgtggaaatttccttacggaccgtccgtcgaccaaggtgcaagcagctccaggtggcgactcttcactcggttatctttttagtggcagcaaagatggcaagtgatgtacacctgctgttagtgttcgccatgatcatgggagaaggtttctgcttaacaaaggaaaaagggaaaagaatcttgtattcccatgagtaaatatcaaactgctcatggtatctatgttgttgggattgcttgtatgtgtgtacatgttcgtgtgtgtcgtgtgttgatccacagctactggtagcaagagcttctatccctgctgatggaattgtgcgcaatgccaatgttgacattatcgtgggtgatgctattatgttgtggtgtattattggatatgtttgctgtttaatacacattgttgtagaaaaaaacatccacagttctgttcaatttcagagtgtcctgttcaattttca

SEQ ID NO: 97103 - DNA, 1414 bp, Zea Mays
ccctgcgtgtgcgtgctgcgtgctgctactatatataaattgcaagcaagctaggcaggcaggctagcccagcgctcggccctcggctccttaaggcttcatcttctcaagttccggccgtccatcgccgccgccggcctcggccggctcagttcctgcctgccagccaaaaattccacaccacccacccagagactgaggcgcgcggtggtgaagacgtgatcgaaagtcgaaaccaaaacgatatatagatggggcgcgggcgcggcaaggtggaggtgcgtcgcatcgagaacagcgtgagccggcaggtgaccttctcgaagcggcggcgcgggctggcgaagaaggcgcgggagctggccgtgctctgcgacgccgacgtcgcgctgctcgtcttctccgacaagggcaggctccacgacttcgccgcgcacggcagcatggagcgaatccttggccgatacgagaggtacttgctatgtgaagatagggacgatgtaacccaagactaccctgaagaatcgcaggggaacatgagctatgaccacatcaagttgaggtccaaactcgaagctataaagaagagccaaaggaatctcatgggggagcagctcgagtccctgacgttcagagaggtacagcagcttgagcaccggatagacagcgctctgaggaacgtcagatccaggaaggaccacatcttgctcaactcgatccaggagctccggaacaaggaaacttttctgatggaacaaaatggcattctagagaaggagaaggctgcagtgggggcatcatcatccctgcacaccaccaccagcaccgcagcagcttcttccacggcagcggcggcggcggcccttccaaacctgaacatctgtcccgacgactccgacgagccaggaatggcggcggcggcggggatcaggttgccgtggtggatgctccagccatctgccgtcagccaacggcaggaacagcactgaactgcttgtcttctcagatgatccacgctgcttgttccagctcgattctagtttctattagaactcgattcagctaaggcgggaatttgtgatctttctattgatctgccgttcttattggttgctagatcgattttatccttgtccttcttagtatctgaacctctgctgtgtcgtttgtcgtagttcttggtcgcaaaagctccggtttgcgtctctagtttggtttggttcctgtaaaatctgctgttgtccttcaatgagctgtgcaggccagttagatgattacttccactaacactatgacagacaattaggcccgagaaggcccaggctgcctttggcatatggatcaaatttgggctccgatggcccaacttttgataaattcgagctagtccatctgggctcatttttcagaaaat

SEQ ID NO: 97104 - DNA, 1372 bp, Zea Mays
ccctgcgtgtgcgtgctgcgtgctgctactatatataaattgcaagcaagctaggcaggcaggctagcccagcgctcggccctcggctccttaaggcttcatcttctcaagttccggccgtccatcgccgccgccggcctcggccggctcagttcctgcctgccagccaaaaattccacaccacccacccagagactgaggcgcgcggtggtgaagacgtgatcgaaagtcgaaaccaaaacgatatatagatggggcgcgggcgcggcaaggtggaggtgcgtcgcatcgagaacagcgtgagccggcaggtgaccttctcgaagcggcggcgcgggctggcgaagaaggcgcgggagctggccgtgctctgcgacgccgacgtcgcgctgctcgtcttctccgacaagggcaggctccacgacttcgccgcgcacggcagcatggagcgaatccttggccgatacgagaggtacttgctatgtgaagatagggacgatgtaacccaagactaccctgaagaatcgcaggggaacatgagctatgaccacatcaagttgaggtccaaactcgaagctataaagaagagccaaaggaatctcatgggggagcagctcgagtccctgacgttcagagaggtacagcagcttgagcaccggatagacagcgctctgaggaacgtcagatccaggaaggaaacttttctgatggaacaaaatggcattctagagaaggagaaggctgcagtgggggcatcatcatccctgcacaccaccaccagcaccgcagcagcttcttccacggcagcggcggcggcggcccttccaaacctgaacatctgtcccgacgactccgacgagccaggaatggcggcggcggcggggatcaggttgccgtggtggatgctccagccatctgccgtcagccaacggcaggaacagcactgaactgcttgtcttctcagatgatccacgctgcttgttccagctcgattctagtttctattagaactcgattcagctaaggcgggaatttgtgatctttctattgatctgccgttcttattggttgctagatcgattttatccttgtccttcttagtatctgaacctctgctgtgtcgtttgtcgtagttcttggtcgcaaaagctccggtttgcgtctctagtttggtttggttcctgtaaaatctgctgttgtccttcaatgagctgtgcaggccagttagatgattacttccactaacactatgacagacaattaggcccgagaaggcccaggctgcctttggcatatggatcaaatttgggctccgatggcccaacttttgataaattcgagctagtccatctgggctcatttttcagaaaat

SEQ ID NO: 97105 - DNA, 762 bp, Zea Mays
cgccctgcaaacgagcgagcatcctccatgtccaggccgctctcttccttctgcctccaccggatcaggtccggcggcaccgcgtccaccgccgcgcctccatcgatatgcgccaacaaggacgacggcggcggcggcggcggcggagagagcaggtccctaaaggatggcaagcaaaaggacgagtgggaggaggctaacgagaagggcagcgcagaggccgtcgtcgtggggaggaaggtgatggtggcggcggcggacggcggcggcgaggaggcccgcacggcgctgcagtgggcgctgtcgcacgccgtccggccctgcgacacggtggtcctgctcgacgtcgccagcggcaagaaccgtacgtgcgtaagctgcgtgtgaccaataaccatctattttaagtcctgctggttacagtacaggctccgtcgcgtgcttgaaaacagagggagatggctcttccttgtttttgttgcgtggtcgtctcgatcaggacgcgatccgagagggagtccgcacctggaggccttgaggagcatctgccaggccaagagaccagaggtaactaaccagcaccaaaattagctgaagacatcctctagctaatagtttagatatgagatattgtttagcaaattaactaatatttaactagctgattacactagcaatttttttagctaattagttttagtgcattcaaacatcacctaactaaatgtgacgtcaaagattaagattggcattgatgttggc

SEQ ID NO: 97106 - DNA, 925 bp, Zea Mays
gcaaacgagcgagcatcctccatgtccaggccgctctcttccttctgcctccaccggatcaggtccggcggcaccgcgtccaccgccgcgcctccatcgatatgcgccaacaaggacgacggcggcggcggcggcggcggagagagcaggtccctaaaggatggcaagcaaaaggacgagtgggaggaggctaacgagaagggcagcgcagaggccgtcgtcgtggggaggaaggtgatggtggcggcggcggacggcggcggcgaggaggcccgcacggcgctgcagtgggcgctgtcgcacgccgtccggccctgcgacacggtggtcctgctcgacgtcgccagcggcaagaaccgacgcgatccgagagggagtccgcacctggaggccttgaggagcatctgccaggccaagagaccagaggtgtgcgtggaactttcgctggcggagggcggcaaggaccgggggccggcgatagtggaggcggcgaggaagcagggcgtttcgctcctcgtcgtggggcagaagaagcggtccgtcacgtggcggctgctgtccatgtggatcgccggcgtcaagggcgggggcgggggcggctacaccagcgccgccgactactgcgtgcagcacgcggcgtgcatggcgctggccgtccggcgcaagagccggcgagggggcggctacctcatcaccaccaggcggcagagggatttctggctcctggcttgactatagtggaatagcgaacggagtggctcaggtttataggcatagtatttatgggccgcaaaaataataattaatgcagtagattgctgtgggctgtgttttgttgctgttttagaactgacatgatatcatggattgcgtttttgcaataaaaatcaagcagcataacttggagttgtgtgccatccataag

SEQ ID NO: 97107 - DNA, 632 bp, Zea Mays
atatactttccaaagagagaaagggcaggcccagctctagcctttccaaagtgcgcgcaatctcctctgccgcatccgatattccgatctcgatcccgcgacgcggtgtctccggtcagcgccgccgccttctccctcgccggccgccactgcatcgccgcagtcgccatgaattatatcattggagcattcaagccaccttgtgacatctcgatcacattctctgatgcgaggactaggaagcaggtttcggttaagaaggacaatgggaagacaacgatggtccctgttttccagagcctcgaaactatatctggagaagtatcaatagcaccagttccaggtaaaaggattgaacacacgggtgtcaaaattgagttgctaggccaaatagagctctattttgaccgagggaacttctatgacttcacttcgttagtacgtgagttagatattcctggtgaaatctatgaaaggaagacgtttccatttgaattttcaactgttgaaatgccatatgagtcttacaatgggacgaatgtcagactcaggtaagcaattgctatgatatagccatatagagcagcacttttattatgttttgttttcatttttactgctaaaggttttag

SEQ ID NO: 97108 - DNA, 211 bp, Zea Mays
ctaaagtggtccaggagattagcgaagatgccaccttctggcgccttgctggagcccctagggctgtgggctgagatgtctcttggtactatggatacgtttgtctatgtaaggtgttggccgccataaaaagccacaccatttttgtaccgccccattttggggctcaccttcttattttaatgaaatgcagctctcctgcgttttcgag

SEQ ID NO: 97109 - DNA, 354 bp, Zea Mays
atggttgctctatgggaagaaggggctcggctgaagcttgaggggaacaggggggagcggccctggcgtggccgagcgcgcgaggagggggagctgagggtaggagaatggcgtggaggagaagggaagaggagtgggctgccatttatgaaggaggagagctccagagcacggctgccacgtttctccattgcagcaattcatcgaacacgtggtgagtgctacagtagcgacattgggcggccatttttggcgttttctgcttggattcggacatgggtcactgtagcaaagatatttcccacgcaatactctacaagtttgattaagggttctcagccatttgcaaactag

SEQ ID NO: 97110 - DNA, 1467 bp, Zea Mays
aggcccatacatcccttgcctctttctcctcccccgcatctgcttctttctctccacgccaacccgacaccgcgcggtcggctcggctcggccatccccgccagctcccgctcgagatcccagcgccatgacgatcggcgtcgctctcttgctcgacctcacctcccgcctgccccgcgccggggcatccgccgcctccgcagccgtccgctcccaccccggtctctctaccaccgccttcgccgcgactgccgcggccgcgttgtcgtcctccggggtgccgctctccgcgcgccacctcttcggttttcatgggtttactgttgctcattgtgatgctggcacacctgctggatggaatgatggttctgatgatcttgttaatgagattaataccaagattattgattccttgcaatatgcaagaaaagactacttccagaacacaacaaaggaatacccttcagagctgaagccactcttttctgcctttgggttgaaaaattttactatcacaaccctaaggtctttcctattatattatttgccactcatacaacctaaacctcacactggttctgatgatgaggatgatgatctgcttcatgacactcaagagaaaaccatggatctggttactcccttctacaattcagtaaagcaaatcgtgcgggagacttctattgtaacgaccagacgagtatttgaaaggattgtagttcgtcatgtttcacaaagaacagcatggaaacttctcaaagatgcttcaaaatcatcaaaaaggaaagctgcaagggggatgccaactccacagtacacatactgtgttgccagaacaactttccgagcacatgcactgggaataaccgctgcttgggtagtgcaatccataattgaagtatacagatgtttcatccgtaagcctagtgaggactgtgaagcactatcaagcgacggcaatgaacagtttgacgatatgaataaattcagattgtttgggaggaagatttatgggattaccatcaaaagttgtttctctttggttttggcctcagctggagcaggcattggtgccctcgtgcatccagtgcatggacaatggttgggttgtgccttgggagatgttgcaggtccaattatcgctataattgtttttaagaagatgcagctaccactatgagagactggatttttggcgaccactggttttgggtcccttgtgcaagtcatggccttcagtcttctgtgtggttggagatccctgatctaacttgaaagttcacagttgatgaataacagctttcacctcagtgctcgtagttttgtagctccctttacaagatgccttcgggtcttgtgggacatgagcatgtacttttgcagttttgctaaattttgtactgtctcagatttgaaggatccaaacaagaaatttaattttactagatttgaaaggaattggtttga

SEQ ID NO: 97111 - DNA, 768 bp, Zea Mays
aaagggaaaagttgaaatcgtttatttccatcccctcctcccttatctcccgcgctctgctcctcccagtcccagactcccatcctcgtctccgccatggccgccgtcggcatcccctcccctccggcgccacacgtcttcgcgcccgccgcatctccttcctcctccacgtactccacactggccccccgccgtctccgcctctccacccgactcggactcgccgccgccgcggcgtcgtgccgtacgcggtgcgccgccgctgccgatggcggggccgcggcctcggagggtgcctctgcggtggcggagctggagggggaccccgacgctggcacagacgttgccggaggcgccgcgacctccacgcggccgccctactcgctcatctccgcggacaacgtgcagaaggcgatgcgcggcctcgcaattacagatgctgaccactatgggaggcttggagtcaccaggctagcttctactgatgaggtaaaagctgcgtacgagaagatgtgtgaagaactaaatagcaaagaactagaagaagaggagcttaacaaggaacatgagctcctaaaggaatcatttactatactatcaaccgaggaagaacgaagattatatgattggagcttgtcaagaagtggacagcctgagcgatatgtctggccatttgaagttgatccattggagttggcaccagatcctccaaaggttcgcatcagttcaaagcaaaactgtggttttatgaggatgacttgtcctttt

SEQ ID NO: 97112 - DNA, 1033 bp, Zea Mays
aaagggaaaagttgaaatcgtttatttccatcccctcctcccttatctcccgcgctctgctcctcccagtcccagactcccatcctcgtctccgccatggccgccgtcggcatcccctcccctccggcgccacacgtcttcgcgcccgccgcatctccttcctcctccacgtactccacactggccccccgccgtctccgcctctccacccgactcggactcgccgccgccgcggcgtcgtgccgtacgcggtgcgccgccgctgccgatggcggggccgcggcctcggagggtgcctctgcggtggcggagctggagggggaccccgacgctggcacagacgttgccggaggcgccgcgacctccacgcggccgccctactcgctcatctccgcggacaacgtgcagaaggcgatgcgcggcctcgcaattacagatgctgaccactatgggaggcttggagtcaccaggctagcttctactgatgaggtaaaagctgcgtacgagaagatgtgtgaagaactaaatagcaaagaactagaagaagaggagcttaacaaggaacatgagctcctaaaggaatcatttactatactatcaaccgaggaagaacgaagattatatgattggagcttgtcaagaagtggacagcctgagcgatatgtctggccatttgaagttgatccattggagttggcaccagatcctccaaaggaaccagaagatgagttcccaaccaagctcgttggctacttcttactggcgtggttcatactctctgttggcctctcggtggccctcaacaaatgaagattttctccccaaaagaacatgaattgtaatccaataatctctctgccatgtacatcaatgacgctgttgtgtgcacagaagcatatggatgtacatgccatgctcttggcaattagccgaaacatataacaacacgttctgcacagattgaagtcgtgaatcttgtgcctggagttttcacaatcctgaattaagtatatgcccattttcaaacaaaaca

SEQ ID NO: 97113 - DNA, 117 bp, Zea Mays
cctttgttaaccatggagttgatattttattttgggtgaatattatttccaaggttattataaagttttctagaatttcaaaaatatgtgttcatctctccaaagaaaataatttag

SEQ ID NO: 97114 - DNA, 607 bp, Zea Mays
tcggtcagctccacgacggcacgacctcagctctccaacctgggcctcggctactccatcgccatcgcgctcggcttcctcatcctgttcgcctccttcctgctggctttctacttctgcttcggccgcggcggggactactgggccggggaagcagtcaccacggcgtccagctccggccacctctccatcaccgtcccgcgcgtgctcttcgtcgcggaggggtccgagtcccccgaagacgacgcttacccctcctcctccgccgccgcggcctgctcccccgtcgggctcgacgcggccgccatcgcttcctaccccaaggtcgccttctccagcagggtccgccgaggccaacgccatgtgctccatctgcctcagcgagtacagggacggcgagacgctgcgcgtgatgcccgagtgcaggcacggcttccacgtcgcgtgcctcgacgcctggctgagccggagcgcgtcctgccccgtctgcaggtcctctcccgtcccgacgcccaatgccacgccgctctccgagctcgtcccgctctcgcagtacgccgccgaccggaggcgccgcagtgatgggcatggacacatgacactggtg

SEQ ID NO: 97115 - DNA, 1662 bp, Zea Mays
atgggcgaggtggcaccggtgattccagtcacccggaggaggacgatgtctcgcaaggcagcgggggcagtggaggcggaccgacccgccgaagatgtatctgaggagaagacatcaaagattacaatagctttgaatcaggaagctgaggcagtggcggtcgcatcaaaggaggaaaaaggctgcaactttaggtcgacagtagcagcaacattgtatattaagaaatttgatagagtacaacagttttttgagagtatattaaaaaatgaacatagctatgtgtacataaacactagccctcacataacacagacaactccttcagatttgacaaaaaatgtgaacatcttgaaccttgatttgggtcttgggctattatcaaaaccaaagcttgctgacattggttggcctaggaggaggtgccgacaatgtggtgctagacggctattggtcgccaccgacgctgcattctggaggatggtcgtccatggcgatgggagattgaatggcatcagcatcggaacgaggctgacacgagtgaacagaaggagagttgtgaaccatcttgaagtatgcctcgtcaaatgtgcactcttcattaaaatcgtcttcaggatgccattcgtaaatggtaacgactgctaccttgtttatgacaaaaatatgaatatctttataacggtgtactttaaagaatgtgcccctgttatcccggattttctcttgtttaacatagatttgattctaagttgtagaaaaactggttgcactgtacctttacgactttaccatttcttgaacattgtctacaaaacaagagagtatgagttcttgaggcttaccagcctgggtgtgatcggtgctcttgtcaagctatttcagttaccagaactgtttgatgatcaagtgtcttacatggttgttccccagggcatgagaatattgaatcatcaggtggatgatgatcgcatagtgtgcctaagccaccacctcaagaaagtagtgttgaaagaaattctggacaagaattctaggtgtgggccctgctcttcgtgctattgcttcgatgagaagatgcaccggtgttgtcagtttctttgggcggatctcattccttgtcgaacacaacaatcaagcatcatatttcttcatgatagcaaaatgtcgcaggttgcagcagccacaccacagacaacagctatcagagccgatcagaagcgccaagagcgagcgcctcatgtctttatattgctctcacaccctccgtttctcgctcccacccactgccactgtacttgtgttgtgttgtgttgtgtgctgcaagaagaagaggaggaggaagagcatgtgctgagaagcctgccagcgcgctttacgacaagcatatatgggggagatcaccaagcctttgcgaagcagaagcttccgaagatggcctacgactactacgcgtccggcgccgaggatgagtggacgctgcaggagaacatggaggccttctccaggatcttgagcagcggttgatgagataagattgccaagaaacgaagtctgaggctggcttcttattcttcacctggcttcttaagtagtagcttcttattcttaagcacttgcaataagaagctactactttagaagattgccaagaagagaagt

SEQ ID NO: 97116 - DNA, 245 bp, Zea Mays
atgcagccgttccaacttccttccaaattccaacgagagtccagtctaccagcctccaacactgaggacaaagcgaaaagaaaaaggggaaaaggggctggtgcgcaaaaccctagcacagtcgcatccatcatggcgatgtccatcttcggcggctgcgtcggcggcgactccggtgcgctcatcgcgccgtccgcgtcctcgctccgcccgccgttccgtcttgtcgctggtcccaaggttcg

SEQ ID NO: 97117 - DNA, 195 bp, Zea Mays
gatcattccacctttgttgtcagtcctgtagaacagacgtgggttgttgtgacttttatttgtgtgtttttttccccacactgtactgttgtaggctcgaagccatatgttagcttatggtttcaggagctggattcagttacgagcgagttgtgacagcaaaacttttatgaattacgttagaagtttcatata

SEQ ID NO: 97118 - DNA, 1308 bp, Zea Mays
cgaagcagtcgcatctgctcttcgtggcaccgaactcttggagcaatcatcttttgaatcgtgtatggccaatggttaacgtttgacgagatgattgtatagatccgtttagcgagctagcgacaggacagccgcgcgcgtcgtggcgaaggctgcaggatggagcagcagacgaagacgacgacacagcaagagggcaaaggcctcaccaccatgcagcggtcgatcgtggacaagccgccattcacgctagcggatctcaggaaggccatcccgccgcactgcttccagcgctcgctcatcaggtcctgctcctacctcgcccacgacctcgccatcgccgcggggctcctgtacctagctctggccgtcatccccgccctcccgggcgtcctcctccgcgccgccgcctggccgctctactgggcggcgcagggcagcatcatgttcggcgtgtgggtgatcgcgcacgagtgcgggcacagcagcttctcccgctacggcctcctcaacgacgccctcggcctggtgctgcactcgtgcctcctcgcgccctacttctcgtggaagtacagccaccagcgccaccacgccaacaccgcgtccctggagcgcgacgaggtgttcgtgcccaagcagaggcccgagatgccgtggtactccccgctcgtgtacaagcgcgacaaccccgtcgcccgcctggttctcctcgccgtgcagctcaccgtcggctggcccatgtacctggcgttcaacacctggggccgccgctactcccgcttcgcgtgccacttcgacccctacagccccatctacggcgaccgggagcgcgcccagatcgccgtctccgacgccggcgtcctggccgtgtcgttcgcgctgtacaggctcgccgcggcccacgggctctggcccgtggtcagcgtctacggcgtgccgctgctggtgacgaacgcctggctcgtggtggtcacgtacctgcaccacacgcaccgcgcgctcccgcactacgactccagcgagtgggactggatgcgcggggcgctcgccaccgtcgaccgcgactacggcgtcctcaaccgcgtgttccaccacatcgccgacacgcatatcgcccaccatctcttcccggccattccgcactaccacgccatggaggccaccagggcgatccgtcctgtcctcggcgactactaccgctccgacagcacgcccatcgccgaggcgctctggcgcgaggctaaagagtgcatctacgtccagcgcgacgaccagaagggcgtattttggtacaggaacgtgttctag

SEQ ID NO: 97119 - DNA, 1451 bp, Zea Mays
cgcatctgctcttcgtggcaccgaactcttggagcaatcatcttttgaatcgtcgacaggacagccgcgcgcgtcgtggcgaaggctgcaggatggagcagcagacgaagacgacgacacagcaagagggcaaaggcctcaccaccatgcagcggtcgatcgtggacaagccgccattcacgctagcggatctcaggaaggccatcccgccgcactgcttccagcgctcgctcatcaggtcctgctcctacctcgcccacgacctcgccatcgccgcggggctcctgtacctagctctggccgtcatccccgccctcccgggcgtcctcctccgcgccgccgcctggccgctctactgggcggcgcagggcagcatcatgttcggcgtgtgggtgatcgcgcacgagtgcgggcacagcagcttctcccgctacggcctcctcaacgacgccctcggcctggtgctgcactcgtgcctcctcgcgccctacttctcgtggaagtacagccaccagcgccaccacgccaacaccgcgtccctggagcgcgacgaggtgttcgtgcccaagcagaggcccgagatgccgtggtactccccgctcgtgtacaagcgcgacaaccccgtcgcccgcctggttctcctcgccgtgcagctcaccgtcggctggcccatgtacctggcgttcaacacctggggccgccgctactcccgcttcgcgtgccacttcgacccctacagccccatctacggcgaccgggagcgcgcccagatcgccgtctccgacgccggcgtcctggccgtgtcgttcgcgctgtacaggctcgccgcggcccacgggctctggcccgtggtcagcgtctacggcgtgccgctgctggtgacgaacgcctggctcgtggtggtcacgtacctgcaccacacgcaccgcgcgctcccgcactacgactccagcgagtgggactggatgcgcggggcgctcgccaccgtcgaccgcgactacggcgtcctcaaccgcgtgttccaccacatcgccgacacgcatatcgcccaccatctcttcccggccattccgcactaccacgccatggaggccaccagggcgatccgtcctgtcctcggcgactactaccgctccgacagcacgcccatcgccgaggcgctctggcgcgaggctaaagagtgcatctacgtccagcgcgacgaccagaagggcgtattttggtacaggaacgtgttctagctgcagagctgctggacgacgcaaaccccgagcggagccataggggcacagaaataatattatttgtggtcttgtacattttgttatatatttaccttgcacatgtcacaaataaaaaactggcatatatatataacaaaatgtatactatacgtatatatatgtatcatcttgtgttatatgttaaatgtttaagatgttttaaatgcc

SEQ ID NO: 97120 - DNA, 752 bp, Zea Mays
tttcctcagctcagtctatcattccattgtctggtcatttgtccccggccggcacgtaataatcaccactatggccagcggacggagaaagagcggcattccagctctggggtggtggctcatggcagtcggcaccatccgctccgccatcgtgtggtcctgcctcttcagttctgcatcgctctgcttggccgtctaccccgagatgaccggcgtgcaggagcgagctatggctgcgtggactctgctatcctgcacgctctgcttcctgtgcgcgttcaacatggacagcaagccgctctacgtggccaccttcatgtccttcgtctacgtcgccggctacctgctcgtggagtgcttcttctaccacagcgtccatgcagccagtatcgctccgtactgcttcatcgcagggacatccatggtttggatgctgcttcaatggaactcccatggccgtggccgccgtccccgtgaggctagcaagcagccctgatccaacctctggttcttttgccatcgatgtgattggggcggtctactatacagacgatgaataaattatttatttacaaaaaaatgtattatatatataagatgcacaccgagttccgtacgttgttgctgttgacttgttgaatgtaagaagtgacgactagaatgggtgtcgtctaagttgagttgtattgtgtcgtagcatcttgatataaccctataatctgttgttggaaaaaaatgtttgctcagtcaca

SEQ ID NO: 97121 - DNA, 523 bp, Zea Mays
ttttgcttatgttgaatttctggaacaagaagctgtccaggaagctatccaggaagctctgaacttgaatgaatcggaattgcatggtcgacagattaaggttgcgccaaagaggactaatgtccctgggatgaagcagcgtccaccacgcgggtataatccctaccatggctacccttatagatcatatggagcaccgtacttccccccatacggttatgggagggctcctacattccgccgccctatgcgctacagaccatacttctgaagtacgtacggggtaataatgttcaatgcaaaaccagtcatggttagtggtcagtctcaggaataattaaacctactgttgtatcgtttgcactgttcaatatttgacattgttgcggttcaacgctcctttatcagctgccttttctaacctctgttcttgcataagcgacatgtagacacaggacatagggttactattgtttgcattttctgtcattcttgattctgacgaccctatacagcacttacc

SEQ ID NO: 97122 - DNA, 1576 bp, Zea Mays
accagttccgcagaataaacgagcgtgcaagcgctgctgggctggtgtcagtcacctgagcaaggaagagagatggccacgctgcctcgcgagggcgccgcggcggcggactccgaccagcttttggtagaagcacatggctctacacgaacgctgattttgaataggccaaagcagctcaatgcactctcctctgaaatgattaaaggtctcctatggtatttcacagcttttgagaaagatgatggagtcagattgttgattatgaaggggaatagaagagtattttgctctggaggtgatattgctcaatgtgcccggtgtttatataatggaaactggaaatgggtcgatgatttcttccaaaatgaatatttgctaaattacatcattgcgacttacataaaacctcaggtttccattcttagtggaattgtcatgggtggaggagctggtgtttcaatacatggaagatttcgagttgccactgataacacgatttttgcaatgccagaaacagctctaggcctctttccagatgtaggggcctcttattttctatctcggctaccagggttctatggagaatatgttggtctaactggtgccagattggatggtgcggaaatgcttgcctgtggcctggcaactcattttgtcccgtcaaagaggttgccattgcttgaggaatcgcttaaaaagctggacacgtccagtacttttgctgtgtcgggtattatcgaccagttttcacagaggccattagtgaaagatagcagctctttaaataggatggaaaccatcaacaaatgcttctccaaaaggacagttgaagaaatcatagatgctcttgaacaagaaatctcaaatgtttcagacaaatgggttgctgcaacaatcaagtccctgaaaaaggcttcccccaccagcctaaaaatttctctgagatcgataagagaagggagaacacaaactcttggggagtgcctgcgtcgggaatatagagtggtttgccatgtcctgcgtggcaccttcagccgagacttgtctgagggatttagggctgtgctactagaaaaagacaacaagccagagtggattcctccaaggttggaacaagttcctgacgaggcagttgagcaatatttcttgagaattgatgatccccagtgggaagatctgaacctgcctgcgagacttccccaccgaagaaatattgagtccaagatttgattgaggtcttggacgaagagtgagcctcggtcaggataactcgtcaactcatgtttgaagttgtgtgcggaatgttgacgacgattgataaataataaacgcggactgaatatatgtcttataagttcacgtttatcgctaaataatttttgttgcttttgtgtgaagttgtacctgttagccttgttcggttacagggatgaaattctaccatagatataattcgggtctagattggatgaatcgatacctcacccaatcatatggtaagattaaatccatcatttaatacatacacctcccaaaactagttattcttttcatttatggattctaatataaa

SEQ ID NO: 97123 - DNA, 1188 bp, Zea Mays
agagagatggccacgctgcctcgcgagggcgccgcggcggcggactccgaccagcttttggtagaagcacatggctctacacgaacgctgattttgaataggccaaagcagctcaatgcactctcctctgaaatgattaaaggtctcctatggtatttcacagcttttgagaaagatgatggagtcagattgttgattatgaaggggaatagaagagtattttgctctggaggtgatattgctcaatgtgcccggtgtttatataatggaaactggaaatgggtcgatgatttcttccaaaatgaatatttgctaaattacatcattgcgacttacataaaacctcaggtttccattcttagtggaattgtcatgggtggaggagctggtgtttcaatacatggaagatttcgagttgccactgataacacgatttttgcaatgccagaaacagctctaggcctctttccagatgtaggggcctcttattttctatctcggctaccagggttctatggagaatatgttggtctaactggtgccagattggatggtgcggaaatgcttgcctgtggcctggcaactcattttgtcccgtcaaagaggttgccattgcttgaggaatcgcttaaaaagctggacacgtccagtacttttgctgtgtcgggtattatcgaccagttttcacagaggccattagtgaaagatagcagctctttaaataggatggaaaccatcaacaaatgcttctccaaaaggacagttgaagaaatcatagatgctcttgaacaagaaatctcaaatgtttcagacaaatgggttgctgcaacaatcaagtccctgaaaaaggcttcccccaccagcctaaaaatttctctgagatcgataagagaagggagaacacaaactcttggggagtgcctgcgtcgggaatatagagtggtttgccatgtcctgcgtggcaccttcagccgagacttgtctgagggatttagggctgtgctactagaaaaagacaacaagccagagtggattcctccaaggttggaacaagttcctgacgaggcagttgagcaatatttcttgagaattgatgatccccagtgggaagatctgaacctgcctgcgagacttccccaccgaagaaatattgagtccaagatttgattgaggtcttggacgaagagt

SEQ ID NO: 97124 - DNA, 313 bp, Zea Mays
gtgctgaggcccctggcagagggcccgagccacctggtatggccagcccaatggcaccggccccgacaataacaaagacgatgatcatcaccgacatgaactactacccggtgtccaagtgccacttcgacctgagtgacacggtgttcggcaagctggccaagcccgacctcaacgacaagctccgcccctctggcatcatcgacatcgagttcaccaggattcatcgtcgacattggggttcgagtctagtttggttgcgcggaggcatgttatatggtgacctccagatttatgttgccgatgtggtgct

SEQ ID NO: 97125 - DNA, 543 bp, Zea Mays
gcaactgatatatcatcatgaagatgagcaatggccaatggacacacatgttcctatttctccagtatatttatgatcagagcccgcatatggtacaactcagcaacatgagtgggattaaatgaacaccaccaacaacaataacggcatcaaaactaagcaacacattacgaatttcataagcctttgtgaagacgaacaccagtgtctcggcgacctcagtatgaaatgaatggatttgtaacacaattgtgatacataatgattcatctggggtagtttccccatgttggcagcaaccatccttcggtaaaatctgggggtagtttctctccaaggtgagcgccttatgtccatccaatacaaatgagagaaaaaacatgcttggcctggttgtttccaactcatttgtacaggctgagtcccaggcccccaatatacagaacagtatgcctcttgatgctctcctatcctatgaccttcctgatgacataccagaggtggcatgtatctccaaggagtgctccggtatgtaagcaaggc

SEQ ID NO: 97126 - DNA, 408 bp, Zea Mays
atgggagagcaggagattcgaactgttgattgggaatctaaccgagctgctcacctgcagattggaattggatcgatggatggaccgcggacgcccgcacgccgattggatctcctcctccttgggcggctgctaactgggttgggatgggacaggagccttcctcgccacagccgccgtgccgtgctgctcctcttctccgagacgctgggaaccccgattggagacgtctggaagacgagaggcggagagccactgttcgagtcggtgtcggggctggtgtcgaacgaatacaggaaggaggcgcatgctcctacgccctctgctgagaatggggtggcgcggaggtggatgcatgagggtagagagaaaaagaaattgaatggcgaacaaggtggtggcaactga

SEQ ID NO: 97127 - DNA, 746 bp, Zea Mays
ctctaccctttttcttttgctgctgcttgtctctcgttccttcttctgggtgctaggagtcgtcgtcttcttcttccacgggcacggataaaggagggagagcacacacatccgccatcgtcgctgcttcacgtacgacgagtattctgtattcatggaggtagatcccgaccggcgctctacttgtcctttgtgaccgagccagggacagggagggaggaggcggcagatcccggcgttcgggaggtggaaccagcacagcgtcggcgacgaggtgcccatcacgcagtacttcgagtcggcagtacaggccagcctcctcgccaggcccggccactgctaccacgacgccggcgccggcgaggtgctgctgttccggtcgtccgcctcgccgcctccgcacaagccgcccaagaaggtgcggagcacgacggagtgtcacggtcaccaccagcaggttcaggttgaggaggtggggagcaggaggaggcagcagcagcggcggcggcaggagccgttgccgccgttcgtgtccggcgacgtgtcccgcgcggcgaggccgagggtcgttagggcggcggtggacgaggacctgtacaaggtcccttccgatatgctacgcaagaagaaagggaggaagcatgtgaggagcgtgtggatgggctgcgtgggcctcacctgcgtcgcctgacatgaccagtagtagcctttcttccacctttatcggatcgcgtggatggcaagaa

SEQ ID NO: 97128 - DNA, 1522 bp, Zea Mays
ctctaccctttttcttttgctgctgcttgtctctcgttccttcttctgggtgctaggagtcgtcgtcttcttcttccacgggcacggataaaggagggagagcacacacatccgccatcgtcgctgcttcacgtacgacgagtattctgtattcatggagcagagccagggacagggagggaggaggcggcagatcccggcgttcgggaggtggaaccagcacagcgtcggcgacgaggtgcccatcacgcagtacttcgagtcggcagtacaggccagcctcctcgccaggcccggccactgctaccacgacgccggcgccggcgaggtgctgctgttccggtcgtccgcctcgccgcctccgcacaagccgcccaagaaggtgcggagcacgacggagtgtcacggtcaccaccagcaggttcaggttgaggaggtggggagcaggaggaggcagcagcagcggcggcggcaggagccgttgccgccgttcgtgtccggcgacgtgtcccgcgcggcgaggccgagggtcgttagggcggcggtggacgaggacctgtacaaggtcccttccgatatgctacgcaagaagaaaggggtaccgtttctctttctctctctcgtctctacgacgtctaccaataaactgtactgtctgtcaatataggccctgtttggcacagctgctgcttgttgaaaaagcagcttatctgataagctggtgaaaagtagcttctgcttgttggctgcttttagtgtattatgagaagcaactgaactaataagttgctgcagaagctagctgtttggcagaacttctacttaaatttgtgaagaagctgaaaataagctgtgcaaaacagggccataatctgcttacatgattagatccaagcaataaacaaatgaaagaaaacctaatattttctcgagttcccagacctagctagcaagttgacttcaaagctcgctgtacttctcttgttggtttctttttcagaggaagcatgtgaggagcgtgtggatgggctgcgtgggcctcacctgcgtcgcctgacatgaccagtagtagcctttcttccacctttatcggatcgcgtggatggcaagaaagagagtccaagaggacgacgacccgaacccgaccacaagcatccaaaagccgaccccgaatgctagccgtttcagtccattcaatggtgatcgtcagtcaccaactcaccacgttgagcacagggatgcaagcaactcggtatactactgcaccacctcgtgctccatgcaccgtcgtcagtccgtcgcggctgagcttttgttccgccggacacagagatgcaagcccgtactgcacatcgtcgtggacaacacaagagctagtacgtacgtgatgcctgccgtctatccgatctgtggatgggtagctgatgagttcttcatcgtgtcattgcgcgcgcgcgcgagttgtccatatctatgtatgcattcttttagaaatggatttggcttcaatctgtttgggacc

SEQ ID NO: 97129 - DNA, 3888 bp, Zea Mays
atggttccaaaagggcggcggcaggggcaacaacggcagcccaatgtggcctttcaaatactaaatgaaaagacaactgtcttgtctcctgaagtgcttctttctgctggagttccttgctgcagattggttcaaaaccctggtgaatttgttatcacattccctggagcttatcattctggttttagccatggatttaattgtggagaagcaacaaacattgctacaccttgctggttgcaagtggctaaagaagctgcaatcaggagggcttccacaaattcaggcccaatggtgtctcattatcagctgctttatgagctagcactgtcattacatctaagggagcctaagaattctcatatgcctagaagctctcgtctaagggacaagaagaagaatgaaggtgaaagaatgatcaaagaaacatttgttggaagtgtgatagaaaacaacagttttctgagcacccttcttgacaagagttcttgtataattatcccggagattgaatttccccttccatctgttcctacaacgagggcacctgaagtctctgataagcaaggcttgattgctggtccctgtagtattagccagcaaaaagctgaggaaactcttgtttatggtgatgaaattgatgaaatcaaagaggttgagaacatgagtgaatcaaccacttcctctgcatgtaaccaaagaaagttctacgaaacaaaatttggaatagttagtagtactgcattttgcttatcaacttcagatattcagattggagtaattggaaaaggtagatcacatcaaggaggtgggctcttagatcaagggcggttgccatgtgttcagtgtggcatattaagctatgcttgtgtagctatcattcaacctaaagaagcggcagtccaatatgtcatttctagggagtgcatgtcatcaagtgcaatacacagagaaataatggaatcggatgatacctcaaatcgaatggtgatagctcatcaacaaggatatgctcatcaaactgatgataatacaatacaaaatgtgagtgcagcccaagtttctgataggtgtagacagctatacagcagcagcacccatggatgcacttccgctcttgggcttctggcttctgcttatgaatcatcagaatctgatgaagaagcagatgcacctaacaatatatcaaacaattgtgaaaacaataatgcggcaaatggagccacaaatattcagtcctccagaacatcagttcaggatgaaaatacgaatttgcaattgtatgaagaggaaaataactccagagcaatagcatctctgatgcaaccagtggaggataagagtactgctatgactcctgttagtatggaaacaaatattatccatctagcagatcagggagagtcactaaccttccatgagcagtggcatgcgtatcttgactttgatgatctaactgcatcaggtgtaaaagcctctccgaatactagtttgggcacggctaaagctgcaatgaaaacagatgcactgactttgttcaagtacagcaaggattcctgcagaatgcacgtgttttgtctagaacatgctttggaaacttggacacgacttgaacaaattggtggtgctaatatcatgctcttatgccatccagaataccctagagcagagtcagcagcaaaagttatagcagaagaacttggtatgaagcatgcctggaaagatatcactttcaaaaaagcaacacgtgaagacactggaagaattcaattggctcttcaggatgaagatgcagaacctacgagcagtgactgggcagtaaaaatgggtatcaacatatattacagtgccaaacaaagcaaatctccactttacagcaagcaggtaccatacaattctatcatttacaaggcatttgctcaggaaaatccagacagcttcgcagatggacagcgatcaagcacaacaaagaaaaaggtagctggatggtggtgtggcaaaaaatggatgtcaaaccaagttcatccacttttagcttgtgaacaggtagaacagaatcatgaaacagtttacagcaaaacgatgttatctgctagttgtgacaggatgcaagaacaatcaacaagatctactaccctgatcaaccaaaattcttcaaaaaagataaccagaagaaaagagggggactctgttgagaaatctagaggcaaaaagaagagatgcagtgccagtgcttctgatgaagctgctttgcactgcagtgtgtatgatcagcctgtaaattctgataatcatgccaaatatgaagatggagatgaaagtgtggaagcacggaacacccgacatcatcaacaatatgaatcgctaaataaaaaatcaagtttgaagaggcgaaaggataataatagaagcaacagctttcatgagctacacaaggacaatgttgacattgactgcaggtttgatacagacggcactgaaaacacctcaataggtgactgggataatagtccaccacaagggggtgatgtcaaagcagtgaaatctggtgctcgattgctaggcactaagaggtttagcaaggagaagggaagtaatggtttgtcaaatgtaaacaagaaattggtaaagatgggtaagaaaattagtactaagaagcaaaagaatgacaaaacaaataggcagtttcaagaaaatcacaaaaaggctgacattgtggatttgcttcatgaagatgatggagatgaaggcacatacatagactgcaatgaaattcgaaaacaaaaaacagatgacgtgagagtaaaatctagaggcaaaatgcaaagtggcaagaaaaaagtcagcagatgtcaggcaagtgatggttcgcacaatggaggcaaggaaatgaaattatcaagtgacatagaagtgtgcaacagaagaggagatggaacaacggcagccaattttgaagaaattccaaaagaaaaggccgatgctgtgaaagtgaaacccaagatgcaaggtgacaagaaaaaaaccagtaaacatcaggcaggcgatggagataaaggagcaaaattttcttgcgatatagaagggtgtgacatgagtttcagcacccagcatgacctgtcgctgcacaagagagacatctgtcctgtcaaaggatgcaagaagaagttcttctgccataaatacttgctccagcaccgcaaagtgcacctggatgaaaggccgctcatgtgctcattcccaggctgcgcgaagacattcaagtggccatgggcgaggacagagcacatgagggtgcatacaggggtgcgcccgtacgcatgcacggaacctggctgcacccagacgttccggtttgtgtcggacttcagccgccacaagaggaagactggccactcgtgtgacaagaaaaagaaacgcggcctttgactgctcgtgcacaagtacaggtttcttctctgacggcgagcgatctgaaggggatggatgctaatcgaataattgcgccaggttccattgtttgcagaattaatctgcattaggagtctaattcatttcattgtttattaccgctgcaacataacagctcattcactgtcgctttaggtccaactgacctgctggtgactgagattgtaccatgtcaattgtatcgttctttcgttcatacttagaaatcgggaagtttctgttgacaggaacgttggatttagtgtacggcgcctgttattaacatgcgtgtaattctgtactgaagtgctcctttcttatttttacattttttaaaatctggaaggaattagtgtacggcgcctgctagttttgatgtaggattcatttggcagttcttgaaacgattatcgcaaaaatagaatcacttgttggaaa

SEQ ID NO: 97130 - DNA, 258 bp, Zea Mays
catgtatttattttcgactaggctagaatgggcctacaagaaggccttacagttgtgctatttgcttattagcctctaacttttatatttatcaatataattaaggcatcgcctcgccttacgctttacacttcaaagttaaaaaagggggtcaagcgccttatgtcgccttaccgttttaataactatgattgatagccaacaccttttggaagagagattcccatttagtgatctatactagttgccaacactcta

SEQ ID NO: 97131 - DNA, 142 bp, Zea Mays
ccttatgtgcatgacactttgttctgcccctttataactaaaaggagtagttctgacccttttcagaatgcctattccctatggcatgggagaaatagtataagcaaagcaaacaccagacaacatgcgcatttgttaaaag

SEQ ID NO: 97132 - DNA, 776 bp, Zea Mays
atggctgccgggtgggtgggtggccctcatcacgagcattggtgtgggtggccctcattgggcccccatcgcgggcattgctatgggtgcgcctcgtcgggcaaaacatgcctctggcctttgacggcggcgcatggactgttgaatattcagattggtgaggcatcaaggcgagcatggcttggcgaggaagctgatccacagtactcagatcgactgctcagaccatacaagaggcccgtggaggtttatatggaccaacaggattcaaggtggtttatatccaaggatgcaattgtatctggccttggtcttctaggcatcaagcagggtggacctgagacaacgttgtctaagcctcgtcgaaagagagtcgtccgcaaaaaggtcgcttcaggttgagtttagtggatttggcagcaatgctggaacgattttgctcctgttccactatgccagagggaggtctacccaaataatggtaaatgagaaaaactacaaacgtcaaccagcacagcacgtggtcaataggcgaaggcatcaaagggggttgtgctgggaagcgttggtcaaaaggtgccctttactattttctaattcaagtgcagtggtttctttattttttggtaagaataatatgttggtttcttgtattgctgtgaggaaaatagacacgtttagtggtagttctgtaagtttgttaatgtactgactttaacatgagatggattctgcatttttgtatagatcaaatagctgccgcatgcatgtatcta

SEQ ID NO: 97133 - DNA, 213 bp, Zea Mays
atggccaactacgtcgctgatccaagaccctttctccctccggagatgataatggaggatggaggtccgctgcgtcgggcgagggctcgggttcatatggtggacttgcttgaagtcaaagctgagcagttcgtcattgtagaagatgtggatggtgttcttgctccgagtgatctaggtatgtttgtccagcagattcgagactttgtttag

SEQ ID NO: 97134 - DNA, 251 bp, Zea Mays
attttattttgctccaaaattggtcaatggaagggatgtggcagaattaaaagtcttgttgggtgtagtgaattttattttgctccaaaactacttcatggaaggaatgtgctaagctctattttgttccaacactacttgctggatggaatgtaatcgaaatttgaacttgctagatgtcaaatttgcttgatccatactccaataatttgtttgcataatattatgttgtcaaaaaaatattgataaaa

SEQ ID NO: 97135 - DNA, 1134 bp, Zea Mays
ttttctttgtactctagtggtgaaatactttttgaaataattatgtgatactgtaatatgggctttgcagtctactggagcaactggaatctattgagcaatctttgaatgagtctggcttagaagctctctcatcctttctgaaaaccaaaaagaatttagaccaactggaagatgcaaaagatttggatgaaaatggcggcgttcacgttttgctgaagaccttgctgtcattatcttatctaagatcaattctaatgaagggtctggaaagtggccttagaaatgatgctccagatagtgctattgcaatgcgacaaaagtggcgtctttgtgaaattgggcttgaggattattcgtttgtattgttaagtagatacatcaatgctcttgaagctttaggtggatcagcttcacttgcagagggtcttcctacaaatacaagtctatgggatgatgcccttgatgcccttatcattggcataaatcaagtttgcttttcaggttggaaaccaaatgagtgttctgcaatagtgaatgagcttctttcttggaagcagaaaggtctatctgaatttgaaggcaatgaggatggaaagtatatttgggcactgagactcaaagccactcttgatagaacaggaagactaacagaagaatactctgaagcacttctttcaatattccctgaaaaagtcaaggttcttgggaaagcccttggaatacccgagaacagtgtcagaacatacactgaggctgaaattcgtgctagtgttatttttcaggtctcgaaactttgcactgtacttttaaaagcaactcgagcagttcttgggtcgtctgtgtgggatgttcttgttcctggagtggcccatggagccttgatacaggttgaaagaatagctcctggatcattgccgtcatccatgaaagaacctgtcgtgctagttgtaaacaaggcagatggagatgaagaggtcaaagctgctggggataacatagtgggcgttgttcttctacaagaattacctcacctatcacatcttggtgttagagctcgtcaagttcgtaccaaaagcctcattttatttaaatactgtttcgtttttaatgaattccactgcatttttttgg

SEQ ID NO: 97136 - DNA, 2579 bp, Zea Mays
ttttctttgtactctagtggtgaaatactttttgaaataattatgtgatactgtaatatgggctttgcagtctactggagcaactggaatctattgagcaatctttgaatgagtctggcttagaagctctctcatcctttctgaaaaccaaaaagaatttagaccaactggaagatgcaaaagatttggatgaaaatggcggcgttcacgttttgctgaagaccttgctgtcattatcttatctaagatcaattctaatgaagggtctggaaagtggccttagaaatgatgctccagatagtgctattgcaatgcgacaaaagtggcgtctttgtgaaattgggcttgaggattattcgtttgtattgttaagtagatacatcaatgctcttgaagctttaggtggatcagcttcacttgcagagggtcttcctacaaatacaagtctatgggatgatgcccttgatgcccttatcattggcataaatcaagtttgcttttcaggttggaaaccaaatgagtgttctgcaatagtgaatgagcttctttcttggaagcagaaaggtctatctgaatttgaaggcaatgaggatggaaagtatatttgggcactgagactcaaagccactcttgatagaacaggaagactaacagaagaatactctgaagcacttctttcaatattccctgaaaaagtcaaggttcttgggaaagcccttggaatacccgagaacagtgtcagaacatacactgaggctgaaattcgtgctagtgttatttttcaggtctcgaaactttgcactgtacttttaaaagcaactcgagcagttcttgggtcgtctgtgtgggatgttcttgttcctggagtggcccatggagccttgatacaggttgaaagaatagctcctggatcattgccgtcatccatgaaagaacctgtcgtgctagttgtaaacaaggcagatggagatgaagaggtcaaagctgctggggataacatagtgggcgttgttcttctacaagaattacctcacctatcacatcttggtgttagagctcgtcaagagaaagttgtatttgtaacttgtgaagacgatgacacgattaaaaacatgaggttacttgagggaaaacatgtcaggttgggtgcatcatccaataatgttgatctttcagttgtatcaaacaaagatgactgtgctgccatgtcttcagagccatccgctggaggagatctatttgcacagcaattctcactattgactacagacaagaagttagaattgtctgagcaaaagagctatacttccgtagcaaatggtatgtctggtgtgctcgagctttcagaggcatcgattgaatcatctggtgcaaaagctgctgcatgtggaactctttcggttctttcctcaatgtcaaataaagtttacaatgaccaaggaactccagcagcattcagagttcctgcaggtgctgtgattccttttggatccatggaggacgccttgaagaaaagtggatcactcaaatcctacactaatcttctagagaggatcgaaacagctcaaattgaaaatggtgaacttgatagcctatcctcgaagcttcaagcaactgtttcacttctttctccatcggaagaaatcattgaatctttgaagaaaacatttgatcagaatgttcgactaattgtgagatctactgctaatgtggaggatttggctggaatgtctgctgctggactctatgaatcaattcctaatgtcagtctctctgaccctagatcctttggagctgcggttggacaggtttgggcatcattatacacaaggagagcaatccttagccgtcgagcagccggtgtacctcagagagacgcaaagatggcggttctcgtgcaggaaatgctgcagccagatctctcttttgtgcttcatacaattagcccagttgaccatgatcccaaattagtagaggctgaggttgcccctggtcttggagaaaccctcgcttctggtacccgtggcactccatggagactctcatgtcacaagcttgatggcaaagtcacaactctagcttttgcgaatttcagtgaagagcttatggtgctcaactctggccctaccgatggtgaaatgagtcgtaggaccgtagactacagcaagaagccgttatctgttgatgcaacctttagggagcagtttggtcagcgccttgccgccattggacagtatctggaacagaagtttggaagtgcccaagatgtggaaggttgcctggttggccccgatatatttatagttcagagcaggccacaaccacaataaacaaaaagttttgtgtggttacctggctagctgaataaaaatggatactggctgaagaaatatatggacttcgtagcacgcgtagcagtgatcgagtcttttttaatatgctatctcaggtaaaataataatttattggcacaggtttagccattcactaacttgtatcaattttgtgaactaaagaacttactattacatgtgggagccacatgctattctatttcgatggtacctattttttcgact

SEQ ID NO: 97137 - DNA, 2566 bp, Zea Mays
ttttctttgtactctagtggtgaaatactttttgaaataattatgtgatactgtaatatgggctttgcagtctactggagcaactggaatctattgagcaatctttgaatgagtctggcttagaagctctctcatcctttctgaaaaccaaaaagaatttagaccaactggaagatgcaaaagatttggatgaaaatggcggcgttcacgttttgctgaagaccttgctgtcattatcttatctaagatcaattctaatgaagggtctggaaagtggccttagaaatgatgctccagatagtgctattgcaatgcgacaaaagtggcgtctttgtgaaattgggcttgaggattattcgtttgtattgttaagtagatacatcaatgctcttgaagctttaggtggatcagcttcacttgcagagggtcttcctacaaatacaagtctatgggatgatgcccttgatgcccttatcattggcataaatcaagtttgcttttcaggttggaaaccaaatgagtgttctgcaatagtgaatgagcttctttcttggaagcagaaaggtctatctgaatttgaaggcaatgaggatggaaagtatatttgggcactgagactcaaagccactcttgatagaacaggaagactaacagaagaatactctgaagcacttctttcaatattccctgaaaaagtcaaggttcttgggaaagcccttggaatacccgagaacagtgtcagaacatacactgaggctgaaattcgtgctaggtctcgaaactttgcactgtacttttaaaagcaactcgagcagttcttgggtcgtctgtgtgggatgttcttgttcctggagtggcccatggagccttgatacaggttgaaagaatagctcctggatcattgccgtcatccatgaaagaacctgtcgtgctagttgtaaacaaggcagatggagatgaagaggtcaaagctgctggggataacatagtgggcgttgttcttctacaagaattacctcacctatcacatcttggtgttagagctcgtcaagagaaagttgtatttgtaacttgtgaagacgatgacacgattaaaaacatgaggttacttgagggaaaacatgtcaggttgggtgcatcatccaataatgttgatctttcagttgtatcaaacaaagatgactgtgctgccatgtcttcagagccatccgctggaggagatctatttgcacagcaattctcactattgactacagacaagaagttagaattgtctgagcaaaagagctatacttccgtagcaaatggtatgtctggtgtgctcgagctttcagaggcatcgattgaatcatctggtgcaaaagctgctgcatgtggaactctttcggttctttcctcaatgtcaaataaagtttacaatgaccaaggaactccagcagcattcagagttcctgcaggtgctgtgattccttttggatccatggaggacgccttgaagaaaagtggatcactcaaatcctacactaatcttctagagaggatcgaaacagctcaaattgaaaatggtgaacttgatagcctatcctcgaagcttcaagcaactgtttcacttctttctccatcggaagaaatcattgaatctttgaagaaaacatttgatcagaatgttcgactaattgtgagatctactgctaatgtggaggatttggctggaatgtctgctgctggactctatgaatcaattcctaatgtcagtctctctgaccctagatcctttggagctgcggttggacaggtttgggcatcattatacacaaggagagcaatccttagccgtcgagcagccggtgtacctcagagagacgcaaagatggcggttctcgtgcaggaaatgctgcagccagatctctcttttgtgcttcatacaattagcccagttgaccatgatcccaaattagtagaggctgaggttgcccctggtcttggagaaaccctcgcttctggtacccgtggcactccatggagactctcatgtcacaagcttgatggcaaagtcacaactctagcttttgcgaatttcagtgaagagcttatggtgctcaactctggccctaccgatggtgaaatgagtcgtaggaccgtagactacagcaagaagccgttatctgttgatgcaacctttagggagcagtttggtcagcgccttgccgccattggacagtatctggaacagaagtttggaagtgcccaagatgtggaaggttgcctggttggccccgatatatttatagttcagagcaggccacaaccacaataaacaaaaagttttgtgtggttacctggctagctgaataaaaatggatactggctgaagaaatatatggacttcgtagcacgcgtagcagtgatcgagtcttttttaatatgctatctcaggtaaaataataatttattggcacaggtttagccattcactaacttgtatcaattttgtgaactaaagaacttactattacatgtgggagccacatgctattctatttcgatggtacctattttttcgact

SEQ ID NO: 97138 - DNA, 212 bp, Zea Mays
tttgacttcatgtgacttattttagaaacttgagctcacaaactttctcttatttggtctctgtatggtgaaattatgttattttataatatctgttcgttcagtcagtcgttgtgaactctattctaatagctcacttcattggccgtattgtacccaagacatattgcatggagtaaacaataacatcagttagccaaatcaaaaaaata

SEQ ID NO: 97139 - DNA, 660 bp, Zea Mays
atggtgtcgcaactggggctatacaggcgcgacgaagagacgaacgccagggaggctgacgacgcggacgagctggagccgggagctggggctgggcaccgagctgaaacagggaggagcgccggcgagctgagggagcgagctagggagctccgcgagctggagaccgatgcgcgcagcaaggagaagcgcgcgcagagaagagaggagcaggggcacggcaaggaaactctacggcgaggaaggagcagaggtcgggggcgagctcagaggaagacagccaccacaggaaagggagctcggcggccaggagagatgcgcgcgtgggaacgaagaacaggggcgcgcgccagggaactcagccgggcgccggagctggaggccgagcgagaatacgcggctgcgtgccatgggcgagagagcaccgagcagagggagctgggcgcgccatgggaggaaagttggagcgccggcagagggcagaaggagggagatgaagccgagggggctgcgcagcggccaggcgagctgggcgagacctcggctgggcggaccatggcggacagaaacaaccaggcagctcgacgtgctcagctgccgtgggagataagaccggcggcaagccggcaaggcaggaaatatcccaagcggaggagataa

SEQ ID NO: 97140 - DNA, 1334 bp, Zea Mays
gtaataatcgaaggggccctaagatgatttgcatttgacatagtgttcggttacatcttacaccagtctatgaaggaaaagcagagaaaaaaaatcggagcgaagtccaatgtaaggcaaaaactacgaacggggcaacgaccgaaaaaagctaaaaaaaggtaatgaatattatgaacacaaaatagtcgctctctctcatcagtacctctcccacggagattcttctatgttctccccggccatcaaacacgtggagttcagaatgtggtaaggatcagcacacacgtgctgctcgcccattgcaatgctcagtatctgtacagactctcacggacaaacgagcatgactgattagccaaatccgaaaccttcatttgcttcgtggattgccaacagtaacctctcctggagctgctctttggacgtgtactcaggcaagtctagttggttaccaagtatgagctgaaggcagatggttcgtgctgccgtatgccttgtgtatctgaaacctttgtggcccagagatcccttgaagttcactaaaaccttccaacggtacctacagataaactcaaatggtaagcataacacattggtgtggcaccataggttccaatgtggcagttaacaaaatgtaagcttgctagaagtggagactggggtgacaatccagaaactgaatcagtgctgcaaggaatcagagaacgaaccagctgcatacctttgaagtgccagtgacgaactggaggaaccgagctttgtcttccttgctgaacccctgaacgatttcccagaaccactggacgactggagaggctatgctgtagccagaatattctgtatttgttttcaaatcgtccactaaaagcaacataggtaaaacaggtcaattagatggatacaaaactagactaaacggccctaaaccatatatttgcaacacttacagtcaatatctggaagaccactaatcagaagctcaagctctttgtcgttgaagatagatatcagctcccgtggaatgagttcattaaacccttccaggaaggcattaatctgaggcctgatggcagtggtcaatctatgctctgctacccggtcgacatattcatgcttattctcctcagtaaccctgatgttacgccctccaggaatcaactcacaatcagtgacctgcaaagataacttgggacttacaacatagaaaagatcaaaaccacaaattcttgtgacacaagcacagcaaatacctctgccttctcgtacaatatcagtttctcttcgtctgcatccatgctaaaggtgagatccaaaacatcacttatgtcatt

SEQ ID NO: 97141 - DNA, 146 bp, Zea Mays
gacacacgttttatttaaatggaatctattctaaaattatgtatttataaactattatttttggatttattatattttttagagtatatatatattgttaccctaaagagaaattcgaaaaaaagaaaaggaaaggaaaaaaacaa

SEQ ID NO: 97142 - DNA, 501 bp, Zea Mays
aaacgcaggagaactgcgcctcattttattaagtaagaagaaatagggtcggaaaaggacctgaatacaagacctccttatggaggccagaaacaagcataaaggaaacaatccatacacaactaaaagatacaacttatctcagacattggtactgggagcagctaaaaaggaaagacccttagctcctgcaaccatccatttctccctttcctcagcagtggcctctaatagtgtagtgatattgggggggcacccgtcaaacaccactctgtttctgaacttccagatcatccaggctcccagaatcaaaagtgaatttacccccttcttggtcatgcctgacacaatatcagcaatacgtttccaccactgcaggaagtttgtgtcatcttggataggggcaagaatgtggagcccgaatttccgaagagtggtgtaccaatataatctggaaaagctacaagaaaccaaaagatggttgatggtttcaggctcttg

SEQ ID NO: 97143 - DNA, 2202 bp, Zea Mays
atggcgtcgggctcgtctcgcccccaaatcgaccagttcttcccggccaagaagcggaggccctcgtcgcggaagggcgagtcgccgcgacccgggacgcagcatgagagccccggcggcgccaaggggtccctggaagggtacctcgtccgttcgccttgcaaccgtgccgtggcagcggcatcggtggtccccgtgggctcgcccaggggcggggacccgggcgccaggcgtagcctctcggccgcaatggatgtcgacgtcggttcctcggcttcggtggctgcggcggcaggtgacggggcagactttgatctcaggaggagcacggcggatttcttgtcccattcctgcagtgctatcctgcctttgaggggtgactgtgattacagcgagcagtgccagatgaagcagaagcggagtgcgtcccagtcattcttggttccttgtgacaacgactatgtcaagaagcagcgagttgcccattgtggtggctttgaagctctaaaggaatctgttgagggggaacatataaaagttgggttttctctagcacctgtggaaaccctaaagtctgtatcgaggaattcccttacttcacctggtgaggagttctggaatgcagcaattgaactcgctgatgggatatctgcccaggctgataaggtccgtggaaggccagaatttgatgcagcagaagacaagtcatcttgtgcagtagcagcattctttaagactcttcctagatcaggaagggatgagcttgactgtcaaaacacagtaggcagcaatgatacacatcatatagagaaattgtcaaataaagttgaatcactggcagtaaactgtcagcatataattagctcacctttgcctgtgaagcagctagatttctttcatgaggatgatattaaagtttcaggttcaaaatttgaaacaaaaggcagctatgaaacttgtaatgcacaagcagaccgtgttccactgaaaggcagtggccgcctagaaaaggaaaatctcatggaccctgtggatgtgttgaagagaagtgctattaatttgcacactgattctgcagccatgagatgtcagggtgttttcaagtcaacaactgaagggaaggttcatccaactcaagaggctgaaagagattctaatcttattaggagagatctcaatcagccaacccacaatgaaaataaatcacttgctgcatattcaaataatcgcaagacttggatagattccaagagtaaagttgcttctcaggaagtggaagctagcacacctactagctccattcctctaaaggatcactcaaagatatcaagttggcttcctcctgacctttgtgctatatacatgaaaaaaggcatttcagagctgtacccttggcaggttgaatgtttacttgtagaaggtgtcttgggcaaaaggaatcttgtgtattgtgcatccacgagtgctggtaaaagttttgttgctgaagttctgatgttgaggcagatactgtcaactgggaatatggcaattcttgtccttccctatgtgtcaatatgcgctgaaaaggctgaacatcttgaacaacttcttgagccactgggtaggcatgtccgtagcttctacggaaaccaggggggaggctcacttcctaaagatacagcagttgctgtatgtaccatagagaaggcaaactctttggtaaacaagttgttggaggatggccgcctctctgaacttggtgtaattgtcatagatgaacttcatatggttggtgaccaacatagaggatatcttttagagctgatgttgacaaagcttcgatatgctgctggtgaagggactttacagtcatgtagcggagaagtttcaagttctagcagtgggaagattgcaagtcatgggttgcagataattggtatgagtgctactatgcccaacatcgctgcggtggctgattggcttcaaccggatcaggcatctcccgtgacaacggatctgcggagggcgacaacccttgtggtcccaacttcattttcaagcatgttcgggtgcttctcagctctagcactcggtcaactttggcttggcattggcatgtggcgcaaatgcaatagcaactgcgttgctagcttgcatggccaccaaggatgggtgctcttagtgaggcaaacaagtgccaaacctgcaaccatgacatag

SEQ ID NO: 97144 - DNA, 1153 bp, Zea Mays
atggaggacatctgcgttgcgaaggcccctagttggcgctggacttcggcaagggcggtggtgatcgctgccaactccgacgcctgggtggcggacgctacactgtcgtcggtgttggatcctggcatctccgataccaaattggctgctctttatcaaactgactttcgaccagttccactggaggaattcataaaagttggtaatcaaatatttgataaagacatgaacgttgttcgtgtccttcccaaagtagctgaccatggtggcaaggatccagatcatattgttgaattgtgtaatgaggttgttcttcagggccattctgtgcttttgttttgctccagtcgtaaaggctgcgaatcaactgcaaggcatgttgccaagttcttgaaactaccctctgttggaacaactgatgttagttcggagttttcagatgctgcagctgctattgaggccttgaggaggtgccctgctggattggatccaatattgggagaaacccttccttttggtgttgcatatcatcatgctggtcttacggtcgaggagagggagattgtggaatcatgctaccgtaaaggccttgtccgtgttctgactgccacttcaactttagctgctggtgttaacttgcctgctagacgggttatattcaggcagcccaagataggtcgtgattttattgatgggactcgctatagacagatggctggtcgtgctggtcgaactggaatagacacaaaaggagaaagtatacttgtatgcaggcctgaagaggtcaagagagttacaggtattattagaagcaattgccctcccttggagtcctgcctctcagaagataaaaatggaatgactcatgcaattatggaggttgttgctggtgggattgttcaaactgcaaatgatattcatcgttatgtgcggtgtacgctgcttaattccacaagaccttttgatgatgtcgtgaagtcagctcaagactcccttcgttggttatgccataaaagctttcttgagtggaaccatgagaccaagatatactccgctactccccttggtagagctgcttttggaagttcactcaaccctgaggaatcattggtagcatacttgtcttttgctccttcattattttattgcattg

SEQ ID NO: 97145 - DNA, 1503 bp, Zea Mays
atggaggacatctgcgttgcgaaggcccctagttggcgctggacttcggcaagggcggtggtgatcgctgccaactccgacgcctgggtggcggacgctacactgtcgtcggtgttggatcctggcatctccgataccaaattggctgctctttatcaaactgactttcgaccagttccactggaggaattcataaaagttggtaatcaaatatttgataaagacatgaacgttgttcgtgtccttcccaaagtagctgaccatggtggcaaggatccagatcatattgttgaattgtgtaatgaggttgttcttcagggccattctgtgcttttgttttgctccagtcgtaaaggctgcgaatcaactgcaaggcatgttgccaagttcttgaaactaccctctgttggaacaactgatgttagttcggagttttcagatgctgcagctgctattgaggccttgaggaggtgccctgctggattggatccaatattgggagaaacccttccttttggtgttgcatatcatcatgctggtcttacggtcgaggagagggagattgtggaatcatgctaccgtaaaggccttgtccgtgttctgactgccacttcaactttagctgctggtgttaacttgcctgctagacgggttatattcaggcagcccaagataggtcgtgattttattgatgggactcgctatagacagatggctggtcgtgctggtcgaactggaatagacacaaaaggagaaagtatacttgtatgcaggcctgaagaggtcaagagagttacaggtattattagaagcaattgccctcccttggagtcctgcctctcagaagataaaaatggaatgactcatgcaattatggaggttgttgctggtgggattgttcaaactgcaaatgatattcatcgttatgtgcggtgtacgctgcttaattccacaagaccttttgatgatgtcgtgaagtcagctcaagactcccttcgttggttatgccataaaagctttcttgagtggaaccatgagaccaagatatactccgctactccccttggtagagctgcttttggaagttcactcaaccctgaggaatcattggttgttcttgatgatctttcgagggcaagagaaggctttgttctggcatctgatttacatttagtttacttggtcacacccataaatgtagaccttgaacctgattgggaattatattacgagaaattcatgcaactttcttctcttgagcagtcagtaggcaatcgggttggagtaattgaacccttcttgatgcacatggctcatggggcgtcgataccttttcgtgcaaggcctgagagaaacaccgggttaagtaacaagtctgcacaagctgctggaaatactcttgttagtgagcacacaatcagagtgtctaagcgcttttatgtggctttaatgttatcgaggcttgctcagaatacacaagagagctatgtatcatttcattga

SEQ ID NO: 97146 - DNA, 465 bp, Zea Mays
gagattcctattgctgatgtttgtgagacatttaaggtcgccagaggtatgattcaggcactgcaggaaaatgctggcaggtttgcttcaatggtttctgcattttgtcaaaggcttggttggaatgatttagaaggccttgtttcgaaattccaaaatcgtgtctcttttggagttagggcagagattgcagaactgacatcaattccatttgtcaaggtgtgctttaattaccatgcatatatgaattatctaagtgtctctggatcttatttcagtatggtcatgtaaaatatgaaatagggttcacgtgcaagggctttgtacaagtctggtctgcgtactcctgttgccattgctgaagcatctattcctgaaattgcaaaagctctttttgaatcttctgcttggtctgggcaaggtgattctggtttacgacgaatgcaatttggtgtagcaaaaaaa

SEQ ID NO: 97147 - DNA, 2282 bp, Zea Mays
aaacagtttgtcaagaggcgacttcatagtcaagaagctgctgctgcaaatcgcgatggaagatggagaaatcagatgcacaaagcagcacacaatggctgctgtagacgtgctgcacagacacgggctttgtatactgttctgaagaaattacttactcaaaatctttctgttttggttgaaacaatcgaggccccattggttaatgttcttgctgatatggagctttggggaattggcgctgacatggatgcttgtctccgtgcgaggcatattataacaaaaaagctgaaggaactagagaaagaagcttacagattggcaggcaagaatttctctctaaatgctactgctgatatcgcagacattctatatacacacctaaaattgccagttccaaaaggctgtgagaaagggaagctgcatcctagcactgacaagcagtctttggaccacctaagggatcaacaccccattatcccattaattaaggaacacagaacattagcaaaactgttaaatggcacgttgtggtccatttgttcacgtgctcaattgtgcactcaatcacaaaggtacatcatacatggaaattggcttcagacgtcaactgccactggccgtttgtccatggaggagccaaatctgcagtgtgttgagcatgtggtggaattcgatacagggaaaagcgataaagattactcaagcatttcagttgatgatcatcataaaatcaatgcccgtgattttttcatacctaccaaggagaactggttattcataactgctgattactcacagattgagttgcgtttaatggctcacttttctaaagatcatatgttggttgaacttctaaagaaacctgatggtgatgtttttaccatgattgcttcaagatgggctgagaaagaagaggccttgatttcttccaaagagagagaaaacactaaaagattcatatatggcatcctttatggaatgggtgcaaactcccttgcagaacaacttcagtgcagcactgaggaagctgcacagaaaattcaaagctttaggagattttttcctggtgtttcctcatggttacatgaagttgtgttatcctgtcgccaaaaaggatttgttgagactttattaggccggcgacgtgttcttacaaaaataacggctggcaatagcaaagagaaagctaaagcacagaggcaagcagtaaattctatttgccagggttctgctgctgatattattaaggtggctatgattagagttcattcaataattactaacagaactagtgcagctgattccacagatgaagttacaaggaaattttcagaacttggtggccagtgtcaccttattttgcaggtgcatgatgagttggtattagaagttgatccgtgcatggtagcacaggctggaaggttgttacagatatgtatggaagaagcagcttcactattggtacctttgcgcacaaagataaaggtgggaaaaacttggggttcactagaaccattccatcctgagccttgtttgatgcaaatggtgaatgtcagttggatgccaatgtttcatgacatgcaaggtcctggaagaaggctgaacaatttccaatatgcccccacaggggaccttggtgattctgtctggtgttcttcggtagaaccttcattgctatgtctacagtcttctgtcattgctgaccgtatgtgaaatcaacgcaacagcgaccagctccattactgaggatttgctatggactggtgattatcattatgattccatgtggcatgcaagaagcatatatatatcaccaatagatgctgttaaagggtttaaggtgtatttgaaaggtcttcctagttatactgcgaatcttttagataaacccttaagaaattggagggcctagtatatggtgatttttcttttgctaggcccagcgctaaaaaaccgattatggggtttattcaaagatgaaatttcatcctgtaactacaggttcaaggtgtatttggtttgatggatatcactatggacaagcgatggttggtttttgtacaagttggatgttgataaaaatgttggtatccatgccacacaaaaaaagcctaaccagcacccatattttgtaatccttgtcaagtatgttatatggtttacttgatagctctagcgaggctatccagtacctcaccttcaccctcatatttgtaatccttgtccacataattattagtatgttatatggttatttagtaattacgatggaaatatta

SEQ ID NO: 97148 - DNA, 2495 bp, Zea Mays
gtcctatcctctccctcgccatcatcgtctccgcctccgccgctccccctcggtcccctccccacctcccgttctctccctccttggatagggttagagactgagctcccccgcacgcgcgcgagccatggtctccttcacctgttcccaggtcggcgcgacggcagcgggcggagcctcgcccttcctcggctaccggtggcggagcggccccgggggagccaccccgtcgagctccctcttcgttggccggcggctggcagcggtgcagatgcgcgcgccatctcgcggggcccgcgggggctccgcgctgcgggtcacgtgcgagaaggtggtggggatcgacctgggcaccaccaactccgcggtcgccgccatggagggcggcaagccgaccgtcgtcaccaacgccgagggcgcgcgcaccacgccttccgtggtggcgtacaccaagaccggggagcgcctggtggggcagattgctaagcgccaggcggtcgtgaaccccgagaacaccttcttctctgtcaagcgcttcatcggccgcaagatggctgaggtcgacgacgaggccaagcaggtctcgtacggcgttgtcaaggacgagaacggcaacgtcaagctcgactgccccgctatcggcaaacagttcgctgccgaggagatctccgcgcaggttttgaggaagttggtggatgatgcatctaagtttcttaatgagaaaatcacaaaagcagtggttacagtcccagcatacttcaatgattcacaaaggacagcaactaaagatgctggccgcattgcaggactggaagttctccgtattattaatgaaccaactgctgcatcgttggcctatggtttcgagaagaaaaataatgaaacaattctagtgtttgatttgggaggcggaacctttgatgtatctgtattggaagttggtgatggtgtgtttgaggtgctttccacatctggtgacacacaccttggtggtgatgacttcgataagagaatagtagattggcttgctagcaacttcaagaaagatgaacgtattgatcttctgaaggataaacaagcccttcagaggcttactgaggcagcagagaaagctaagatggaactgtcaacgctgacacaggcaaatattagcctaccattcattactgctactgctgatgggccaaaacacatcgaggcaaccctctcgagagccaaattcgaggaactatgttcagaccttatagacaggcttaaaactcctgttaataatgcactgagagatgccaagttgtctctcagtgatctggatgaagttattcttgtgggtggatccacccgaatccctgcagttcaagaacttgtgaggaagcttactgacaaggatcccaatgttacggtcaaccctgatgaggttgtttctcttggggcagctgtgcagggcggggttttggcaggagatgtgaaagatgtcgttcttctggatgttactccattatctcttggtttggagacattgggtggagtgatgacaaagattatccccaggaataccacactgccaacctcaaaatcggaggtattctcaacagctgcagatggacagacgagcgttgagattaatgttctccagggagaaagagagtttgttagggacaacaagtcccttggaagcttccggttggacggaatccctcctgcacctcgtggtgtcccacaaattgaagtgaagtttgatattgatgcaaatggtatcctctcagttgctgccattgataagggcactggaaagaaacaggacatcaccatcactggtgctagtacgctacctaaggatgaggttgagagaatggtagaagaagccgataagtttgccaaggaggacaaagagaagagagatgcaatcgacaccaaaaaccaggcggactcagtggtctaccagactgagaagcaactgaaggagcttggcgacaaagtccccgctcctgtgaaagagaaggtggatgtgaagctccaggagctcaaagacgccatttctggtggatcaacacagagtatgaaagatgccatggctgctctgaaccaggaggtgatgcagattggccaggcaatgtataaccagcctggtgccagtgctgctgggcctactcctggtgctgaggccggacctacgcctggtaccggaccaacgcagaatgatggggatgtcattgacgcagacttcacagatagcaattgaggggtgattgatgcatggccatgtgttgagcaaggttggcgttaaggagtgaacaaattgttccttttttgtgttgggattgttactataggctatctagcatggagttgatagagatagtttttcgcgaacttctcctgtgattgactcaacaattagctgaatgctatataaagtcgaaaggagcgcataaggttttttattcaatttgtagctgattaattgaattgttgcaataaaggtgttgaattgatca

SEQ ID NO: 97149 - DNA, 664 bp, Zea Mays
ggccgagacgccaagccctctgaggagaaggagaacggccacgccaagcccggaagggatgaagacggcgacaaccgatctccccggcgcgacagggtttcagacggggaggaaggtggcgaacgccggaggatgcgcgatagggtttccgacgatgagaaggaggaaggacgtcgtcgcaggcgggctagggatccggatgatgagccggacgaccgccgtggcaagcgagaccgggagaaagacagacggcgccaccggcgccggagccctagctcggagtcagggtcctcgcccgacggccgtcgccatcgccgccggcgccgagacgagggttcgaggcggcgggacgaccgtaggcgaagggaggacgagggagacgagcgccgtagaagccctgtgaaggagctgaccccgccactgcctcccccaccgccgctccttccggagatgatccctgggcgcacgggtgggatctacatcccgcctttccgcatggcgcagatgatgcgtgatatggaggacaagtcgagccctgagtatcagcgcctcacctgggatgctctcaagaagagcatcaatgggctggtgaataaggtgaatgcgaccaatatcaagaatatagtgccagagctctttgcagagaaccttgttcgtgggcggg

SEQ ID NO: 97150 - DNA, 1372 bp, Zea Mays
gatgttttccaggcaaaccccaattttgttgaagatgagaaggcatatgagaatctaaagagaagcatcctgggagcagagtcttctgaagatgaagaaggatcagatgctgcttctgatgatgatgatgatgatgatgatgaatctgatgaagaggatgaggaacaaatggagataagggatagaacagagacaaatcttgtgaatcttagaagaacaatatatttgactattatgtctagtgttgattttgaagaagctggacacaagcttatgaaaattaagcttgagcctggtcaagagatggagctgtgcattatgcttcttgagtgttgcagtcaggagagaacatatcttcgttattatgggctgctaggacagcgtttttgcatgatcaataaagtgtaccaagagaacttcgaaaaatgctttgtgcaacaatattcgatgattcatcgtcttgaaacaaacaagttgaggaatgttgccaagttctttgcacatttgttggggactgatgcactcccttggcatgttttggcttacatcaggttgacagaggaagacacaacatcatcttctcgtattttcataaaaatattgttccaagaattatcggagcacctgggcatacgcctactcaatgagaggctgaatgatcctaacatgcaaggttcctttgagtctatcttcccaaaggatcatccgaagaatacaaggttctcgatcaacttcttcacgtccattggtcttggtggtatcacggaaagcctgagggagtacttgaagaacatgccacgtctaataatgcagcagcagaagccagaatcatcagagtcagattcaagtggatccgaatctggttcggaaagctctagttcagggtccagttctgagcctgagtcagaatcaagccctgatgagcgtgacagaaggcgaagtaataagaggaggaagaggacttgagagcacttccaactatgctttttggaattcatgtatttggttttgtttaaatgtgcttcttcagtatacatgtgcagtatgtgatctagctcttgatgtgttagtggtaatcagaaagccgtaacagtaagatactattcgaacttgtacgtggcaggttggtagtccagcaacaaagggccaacagagatcttgtttatttttcataacttccaatgcagaacaagttctgtacgtgggtatttgtaccattgcgacatcacactgctagccatgttctgtatcctgtagtgtggtaactggtaagcatcaaatatggacatcggttttgatttttttctgctcgttttttccccagtatatagacagtcaaagctataggcttctgtggccttcacaatttttg

SEQ ID NO: 97151 - DNA, 4203 bp, Zea Mays
ccacgccctgcgccccaccagatcctcttcctcctcggtttgcgagctcatcgattgctcactcatcactctatgctcacgagctccagccttcagagcgctataattccggcccgatcctttgttggaaaccttctccgagctttccacggttcatgggagcgcgagtggtgggtgcagcaagctccagccttttctggtgggtctgagctgagctgagctttgagagatccatcgagctggtctggatcgctagtttcgctggttggccgtggagttgatttgatttctgggagcgatgtcgcgccggctgtcgctgccggcggggtcgcaagtcacggtgactgtgtcgccgacgaggggcaaggctgagagccccggggacggggtgatcaagaggagcggcggcaggatcgggctcaccagccctgcgccgaggcactcgctcggtggggcggggtcctccaccatccccactgtgcagctctcgcccgtgcgccggagcggtggcagccggtacgcgtcgctggacggcggtgcaggcgcggatgacagcgccgagttcgtgcactacaccgtgcacatcccgcccacacccgagcggacggtggcggcgtccgctgactccgtcgatgcgccagcgccgacggcgtacgacgaggacggcggcgcggcgggggtgcgggcgcagaggagctacatctccggtaccatcttcacgggcggactcaaccaggccacgcgcggccacgttctcaacacctccgccaacagcgccgcggtcgcggcctccgccaacatgtcgtgcaagatgcgcggctgcgacatgccggcgttcctgtcctctggcgccggcggcgggccgtgcgattgcggcttcatgatctgccgcgagtgctacgcggactgcgtcgcggccgcggggaactgccccgggtgcaaggagccctactctgcggggagcgacaccgacgacgatggcgaggacgatgaggccgtctcctcgtccgaggagcgggaccagctgccgctcacgtcaatggcgaagcgcttctccctcatacactccatgaagatgcccagcaacaacggtggcggcggaggaaagccggccgagttcgaccacgcgcgctggctcttcgagaccaagggcacctatggctacggcaacgcgctctggcccaaggacggacacggcggcggtggcggtggcggcggcttctctggattcgaggagccgcccaacttcggctcccgctgccgccggccgctcaccaggaagaccagcatatctcaggccatcctcagtccttacaggctgctgatcgcaatccgtctcgtagcgctggggttcttcctgacatggcgtattcggcacccgaacccagaggcggtgtggttgtgggcgctttcggtgacgtgcgaggtctggttcgccttctcctggcttctcgacagcctccccaagctctgccccatccaccgggccgccgacctggatgtccttgccgagcgcttcgagctgcccaccgcccgcaatcccaagggccactccgacctgcccggcatcgacgtcttcgtctccaccgccgacccggagaaggagccgccgctcgtcacagccaacaccatcctctccatcctcgcggccgactacccggtcgagaagctcgcctgctacctctccgacgacggcggcgcgctgctcaccttcgaagcgctcgccgagacagcaagcttcgctcgcacctgggtgccgttctgccgcaagcacggcgttgagccgcgctgcccggaggcctacttcggccagaagagggacttcctcaggaacaaggtgcgtgtggatttcgtccgggagcggcggaaggtgaagcgggagtacgacgagttcaaggtcagggtgaactcgctgcccgaggccatccgccggcgctccgacgcctacaacgccggcgaggagctgcgcgccaggagaaggcagcaggaggaggccatggcggccggcaccattcttggagcgttgcctgaggcagcaggggccgtgaaggcgacatggatgtccgacggctcgcagtggcctggcacttggctcacctctgcaccagaccactcccgtggtgatcacgctggcatcattcaggcaatgcttgcgcctccgacatcagagcccgtgctgggcgcggagccggcggagtccggcgggctgatcgacacaacgggcgtggacatccggctgccgatgctggtgtacgtgtcccgcgagaagcgcccggggtacgaccacaacaagaaggccggcgccatgaacgcgctggtgcgcacgagcgccatcatgtcgaacgggcccttcatcctcaacctcgactgcgaccactacgtgcacaactcggcggcgctccgtgaggggatgtgcttcatgctcgatcgcggcggcgaccgcgtctgctatgtccagttcccgcagcggttcgagggcatcgaccccaacgaccggtacgccaaccacaacctcgtcttcttcgacgtcgccatgcgcgccatggacgggctgcagggacctatgtacgtcggcaccggctgcgtcttccgccgcaccgcgctgtacgggttcagcccgccgcgcgccacggagcaccacggttggctcgggaggaggaagatcaagctgttgctgaggaagcccaccatgggaaagaagacggacagggagaacaacagcgataaggagatgatgctgccgccgatcgaggacgacgccttccagcagctcgacgacatcgagtcgtccgcgctgctcccgcggcggttcggcagctcggcaacgttcgtggcgtccatccccgtggcagagtaccaggggcggctcctgcaggacacgcccggcgcgcaccagggccgccccgccggagccctggccgtgcctcgcgagccgcttgacgcggacaccgtcgcggaggccatcagcgtcatctcgtgcttctacgaggacaagacggagtgggggcggcgcatcgggtggatctacgggtcggtgacggaggacgtggtgacggggtaccggatgcacaaccgcgggtggcggtccgtgtactgcgtgacgcggcgcgacgcgttccgcggcacggcgcccatcaacctcaccgaccggttgcaccaggtgctccggtgggcgacggggtccgtggagatcttcttctcccgcaacaacgccctgttcgcgtccccgcggatgaagttcctccagcgcgtggcctacttcaacgtgggcatgtacccgttcacctccatcttcctcctcgtctactgcgtgctcccggccgtctccctcttctccggcaagttcatcgtgcagtcgctcaacgccaccttcctggcgctgctgctcgtcatcaccattacgctctgcctgctggccctgctggagatcaagtggtccgggatcacgctgcacgagtggtggcgcaacgagcagttctgggtgatcggcgggactagcgcgcacccggcggccgtgctgcagggcctcctcaaggtgattgccggcgtggacatctccttcacgctgacgtcgaagccgggcaccggcgacgacggcgaggaggacgcgttcgcggagctgtacgaggtgcggtggagcttcttgatggtgccgcccgtgacgatcatgatggtgaacgcggtggcggtagccgtggcgtcggcacgcacgctgtacagcgagttcccgcagtggagcaagctgcttggcggcgccttcttcagcttctgggtgctctgccacctctacccgttcgccaagggcctcctgggccgccgcggccgtgtgccgaccatcgtgttcgtctggtcggggctcatctccatgaccatctcgctgctgtgggtctacatcagccctcctgcgggtgccagggagctcatcggtggtggcggattcagcttcccgtagtagcgagatggataccagcggtaatgttgttatgttagcatgtgttgtctgaactgtatccgaagagaacctacatgaaggtgttcttgcttcatggggtgctgttccttaatagctgtgatggactgtgattcttcagtacctgacgagctactgtcattgtatcaaaattgcaacttgcttaagttgtttatgttttttctaactgtatcgtcacctattcatgtttctatcagtacagattggatgtc

SEQ ID NO: 97152 - DNA, 2350 bp, Zea Mays
tcccaagtttacgacccgacgtccgagggggagaggttcctctgacgtactgcagggggcagtagggtcactgcacgcgggccctgtcgcacgcgggggccacgcggcagtgccctcttcccacgtcagaggatctcgttcccgtccgaggacccccgcttctccttctccttgctcggacccctacagacaatcacacatatacacacacacgcagcaggtacccgcgctcgtgctcttaccgcgccgggatgggcgcgaaggggatggcgacggcggcggggacggcggtgttgctatacctggtgctgtcgggccggctctgcggggacgccgccggcgacggcggcaacctggatgaccagctgatatcgtcggctgtttcggcggcggctgaggcgcggaggcggaggaaggaggacgcccgggcgcggcgggagcagcggcgggcgtcgcgcaccaagtggcggtggcccgagcgcgccccggacgggtggggcgaggcggccgccttggccgcgcgcaccgtgcgcttcacctgggcggagacgctcggcaagtgggccctaggggaggtctccttcggtatcaagcactacatgcgccagcagggcaatctgcagcatgagtatgctggaagtgattctgtactactggatgggcctgaggtaaggcaggagctgatttcgctgctcagatatctgaagcaatgcatgtatttctcgaagaagccatacaacgtgtttttggagtatggtggttatggccagaatgatgttcttataaagaaatctaaggcgaggatcttgaagcctgccttcacaattgtctgtgacagaagtagccaatgctttctcctcttcattaggggggctatcagtgttaaggagcggttgacagcagcaactggcgcagaggttccatttcatcacgttgtggtccaggaaggtcaagtctccaacctagtgttgggttacgctcactgtggaatggttgtagcagctcgatggattgcaaaacaagccattccttgcctgagtaaagcaatcgagcaattcccagaatatgaggttaagatcattggacattcaatgggagctgggattgcaacaatactaacatacatccttcgcgagaatgagaagctggcatcatccacttgtattgcatttgggccagctgcttgcatgacatgggacttggctgagtcgggtaaagactttgttacctccatcgttaacagaaatgacctagtgccatcacttggcctagtttctgctgccaagcttcgggcagaggttatgtcatcgtcttgggcacatgaccttcgcaaacaaattcagcagactagattcttaggttttgtgaaccgttctgtgagtttcataaggtctcatgtgccctttgtctctgatccaagatcgaaggttgtggatgttgatatgatgcaatctcagagtcctgaggctgggagtaagccttcagcagatacccatgctgtggtgaagaaacgccctgcactggcttgctggtcatgtgtggctgcacccaaacagagtatggaatcgtcaatacaaattgagggcacgaaagttcaaaccgacactggtgtccaaactgagaaaactaccgaagcggcaactgctgcgctagtctcaatccatcttggtgaactaaaccttcaagaaccagataacagagaggaaaagggatcagcattgacagaaacagatgaagacgccatggagcttctggagtccttgaccgacgagaagcagttgccatcatcgtcaagctctggtcaagagccacaccagctgtaccccccagggaaaatactccacatggttggattgccagcagcggaagaggcaaccacgagtcagcaaggagcccaggaggaggtcatcgccctatatgagacaccccgacatttgtacagtaagattcgcctggcgaggtccatgataggagaacattacatgcccaagtacatcaagacaatggagcagttgatagacaagcttgcagaggacatcgacgaccagctggactccttgtagcatcaaaagtgtgtacaggataattattgtacagatcatgaaaaggaaagtcattctttcagattgcttgtgcgtaattgtagttggtttaagttttgtgatggcgatctagaagatgtacaacactgccagttgggctctggtctgtttattcttggtcattccactttggcaggcacctcaagaaaagctcaaagagctgcgcctggtgatgatctctgtaatttcaacagcactagttttctttagctgtgaatatttaatatattaaccattaatttgtgggc

SEQ ID NO: 97153 - DNA, 617 bp, Zea Mays
cattggtatgctcctcctctgctccctcctcgtcgtctgtcgtctcctcgcgctcgtcctccgctgcccgactccggcgtcgtccccacagtccgcaccagccgacccaaccaccgctcaagccttaacccaacatttatctgtatcccgtggcaaggagcatctgcgcgtcacatccgcgatcgcgcgctctacgtcgcctcccgccgccgccgcacggccgcgacggatgctcggccaccgcttccctaccgccctccgcctcccacatggtctgctgcagaggaggagcatcatggcccgccgcggcctgaccatcatggccggtggcgaggcggagggtccgctcgcgggtttcttcgactacatggagcggctgcgcaactacgagcgctcgggcgtgccgcgcggcgccggcaccgactccgacgacgggtttgacctcggacgcatgcgccggctcctccgccggctcggcgacccccacacccacttcccggctgtgcatatcgccggcaccaaggggaaaggttctactgctgcattcctgtccaatatcatgagggcccaaggctacaatgtaggctgcagcaactctgagattgactttattatca

SEQ ID NO: 97154 - DNA, 2008 bp, Zea Mays
cattggtatgctcctcctctgctccctcctcgtcgtctgtcgtctcctcgcgctcgtcctccgctgcccgactccggcgtcgtccccacagtccgcaccagccgacccaaccaccgctcaagccttaacccaacatttatctgtatcccgtggcaaggagcatctgcgcgtcacatccgcgatcgcgcgctctacgtcgcctcccgccgccgccgcacggccgcgacggatgctcggccaccgcttccctaccgccctccgcctcccacatggtctgctgcagaggaggagcatcatggcccgccgcggcctgaccatcatggccggtggcgaggcggagggtccgctcgcgggtttcttcgactacatggagcggctgcgcaactacgagcgctcgggcgtgccgcgcggcgccggcaccgactccgacgacgggtttgacctcggacgcatgcgccggctcctccgccggctcggcgacccccacacccacttcccggctgtgcatatcgccggcaccaaggggaaaggttctactgctgcattcctgtccaatatcatgagggcccaaggctacaatgtaggctgttattctagtccacatcttctaacaatacgtgaacggatttctgttggaaatgatggaggccctgttccagtacgactgttgagtgatctttttgacgaggctaagaaagccattgatgaagcaatagaatcggaaaatggatccctgacacattttgaggtttttactgctctctcatttcttctattctcacaacagaatgttgacattgccatcattgaagtcttggtggagctagggatgcaacaaatgttattcgaagtactgaattagcagcatctgtcataacaacagtagggagggaacatctggttgcattgggtggctccctgcaaagcatagcaatagcaaagtctggaatcatcaaacaaggacgaccggttgtgattggtggaccattttcagaagatattgagcaaattattcgtgacagggcattcttgacacaatctcccgtgatatctgcttgtggtcatggcatcaagagctttacaaaatgcatagattgggataatggtaagccgtatcaacgctgttacatcagcattaagatttcaagggatgtacccttgtcgattgaaatgcatgacataaacctccagctgctgggagatcatcaacgtcagaatgctgtcacagctgcttgcgcagctctctgtctctgtagtcaaggatgggatatctctgacgcttctatccaagccggcttagaggagacccaacttcctggtaggagccagtttctcacagcagaggaagcctcggcacttgggttcgatagcgcatccactgtactaattgatggagctcatactgaggaatctgcaaaggctttatcaggcgtgataaaaactgtcagaccagaagggcctctagcgcttgttgtcggaatggctagtgacaaggagcatcttgcgtttgccgagcagcttctctcaggtcaaacgcctgacgttgtgctgctgacagaggcgagcgtcgccggaggaacctcccgcgcaatgccagcctcgtccctgaaagaagtatggatagccgcggcacgcgatcgtggcatcgagtacgtggacatcggtggcgtcagtggtgctgaaaccccagagcacattagtgatctcttggactgcagtccatcgtcgaattccggaagaaagcccatggtgatcgggtgccaagacgtggcgccgttctcctcgaacctgatcgttgctgcctcccagctcctggagagcagaggcacggctccaggcctcatctgcgtgaccggctccctgcatctcgtcggggccgtactgcaacagatgggacggcattagaggaaacaaccatttcatctttcatgccatataatacactggatgattgtgtctacactgaactcggagtggtgggtggtgctgctgctgacgaatctctagt

SEQ ID NO: 97155 - DNA, 2012 bp, Zea Mays
cattggtatgctcctcctctgctccctcctcgtcgtctgtcgtctcctcgcgctcgtcctccgctgcccgactccggcgtcgtccccacagtccgcaccagccgacccaaccaccgctcaagccttaacccaacatttatctgtatcccgtggcaaggagcatctgcgcgtcacatccgcgatcgcgcgctctacgtcgcctcccgccgccgccgcacggccgcgacggatgctcggccaccgcttccctaccgccctccgcctcccacatggtctgctgcagaggaggagcatcatggcccgccgcggcctgaccatcatggccggtggcgaggcggagggtccgctcgcgggtttcttcgactacatggagcggctgcgcaactacgagcgctcgggcgtgccgcgcggcgccggcaccgactccgacgacgggtttgacctcggacgcatgcgccggctcctccgccggctcggcgacccccacacccacttcccggctgtgcatatcgccggcaccaaggggaaaggttctactgctgcattcctgtccaatatcatgagggcccaaggctacaatgtaggctgttattctagtccacatcttctaacaatacgtgaacggatttctgttggaaatgatggaggccctgttccagtacgactgttgagtgatctttttgacgaggctaagaaagccattgatgaagcaatagaatcggaaaatggatccctgacacattttgaggtttttactgctctctcatttcttctattctcacaacagaatgttgacattgccatcattgaagcaggtcttggtggagctagggatgcaacaaatgttattcgaagtactgaattagcagcatctgtcataacaacagtagggagggaacatctggttgcattgggtggctccctgcaaagcatagcaatagcaaagtctggaatcatcaaacaaggacgaccggttgtgattggtggaccattttcagaagatattgagcaaattattcgtgacagggcattcttgacacaatctcccgtgatatctgcttgtggtcatggcatcaagagctttacaaaatgcatagattgggataatggtaagccgtatcaacgctgttacatcagcattaagatttcaagggatgtacccttgtcgattgaaatgcatgacataaacctccagctgctgggagatcatcaacgtcagaatgctgtcacagctgcttgcgcagctctctgtctctgtagtcaaggatgggatatctctgacgcttctatccaagccggcttagaggagacccaacttcctggtaggagccagtttctcacagcagaggaagcctcggcacttgggttcgatagcgcatccactgtactaattgatggagctcatactgaggaatctgcaaaggctttatcaggcgtgataaaaactgtcagaccagaagggcctctagcgcttgttgtcggaatggctagtgacaaggagcatcttgcgtttgccgagcagcttctctcaggtcaaacgcctgacgttgtgctgctgacagaggcgagcgtcgccggaggaacctcccgcgcaatgccagcctcgtccctgaaagaagtatggatagccgcggcacgcgatcgtggcatcgagtacgtggacatcggtggcgtcagtggtgctgaaaccccagagcacattagtgatctcttggactgcagtccatcgtcgaattccggaagaaagcccatggtgatcgggtgccaagacgtggcgccgttctcctcgaacctgatcgttgctgcctcccagctcctggagagcagaggcacggctccaggcctcatctgcgtgaccggctccctgcatctcgtcggggccgtactgcaacagatgggacggcattagaggaaacaaccatttcatctttcatgccatataatacactggatgattgtgtctacactgaactcggagtggtgggtggtgctgctgctgacgaatctctagt

SEQ ID NO: 97156 - DNA, 97 bp, Zea Mays
ccccctctaggcgactttcaggctataaatacccccaaccaccaccattcaagttatccaagttttctgaactcaacattcaatacaagagcaaaag

SEQ ID NO: 97157 - DNA, 929 bp, Zea Mays
gaatgcaatgcatcgatcataccccttatgattctttcatctcaagattcgaatcatgcgaaatgaggtaacaattacacactaactaatcccataaaatgggatcattctactgcacgctatatacacatgaacattaccggtgcctccgtttgcatacacagatacaccggagcagagagtgacaaatggcgcaagaagtgccccaaaggcaccataaccacatctgggggacgggagcttacgcccccaacgattattgcggactcacaacgtgagccagggcaaacctgcaagatcttgacaatacatgctgatgctgacactgcacacacaatgaggaacacgagtctgtctagtccttgtagacaagaggcttgttgacccatcttattcggcagccacaagcctgcagcatctggaggagctcaggggagagcacggtcttcagcccgcagagcatcttcagcttcttcagcctcccgcaggctgctcgcagagccatctcaaacccttctattgagacccatgagaggtgcaccatcttaatgtcctggaggcatcgcagggagctcagcaggtggcacaggcccaaccccgtgacttggcagtacgatatcgttacctgtctaaggttcaaagcataacgagcaagggcccacaggccagcgtcatcaaccgaatagcatcgtttcaagtccagctctatcaggttcttgcatccgattgcaactgaggagatcccaatgcctgttacgcggaccaagcacctcagttcaaggtttgtgagctcctccagggagcctaggtgacccaaaccagtatcagtgatcttgttgcagtaacacaagttcagtaacttaatcctcttgcacccatttgctaaagctgccaacccatcatcagtaatagagttgcacctgaagcaa

SEQ ID NO: 97158 - DNA, 1322 bp, Zea Mays
cgccacagccttcttcctcctctcccccacacgcacaactctcttcttccctgtgcatggcgcagaaaaatctccagctctgcgcgctcccctcggccaccatggcgccctcctccctactccctgctggcgagcaacagctccatggcgcccagatttttttccagcagagagcttcttccccatggagcttcttccctgcaggtcgccagcagccttctccctggccgccgagctccctgctcctcctttggcgagcggctgcagcagggggtcttcttccccagcgacgcttcagctccaggaccgtccatggctcctctccttgagcgccttcccttttgctccagccgctgctcctcaacgccgcacccagttgagctctgcaagcccggtctgcaggtcccctctgctcggacgccgagctccctacgccgggtcccctctccagcggcacccatcccccagcagcgccatggccgagctccctgtttccccgctccctgcccaaaaaaaaaaaaaatccagcgaggtcccatctccagaccagcgcccctgctatctcctccccatggcgtcgagcttctccgtcgcacctcggtgacgtgcccagcgcgcccgccatccatccctgtgcacggtgcccgtcctcccctctgttccagccatggtgcggcacaccctctgatccaagctcgagcaggtgaggccgccgtcgcccatggccgatacccggctttccggccagcagccagccacgcgcagcacaacaccatgcctgctgtcccagccaccccgtcgagttcccctttgcaatttccatggcgcacagcagcccaccctccaaaacaccaagcagcggcagcaacctccatggcgcccctgcttccatcccatagctgagcgcccttgctattctcttcaatgccccttggctgttcgacggaatacccgtgagaaataatgtgttgtgcgcagccccgtccgtgatgccgtcgaccctcgctagtggtcgacgccgcgcttcacgcttggctcattcgacgaaacgccaagccttgtggacagcccatgtgactagcctcgattcgtccaggttgttcacttggtattttgtggattaatctgtttaagctttggtctatgttgtgcatgtgtaagaaaatgtatttgtatggattgaagttcgtggtgaaagaaaaagaagtagaaaaggactcgaacgtttttatatttcgataggaatatatgcgatgtatcgtttgatgtgtgcgatttgtagtttgtataattatattttggttgatgtggtgtacattggt

SEQ ID NO: 97159 - DNA, 1293 bp, Zea Mays
aattacagaaacagctgcgggaggaatcaccgaatcaggacacggccggcggaattccacttcccatgcattattagccgaggcggggccctcctgttggtcccaccagtcagtgggatgtgtggatgctaaccagtgcagtggaggattagcgatcttctagaatcgtgtgcgagctggacagcaggaagagccgtagagttcgacgcgaggagcgagcgagtgattagctcgtgcgtgctgtgcaaggaaagtaacccagcagatcgatcggtcgaggcgggtaggacaggatctagaggtagctagccatggcggaggaagcgtctgcgcctgcggcggggacggaagcgccgccggggaagatgacgatggtggtaggggtcgacgagagcgagcacagcttctacgcgctgcagtgggcactgcagcacttcttcccgccgggccagccgcagcagtaccgcctcgtcgtcgtcaccgccaagcccaccgccgcctccgccgtcggcctcgccggcccaggcgccgcggatgtgctgccgtacgtggaggcggatctcaagcgctccgccctgcgcgtcgtcgaaaaagccaaaggcctctgcacacaggcgagcgacgctgtgtttgaggcgctggagggggacgctaggaacgtcctctgcgaggctgtcgagaggcacggggccgagatgctcgtcgtcggcagccatggctacggagccattaaaagggctgttcttggaagtgtgagcgactactgtgcccatcacgcgcactgcaccgtgatgatagtaaagaagcccaagcagcacaagcactgatcaatgccgactgatcactacgtgtactgcaaataatatgtactactgcaaagttatgtgtgcgtccgtccgtttgtgaataattgggtcatcaaccatcacatcttcggttgcttctacaagtatccgatccaatccttctacgtgtggattgggatttacaaataattgattgttctctgaacctgaaaacaatgtatttgtattaatgtgttggaacaattatatgtagttgcaacttcttttctgtgagccgtcggcgtgtatgcacattttaggtggagaaaatggtatcgatcagatgaaagggtgaatgcacgtgatgaactcgtcagtctgatacatgctccgaacactaatcactgcgttggcgtcgatccgggcgctaatcactgcgttggtatcaatcagatgaaagggtgaatgcacgtgattacacagccatgcccatgccatttacatgttc

SEQ ID NO: 97160 - DNA, 1067 bp, Zea Mays
accagtcagtgggatgtgtggatgctaaccagtgcagtggaggattagcgatcttctagaatcgtgtgcgagctggacagcaggaagagccgtagagttcgacgcgaggagcgagcgagtgattagctcgtgcgtgctgtgcaaggaaagtaacccagcagatcgatcggtcgaggcgggtaggacaggatctagaggtagctagccatggcggaggaagcgtctgcgcctgcggcggggacggaagcgccgccggggaagatgacgatggtggtaggggtcgacgagagcgagcacagcttctacgcgctgcagtgggcactgcagcacttcttcccgccgggccagccgcagcagtaccgcctcgtcgtcgtcaccgccaagcccaccgccgcctccgccgtcggcctcgccggcccaggcgccgcggatgtgctgccgtacgtggaggcggatctcaagcgctccgccctgcgcgtcgtcgaaaaagccaaaggcctctgcacacagggctgttcttggaagtgtgagcgactactgtgcccatcacgcgcactgcaccgtgatgatagtaaagaagcccaagcagcacaagcactgatcaatgccgactgatcactacgtgtactgcaaataatatgtactactgcaaagttatgtgtgcgtccgtccgtttgtgaataattgggtcatcaaccatcacatcttcggttgcttctacaagtatccgatccaatccttctacgtgtggattgggatttacaaataattgattgttctctgaacctgaaaacaatgtatttgtattaatgtgttggaacaattatatgtagttgcaacttcttttctgtgagccgtcggcgtgtatgcacattttaggtggagaaaatggtatcgatcagatgaaagggtgaatgcacgtgatgaactcgtcagtctgatacatgctccgaacactaatcactgcgttggcgtcgatccgggcgctaatcactgcgttggtatcaatcagatgaaagggtgaatgcacgtgattacacagccatgcccatgccatttacatgttc

SEQ ID NO: 97161 - DNA, 865 bp, Zea Mays
caaggaaagtaacccagcagatcgatcggtcgaggcgggtaggacaggatctagaggtagctagccatggcggaggaagcgtctgcgcctgcggcggggacggaagcgccgccggggaagatgacgatggtggtaggggtcgacgagagcgagcacagcttctacgcgctgcagtgggcactgcagcacttcttcccgccgggccagccgcagcagtaccgcctcgtcgtcgtcaccgccaagcccaccgccgcctccgccgtcggcctcgccggcccaggcgccgcggatgtgctgccgtacgtggaggcggatctcaagcgctccgccctgcgcgtcgtcgaaaaagccaaaggcctctgcacacaggtacgagcgagcgacgctgtgtttgaggcgctggagggggacgctaggaacgtcctctgcgaggctgtcgagaggcacggggccgagatgctcgtcgtcggcagccatggctacggagccattaaaagggctgttcttggaagtgtgagcgactactgtgcccatcacgcgcactgcaccgtgatgatagtaaagaagcccaagcagcacaagcactgatcaatgccgactgatcactacgtgtactgcaaataatatgtactactgcaaagttatgtgtgcgtccgtccgtttgtgaataattgggtcatcaaccatcacatcttcggttgcttctacaagtatccgatccaatccttctacgtgtggattgggatttacaaataattgattgttctctgaacctgaaaacaatgtatttgtattaatgtgttggaacaattatatgtagttgcaacttcttttctgtgagccgtcggcgtgtatgcacatttta

SEQ ID NO: 97162 - DNA, 819 bp, Zea Mays
gcgagcacagcttctacgcgctgcagtgggcactgcagcacttcttcccaggcgccgcggatgtgctgccgtacgtggaggcggatctcaagcgctccgccctgcgcgtcgtcgaaaaagccaaaggcctctgcacacaggcgagcgacgctgtgtttgaggcgctggagggggacgctaggaacgtcctctgcgaggctgtcgagaggcacggggccgagatgctcgtcgtcggcagccatggctacggagccattaaaagggctgttcttggaagtgtgagcgactactgtgcccatcacgcgcactgcaccgtgatgatagtaaagaagcccaagcagcacaagcactgatcaatgccgactgatcactacgtgtactgcaaataatatgtactactgcaaagttatgtgtgcgtccgtccgtttgtgaataattgggtcatcaaccatcacatcttcggttgcttctacaagtatccgatccaatccttctacgtgtggattgggatttacaaataattgattgttctctgaacctgaaaacaatgtatttgtattaatgtgttggaacaattatatgtagttgcaacttcttttctgtgagccgtcggcgtgtatgcacattttaggtggagaaaatggtatcgatcagatgaaagggtgaatgcacgtgatgaactcgtcagtctgatacatgctccgaacactaatcactgcgttggcgtcgatccgggcgctaatcactgcgttggtatcaatcagatgaaagggtgaatgcacgtgattacacagccatgcccatgccatttacatgttc

SEQ ID NO: 97163 - DNA, 292 bp, Zea Mays
ggggagaccaaccgaggaggcgacgatgcgccgcgggacggcgcgagccctggccgccctcccgctccccgccggcgccgtgctcagccccagcccgagccggccgcggggcgtcgttgaagcggcggcgaaggagagggacgccgtcggcctcagcgcgcatgagggccggcgaatggtcccagcaaggggcggcgccgtcctcgcgagagccgacatggtctccatcctttaccacgagtccgtgcgaggcgagagcagagcagagcacagcacgcgacttttggattag

SEQ ID NO: 97164 - DNA, 267 bp, Zea Mays
atgcgccgcgggacggcgcgagccctggccgccctcccgctccccgccggcgccgtgctcagccccagcccgagccggccgcggggcgtcgttgaagcggcggcgaaggagagggacgccgtcggcctcagcgcgcatgagggccggcgaatggtcccagcaaggggcggcgccgtcctcgcgagagccgacatggtctccatcctttaccacgagtccgtgcgaggcgagagcagagcagagcacagcacgcgacttttggattag

SEQ ID NO: 97165 - DNA, 1318 bp, Zea Mays
ggaaaaaaaaaacctcccccacctgccaccgcgaactgccggaggaatctctggcgatggcgccgccagccgctgcggttgccgccgtccaccaccgcagcccgcacctgctcctccgccgcggcggcgggggtctcctcccatctccttcgggtcccgccacgcttcctttctcctcgcggggtgcggcctgcacgcccgcgcgcctgcgtttgccgccgccgcggttctctctctcccccgtcccgaagagcctctccgccgcctcctcctcccacgtccctgtacggtccctattcaccggcatcgtcgaggaggtcggccgcgtgcgccgtctcggcccgccgctcacgccgtctgggggcggcggtggcggcgaggctcctggccttgacttggaggtcgagaccaagaacctcctcgctggaacgcagctcggtgacagcgtggcggtcgacggcgcctgcctcaccgtggcggcgatcgacccggccgcgtccacgctcactttcggcgtggccccggagacgctccgccggacgtccctgggagggcgcgccccgggcgatggtgtcaacctcgagcgcgcgctcacgccgtcgtcccgcatgggcgggcacttcgtgcagggccacgtcgacggaaccggggagatcgctgcgttccggccggacggggactcgctctgggtcaccgtgcgcgccccgccggagatcctccggctgctcgtgcccaagggcttcgtcgccgtcgacggcactagcctcactgttgtcagtgtggacgacgagggcggctggtttgacttcatgctcgtcaggtacacgcaggacaacatcgtgctgccgaccaagaaggtcggagacaaggtgaacctggaggcggatatactggggaagtacgtcgagaagctcctcgctgggagggttgaggccatggcgaaggttgattcttgatctaccattgctgagctgctggattaatcgtcattctataggcatttcagcaatgttatgttcatcaataatagcagttcattccattttgttgcaattggctcgtgactttttttaaaaaaaatcagtgagacagtaataaaacataagttatcgaggaaatgacttatcatttcttttcatctgttgagatagatgtacaagtacccatactctattatgcagccacatttagaagtttgttttgttgttgatgaatattagtaagtggtgaacaagagcagcatagcagcatccagaaactaagtgactaatgttgctgccaaataaatgatgcggccctccagaataatcatatccaa

SEQ ID NO: 97166 - DNA, 1456 bp, Zea Mays
ggaaaaaaaaaacctcccccacctgccaccgcgaactgccggaggaatctctggcgatggcgccgccagccgctgcggttgccgccgtccaccaccgcagcccgcacctgctcctccgccgcggcggcgggggtctcctcccatctccttcgggtcccgccacgcttcctttctcctcgcggggtgcggcctgcacgcccgcgcgcctgcgtttgccgccgccgcggttctctctctcccccgtcccgaagagcctctccgccgcctcctcctcccacgtccctgtacggtccctattcaccggcatcgtcgaggaggtcggccgcgtgcgccgtctcggcccgccgctcacgccgtctgggggcggcggtggcggcgaggctcctggccttgacttggaggtcgagaccaagaacctcctcgctggaacgcagctcggtgacagcgtggcggtcgacggcgcctgcctcaccgtggcggcgatcgacccggccgcgtccacgctcactttcggcgtggccccggagacgctccgccggacgtccctgggagggcgcgccccgggcgatggtgtcaacctcgagcgcgcgctcacgccgtcgtcccgcatgggcgggcacttcgtgcagggccacgtcgacggaaccggggagatcgctgcgttccggccggacggggactcgctctgggtcaccgtgcgcgccccgccggagatcctccggctgctcgtgcccaagggcttcgtcgccgtcgacggcactagcctcactgttgtcagtgtggacgacgagggcggctggtttgacttcatgctcgtcaggtacacgcaggacaacatcgtgctgccgaccaagaaggtcggagacaaggtgaacctggaggcggatatactggggaagtacgtcgagaagctcctcgctgggagggttgaggccatggcgaaggggtgaagaaaaggcttggattcaatgtctatgccgagctcaggtagggtcttgcgatggagatgtcactgaataaatttgatgcatgggatttttgttatgagttttcggagtgctcatttgcttgctgcagcctgcagctgcaacatggattcttcacggattttcgttattatgttttggagatgttcatttggttgctgcagccagcaaattagaaatgctattctggtgcacttacctctctactgtatgagacctgagctttgtgattggaacaatgtgaatacaaggcttagcaccatggtaacactacttcgttgtagttggctgtgtaaaaccttttcgttgactgcacaaaataggacagtattgatagtagtcacaactcctttggggcacaagatggtgaactgattagccttgattggagattgctggtagaatcttgtgttttggttacttcaagtcttatatataacttctgctaaaaactctgccgtattgattaa

SEQ ID NO: 97167 - DNA, 1158 bp, Zea Mays
aaaaacctcccccacctgccaccgcgaactgccggaggaatctctggcgatggcgccgccagccgctgcggttgccgccgtccaccaccgcagcccgcacctgctcctccgccgcggcggcgggggtctcctcccatctccttcgggtcccgccacgcttcctttctcctcgcggggtgcggcctgcacgcccgcgcgcctgcgtttgccgccgccgcggttctctctctcccccgtcccgaagagcctctccgccgcctcctcctcccacgtccctgtacggtccctattcaccggcatcgtcgaggaggtcggccgcgtgcgccgtctcggcccgccgctcacgccgtctgggggcggcggtggcggcgaggctcctggccttgacttggaggtcgagaccaagaacctcctcgctggaacgcagctcggtgacagcgtggcggtcgacggcgcctgcctcaccgtggcggcgatcgacccggccgcgtccacgctcactttcggcgtggccccggagacgctccgccggacgtccctgggagggcgcgccccgggcgatggtgtcaacctcgagcgcgcgctcacgccgtcgtcccgcatgggcgggcacttcgtgcagggccacgtcgacggaaccggggagatcgctgcgttccggccggacggggactcgctctgggtcaccgtgcgcgccccgccggagatcctccggctgctcgtgcccaagggcttcgtcgccgtcgacggcactagcctcactgttgtcagtgtggacgacgagggcggctggtttgacttcatgctcgtcaggtacacgcaggacaacatcgtgctgccgaccaagaaggtcggagacaaggtgaacctggaggcggatatactggggaagtacgtcgagaagctcctcgctgggagggttgaggccatggcgaaggggtgaagaaaaggcttggattcaatgtctatgccgagctcagcctgcagctgcaacatggattcttcacggattttcgttattatgttttggagatgttcatttggttgctgcagccagcaaattagaaatgctattctggtgcacttacctctctactgtatgagacctgagctttgtgattggaacaatgtgaatacaaggcttagcaccatggtaac

SEQ ID NO: 97168 - DNA, 180 bp, Zea Mays
cctcggcctcgacctcgacctctgcctcctcctcgccttcagtctccgtctccgcctccgcctccgcctcttcccctacaaccgccacgtctttctcctcaggcaccgcctcctcctcctcgtgcgccttcgccacctccctctgcacctcgtccgcctccgccctcaccgcctgctcct

SEQ ID NO: 97169 - DNA, 3078 bp, Zea Mays
atggcggcggcggttttggaggaggcgctgcgatggggtggaggaagcgttggggacgacaacgtggccgcgcgcagggcagaggaggccgcgataagaaggcatgaagcagccagttggttgcgaaaaacggttgggatagtgtgtgcaaaggacctgccggaagagccctctgaggaggaattccagcttggtctgagaaatggcattgtcctctgcaacgcactgaataaggtccagccaggcgccatacccaagattgtcggagtccagtcagatactgcggtccctgcagatggctcagctttgtgtgcttatcagtacttcgaaaatctgcgaaacttcgttgtcgttatacaagattttggcctcccaacatttgaggtgtctgatttggaaaagggtggcaaaagtgttcgaattgtggactgtgttcttgctctgaagtcattcagtgaaagtaagaaaacagggagacaagctgcatgtaaatatggtggcattttgaagcctttggtttccggaaattatttcatacttaagaattgtgatgcttttatgaataaaaatgcgagaattcacacagaagaggctaccctgaatggttttcgaggagagcaaaacttatctcttgattgttctccagaatcctatgaggtaattacttcagacaaccttagcacgattattcgcacaattctcttagataaaaaaccagaagaaatcccactgattgttgaatcactactaaacaaagttattcaggaatacgagcttcgctttgcaaatcagaacttgatggatgaagagaagcaaaataacttgactacgaaggaggaagccagttttgcagtaaatggtagtaatgcagctcaaaagttccatctgaaggctgaaataaattttgatctacagcacaaacagatcaaggggttgagaggtactgtttcttctatcaagtctggaatggaacaactgaaattgcactactctgaggagttcactaaacttgggaagcatttgtacactatatccaatgctgcttctggataccataaagttcttgaggaaaatcgcaagctgtacaaccagatacaggatcttaaaggaaatattagagtttattgtcgagtgaggcctttcctacctgggcaaataagttccttaagcagtgttgctggaatggaagaaagaaccattacaataatgactcctacaaaatatggaaaagatggaaacaaatctttcactttcaacaaagtctttggtccagcagccactcaagatgaggtcttttcagatatgcaaccattgatacgatcagttcttgatggttttaatgtctgtatatttgcatatggccaaacaggatctgggaagacttatacaatgagcggacctaaagttttaacagaggaaagcctaggtgtcaactataaagcattaaatgacttatttaatcttcaagcacagagaaaggggacaatagattatgatatttctgtacagatgattgagatatacaatgaacaaaaaggacttgcggttccagatgcaagcatagttcctgtcacatctacgtctgatgttgttgaactgatgaatcaaggccaaaagaatcgtgcagtgggttcaacagccataaatgaccgcagtagccgctcccacagttgcttgactgttcatgtgcaaggaagagatttgacatctgggacagttttaagagggggacaagcaaaaacacttatgtttgttcacataagcccagaacttgacgctgctggtgagaccataagcaccttgaaattcgctgaacgtgttgcctccgttgaacttggtgcagccaagcaaaataaagaaggcagcgagattagagagctcaaagaacagattgcttccctcaaggctgcattggctaagaaggaaggagaaccagagaacattctaagcacacggtcaagcccaagcatatacagaattagaaaaggcaatgcaacacctgcaactcctaaagacaggcagccaatggaagaagttgggagcctagaggtccagaatgtcttcactccagctcaaaagaggtcaaaaatgcatttgcttggcatcctcactgagaacaactcgtctaactcggttcagaattgcaatgttcctcagaaggaaataggattaggtggttgggttgacaagatggctcttggagacaaccactttgagaactctaattccatcctagagttggagcctgacacagcacagcttccaacttctttttatcatcaaagatatagtcctgtgcaacaaagctgtaggaccgaatcagtaccatcattgggcctacatggctttgattctgctactagttgttctaaccaagagattgtagtgtcaaccatgggactaaaagcttctggtgttgccaatagaggcgcctcaactgtaaaaaagtatgaagctacatcaacgaggagtacaaatctagcaagcaagtctccattgttgcagaaaaaactgcaaacaccaaccaggaacaggaaccagctaacttcgagcaccataggtggaagaagaacaccaaatggaaaaattggcattgcaaagtaatcaattaatgtgaaggcagatttgctgtgaccatgcttagaatggaaaaattggcattgcaaagtaatcaattaatgtcaaggtgggatagcacggagcctaaaaggactgcggtttttgaacctgcagaaggatcaagatcaatcatgtaaactgatgcacattccgataggtagcacattttatttattacattgaagttggaaacagacaccaaagaggacagaaagatgataaatatgaaggaaattcgaattgaggcttctgtacattttccacacttataaagtaatgttgtatcatgtgcctattagccatgacacatcatcacctgaaagttgcttgtattagacatgtgctaagtttacagtttctctgtctcatgtatgttaccctttctcataatggatcgccactcacagactaagagggtgattggtttcacccaactaaaatttagtcccttttacattg

SEQ ID NO: 97170 - DNA, 483 bp, Zea Mays
ttcagctactgaaattatgttgctggtcgcaatctccatcgtcgtccccaaccctatcgctccatcccgcggtcgcgtgcgccttccgctatgcggggtccccgctgctccacgccgcgtcgtcgcctctatggcagtgtccgcccccaggtccggcgccgccacctcatttctcgagcaccacgagtcggagcgtgctctcctctttgtcaaataccagggcctcgacaatgatttcataatggtggacaacagggattcgtcggtgccgaaggtgacgcccgaggaggccgcgaagttgtgcgactgaaacttcggcattggcgccgacgatgttatcttcgtcatgcccggggtcaatggtgtcgactacaccatgaggatcttcaactctgatggcagcgaaccagagatgtgtggtaatggagtctgttgcttcgctcggtttatagccgagattgaaaatctacaggggacaaatag

SEQ ID NO: 97171 - DNA, 322 bp, Zea Mays
aagaggcatctaggttgacctcactcttcttagtgttcatgcccactgcgcaagacaacaccgcaacgccgatggagttggaagatttcattaggctcgactggatctggatgagatggactctggtcgtaaggagagagagagcgtgcttggcttgggaggagcatatttttgttcatccttttcatgagtcatgttacctgtcatgtcagattatgtaacttcagatatttctgttttgttagagaagtaccaaaatagtttcacttcatggctactctcagatgtgttcttgccgctgccactaatcatataagggtaa

SEQ ID NO: 97172 - DNA, 732 bp, Zea Mays
atggaaactatattgcgagcgcaacctattggggaatcattaatgcctagtgttgagactgtttccaaggtcttcgtctctcagaacggctccaacgacacattttttaataatgtaggtatcctcacaagctccacgaaaataaagacattgaaagagagagcgcttcaggaacttactactgaaaagcaaggctcaactgctctccaccaagaagtagatgaactcaacaagaagttggcaaaaactcaaagggagtttgaggagtttaagaagcaacaggaagagaacaatctgcttctcaagcatatcttgcactccaacaacgctgctcttcgctacacgaacttccagggagcctcttcgtacgaaggcaagagcttagatgcagatgcagatgcagtggagaagatgcagatgcagtggaaggcaaaggaaacagcgcagatgcagatgcagtggggatcggcagcactcaaggacgaggcagcacaggtgcatttggggaagagagggcagtggttaccggtgagaaggcaacggggagagttatcgtcgtcgatgcgctgtgtcgccaagctgtcacttcgcgccgccacgccgtcacttggcggcggcgtctcctcgcctcgtttgtcgccagcgttgaccaatgcccgttcctccgagattggatccggagggcagcacacccggattcctaccgggccacagtgttcaaaaaaactctaa

SEQ ID NO: 97173 - DNA, 459 bp, Zea Mays
gctttgatctaaatattttacagttggtgcactgtgacaactgatgacaacataaaacatgtggttgcatgcagcgagtagggaagccactgttgatctcttcttgaagtcagctgagtatttggactgtcaagttcatcatgtactcatacatataccacctcaaagacgccttattaattctgtttttattgcattaattcggagcactgaacataggagttcaccgtagaagttcagtggtaacactgatgatgactacgtactcttttatgaaagccttgccaaaagaagatgtccttctcattgttgagtacaagaataattatctcttatatcttattgtaaaatctaaaacatttgttctgcagatggttagcttgcattttatgctataattacctcaaatcacgtgttgcctttttcaccaatttatgacatctattgatatgttttacg

SEQ ID NO: 97174 - DNA, 786 bp, Zea Mays
cgccgttgttatctccagcgcatgcccagctcctctccacgttgcgcggctacagattgtggagtgctgcatatgtctcaaggaatttgcagaatcatccagggtcctggagagtttgcagaccgtggagcagtccacgtcaggtgaagccaaagaggccgtctcccgcgacatgctccaggccagcggtgcgggtctggccgtggtggtcagcgcggtggctgtccgatcatgtgaagacgagcggtggtgagcagggcgtccttccattgattttctccctcgtctccttggctgtgcgcgcgagctcgccggcgtgcgctcgcccagctcggaattccctctgcccagtcgctcagctccgacctccctcgccatggcgctcgctggccgtgctcctctgctcgctggttctcctcgccgcgcttggctgtccagcttcctgatacgcgcgcggtcctctgctcctgcgtgcccctgcttttctctctctcctccatggccgcgtcttgccgaggtccctgctgcagcttgcccatctccctgtgctcgagctcgccggcgtcctctgctcgttcttcaggcagtcgccggtcgagcttctccctcgcgctcggatctggccattaacgcccagacatgtgttctttcccccagctcgtaggtgtcgtcgttccgtgtacttggccatagagttcgcccggcccgaccctaagcgccagcacgcgtctatggtcgcgtccgtcgagttcgccaaagctctgttacgagtgccgaactatacct

SEQ ID NO: 97175 - DNA, 297 bp, Zea Mays
atgtatgaatttggattcctaatacaaatctacaatttaaattgtaggctaaatcctgggcgtgctgaggatttagttttcacacaccaaaacttgcgtcttctttctagaaaatctgatgaataccgctgtggtccatcagcaatgtgggatgttggagctgacacttttgaagctgattttgagggtggtgctgattttcttgagcaagctgatctatcactggatgagccagaacttgaagaaagattgtttgaagatcttgaggcattgggtttgaccgaagatgcagaatga

SEQ ID NO: 97176 - DNA, 933 bp, Zea Mays
ccgcgtccgccggctgcaggaggcgccgcgtttgcgttcgccacctccacacgcttctctctcctttatctttgtgtctgcgcctccctcgcacagactctctctcacgagcacaacagggcggccagacagggttcccacaggccatcaccacaacacacaaatacagctcagagcaactcacacacaggctcctctcccccgttgcgcaacgcgctttcccccacttcacccgcctcggcgccatggctaagctcgcgctggcgctcctcctcctgctggccgtggcggcgtccgcgtcggccagcagcgggagccacctggatctcgacctgggcttcctctcctctggggaacgccggagggagtgccgcggcacggtggccgagtgcctcgccgaggagtcggatgaggagggccttgacctggctggatcccaccgccgcgcgctctacggcggcgggtacatcagctacggcgcgctgcggcgggacaacgtgccctgctcccgccgcggcgccagctactacaactgccgcccgggcggccaggccaacccctaccaccgcggctgctcccgcatcacccgctgccgcggctgaggcggcgccggatccgccagactgccgaggaaaggtctggtccaggtcccggccctttcgccgacaataatttctttcgccttgttcgttcaggcgctaccgccaccgccaccgctgtttactatagcaccagacctacggattgaattgttgtatggatttgtttggccaaatctttgttctgttgtaaagtaaggggagggattcctgcccctgcgcctgcttaaaatacttatatgaacatatcagtctttcttgttttttttctctctctcccattgcttgattggttggttctcgtatgtcctgcttgatttgaattgattgttac

SEQ ID NO: 97177 - DNA, 91 bp, Zea Mays
gggccccggaactgtatagagcattggcggtggcggagcgaggagacgccaccttggcgagctcctcgagaatgaggtcgttacggacctt

SEQ ID NO: 97178 - DNA, 217 bp, Zea Mays
gaatgcaatggtccgcaatgcctcacggcaccaacgtccagcgactccatttggcgagatccgtaacccgcgacaccggtcacccctggctcccgaaccaatgcccatataccagtgcactctgacaagttcctccgagctaccagccgaggccacgcggcttcgcaagcaagtagcggcactcggattttctccccctgtttgcggcaatggaggc

SEQ ID NO: 97179 - DNA, 2136 bp, Zea Mays
gcatgtttctcttctcggtcatcatgttacatgtgcacacactcgttacattacctatgctgttatacccttacgcacaaacgtacatgcgcttatccgatagcattcaattcaggtcgctagagcattgcatggtgcgatcgacttgtcactgcttctcctggcctccctcgtcgcgattactctcatcgtcagtagagcgcgctgtgatcaccgcttagtatccttggaacagaggcggcggtggcgacgcatactgctgcgccatgattggtggcaagatgaactcctcaggtgccgacggtggaggtgatgatggtgcgggtggaggtggtgatgggacggctggtggaggtggcgagctcaccggagcaggtggtggtggggatttgaccggtgggggtggagagttgattggcgccggtggaggaggggacctcactggaggaggcggtgagctcgccagtgttggtggaggtggggaggtcattggtggaagtggtggagagcttacaagtggcggtggtggcgggggcttcaccagtggaggtggagatcttctcgaagttggtggtgcaggtgatttgaactgtggcggtggggattttgcaaatgggggtgctgagctcacgggaactggcgggggaggtgagctaactggtgccggtggtggaaggattttcacaggaggtgatggtgaaatcacaggagccggtggaggaggtgattttacaggcggtggcggcgagctaacgggtgccgttggtggaggggatttcatgggagacgatggtgaaaccattggagctagtggaggaggtaattttacaggtggtggcggtgagttgactggagtaggtggtgaagagtatttcacaggaggcggtggtgagctaactggagccggtggaggaggtgattttacaggtggtggtagtgagctgactggagcaggtggtggaggggattgcgccagaggaggtggtgagcttactggagccggtggtggtgattttataggtggtggtggtgagctgactggagcaggcggtggaggggattgcatcggaggaggaggtgagcttattagagctgatggaggaggtgagtttgcttgtggtgggggtggcgaccttatcggtggtggaggaggtgatgatttcgttagcggtggaggtgacctcaccggcgctggtggcggcggcgaacttaacagtggtgaaggaggtggtgatttcactgacgatggaggtgacctcaccggcaccggtggtggcggtgatttaatcatcggtggaggtgatggtggtgaaggagatttcaccgttggaggcggttcactcacatatgctggagatggaggtgattttactagtggtggtgagctaaccgaaaccggtggaggagggaatttggtaggtgggggaggcgagctaataggtgctggtgggggtggagatttcattgatggcggtggtgaactaatcggtgatggcggtggcggtggtggtgacctcaccggtactggtggtggcggcgaacttactggtggtggaggaggtggtgatttcactggcgctggaggtgaccttggtggcaacggcggtggagatttcacagatggaggtggtaaactcatagatactggaggtggaggcgattttagtagtggtggtggtgagctaaccggaaccggtggaggaggagatttgataagtgggggaggcgagctaataggtgctggtgctggtgcgggtgcgggtggagatttcactgatggtggcggcgacggctgtgggctcactggctgtggtgctggggacttctttggtggttggttctccggtgatggcgctggtggcaacggatgtggactaacgtctggtggcctaggaaccttcttcgctggtggcgcaggcatcttggaacagacgttcgtgcggcagtcgacggggtgcgcgagcacaagcgcgcactcaggcaacggcttctgccccgggcgtccgccatcgaggcagttgccgctatcgtccagcgccaccggcgagtcctcggacggcacgcacgcctctgcctcgacgctgaagaagttgtgcgcgaagctgaagttggcgagagccgggagcttgcacacgt

SEQ ID NO: 97180 - DNA, 3296 bp, Zea Mays
gcatgtttctcttctcggtcatcatgttacatgtgcacacactcgttacattacctatgctgttatacccttacgcacaaacgtacatgcgcttatccgatagcattcaattcaggtcgctagagcattgcatggtgcgatcgacttgtcactgcttctcctggcctccctcgtcgcgattactctcatcgtcagtagagcgcgctgtgatcaccgcttagtatccttggaacagaggcggcggtggcgacgcatactgctgcgccatgattggtggcaagatgaactcctcaggtgccgacggtggaggtgatgatggtgcgggtggaggtggtgatgggacggctggtggaggtggcgagctcaccggagcaggtggtggtggggatttgaccggtgggggtggagagttgattggcgccggtggaggaggggacctcactggaggaggcggtgagctcgccagtgttggtggaggtggggaggtcattggtggaagtggtggagagcttacaagtggcggtggtggcgggggcttcaccagtggaggtggagatcttctcgaagttggtggtgcaggtgatttgaactgtggcggtggggattttgcaaatgggggtgctgagctcacgggaactggcgggggaggtgagctaactggtgccggtggtggaaggattttcacaggaggtgatggtgaaatcacaggagccggtggaggaggtgattttacaggcggtggcggcgagctaacgggtgccgttggtggaggggatttcatgggagacgatggtgaaaccattggagctagtggaggaggtaattttacaggtggtggcggtgagttgactggagtaggtggtgaagagtatttcacaggaggcggtggtgagctaactggagccggtggaggaggtgattttacaggtggtggtagtgagctgactggagcaggtggtggaggggattgcgccagaggaggtggtgagcttactggagccggtggtggtgattttataggtggtggtggtgagctgactggagcaggcggtggaggggattgcatcggaggaggaggtgagcttattagagctgatggaggaggtgagtttgcttgtggtgggggtggcgaccttatcggtggtggaggaggtgatgatttcgttagcggtggaggtgacctcaccggcgctggtggcggcggcgaacttaacagtggtgaaggaggtggtgatttcactgacgatggaggtgacctcaccggcaccggtggtggcggtgatttaatcatcggtggaggtgatggtggtgaaggagatttcaccgttggaggcggttcactcacatatgctggagatggaggtgattttactagtggtggtgagctaaccgaaaccggtggaggagggaatttggtaggtgggggaggcgagctaataggtgctggtgggggtggagatttcattgatggcggtggtgaactaatcggtgatggcggtggcggtggtggtgacctcaccggtactggtggtggcggcgaacttactggtggtggaggaggtggtgatttcactggcgctggaggtgaccttggtggcaacggcggtggagatttcacagatggaggtggtaaactcatagatactggaggtggaggcgattttagtagtggtggtggtgagctaaccggaaccggtggaggaggagatttgataagtgggggaggcgagctaataggtgctggtgctggtgcgggtgcgggtggagatttcactgatggtggcggcgacggctgtgggctcactggctgtggtgctggggacttctttggtggttggttctccggtgatggcgctggtggcaacggatgtggactaacgtctggtggcctaggaaccttcttcgctgtcgacggggtgcgcgagcacaagcgcgcactcaggcaacggcttctgccccgggcgtccgccatcgaggcagttgccgctatcgtccagcgccaccggcgagtcctcggacggcacgcacgcctctgcctcgacgctgaagaagttgtgcgcgaagctgaagttggcgagagccgggagcttgcacacgttctccgccacggcgccggcgagctggttccgcgacacgtccagctgctccagcctgatcatgttgacgagcccctccggcagcgtgccaacgagcgcgttcccgctgacgtccaccaccgtggagttgacgagctcagcaagttcaggcgggatgcagccgtcgaggcggttgttgagaagcatgagttcgtcgagcgtgtcggccatgcggccaacgctgcgagggatgcatccgatgaaggcgttgtttgcgagcaccaccacggtggccgtcgagttgccgaaattctccgggatgaacccgacgaagcggttgctgttgacgaagatagcgtcaaggtccttgtcgaagaggtgcggcggcagggtgccgtcgaagtcgttgaaccggaggtcgaggtacttgagcacggggatctgcagtacgacgtccgggaacccgccgacgaagcggttgttgctgacgtcgagctcgtggaggagcgtgaggcggctgaagctcttggggatgatgccgcagaagcggttggagttaatgtggaagaaggcgatatcggtgagcatgccgagctccgcggggaggtaacccgcgatgtcgccgccgttgaggtcgatgcccgcgacgacggtggtgttagcgtcgtcgagtgccgggacgcacgtgacgccgaagtaggagcacacgtcggctcctacccagccgccggtgaagttcttggggtcggagtacatggcgcggcgccaggcctggagcgcgacgtacgcgcggcgcaggcgctcgttggcgaaggtgacgtccacgtggatgtcgaactcgaagtcgtcggggaggtcgccgtcgccctcccgaagggaaagcagctgccgccgtgcaatgtcggacgcctcggcgtcggagagcgcggccgccgcggtcgccgcgagcagaatggcggcgaggtatacgagaacgaggctgccgttccggcagcggcgcaggcgaaccaccgcggcctccattgttggcggggaaggggcagtgtgggaggccaccccttgcagggcttcctatatggatggggggaagatataggcctgcggcgaagagaggacatgatcgagcgagtggcggcgcgcatgtcccggcggtgcccgttgcgctctggtggtcgttgttttcttggcaggaaaggattgacacgtggacagcttctttga

SEQ ID NO: 97181 - DNA, 479 bp, Zea Mays
acctacatctccctctaccgaacatcaggtatgcatattcatcatcatttacttgttgttagttatattatgatgtaactcagcaaatgtcatttgtacatgtatattagacccctccagctaccttgccgacgcatgaacaagaggacgagttagactttgtcgaaaccctcttcaatagtggaggtattgaccatcactcttcactgtaacccgatggtgatcggcgaccgtgagcttccatgttattgcgttctgatacttgagacttttattatgactatgtatgagatattgtctcttattagtactggatgatgagatgtgtcttattatgactatggatgagacttttgtgatgtaattgataagactatggatttaaatattgttatgtgattgtgtgtgagatgttttatgtgaaaatatgttgtgctatatagctgttgatatatttgttatgttgtggaatgtggtgt

SEQ ID NO: 97182 - DNA, 216 bp, Zea Mays
atggcgccgtggcgagccggatcggctgctgccggtcttcacaaggaggaagaatcgcttggcttcgccgtatccaccatgcaccagacccccgcgtgcgtcggcgtgcaggccggagcttcgccctgccaaatcgcgctgatgaccatcccctccggcgagcttgtaaaggcggctatggcctggatggttatagcgtacgacggctggaggtag

SEQ ID NO: 97183 - DNA, 1789 bp, Zea Mays
atggaccgctcgatcaacttccgcggcatcgccgggagcgccggaaacatcatgcagggaatggggaaattcgttttcggcaacgaggggatcgagtcaaaggaagatagctacgtcgagagatatctttatcggataagcaatggcacgatacctgatgaccggaggtctgcaatgactgagctgcagtctctagtggcagaaagccgctcggcacagatgtcgtttggagcgatgggttttcctatcctcctcaatattttgaaagaagaccgtgaggatgtagagcttgtgagaggtgccctggagacctttgtgagtgcattgactcctattgagacgtcacaagggccaaatactgaggttcaaccagcgttacaagaagcaattctattgattcctcgtggtataacagttctcatggacatgcttatggaccgtgaggtcataaggaatgaagcactgttacttcttacttatttgactcgggatgcagaggaaattcaaaaaattgttgtatttgagggtgtgtttgagaagatatttagcattattagagaggagggctattccgatggaggtgtagttgttcagatgcttttgaaagagacaatgggctttgacccattgatatcaatactaaagattaggagaggcagtgcatttaattttacccaacagaagacagtaaatcttcttggtgctttaaatactgtggaattgcttttgatggggggcccatctggtgaagcaggtaaagacgctaacaagaatgcaaatcaaactgcattggctcaggcactgcgatgtattggcaatttggtattaagaaatcctcagaatcttgattctcttgcaagaaaacaagttggagaagagcctcatgttcaacctgcactgaatgccatcttctctataatcttgcggacctctgtagcgcaggaatttgttgctgctgattatgtattcaagtgtttctgcgagagaaatcctaatggccaggcattattagcatcaactattgttccacatccgaaccaaggaaatatgcatgaacctgctatcgacatgccttttggaagtgtacttctgcaagcactggtttcaagtgatgtcaatggagatatggaggcatgttgcagagcatctagcgttctttctcacattgtcaaggacaacatgcaaagcaaggatcgtgtattgcaaattcagcttgagacacttacaccgtccttggggcgcactgagccagtattgcatcgtattgtcacatgtttgtccatcgcagcctcaacagagggagaaaacaaccaaaacaaccaaccagaagaaccgtacattcaacctgttattcttcggctactcatcatatggcttgttgattgttcaaatgctgttaactgcctgttggaatcagcagtgcatctgaactacataatagagcttgcttcaagcaaacgttacactgcttgtgttcgtggactggctgctgttgttctaggtgcttgcatcctgtacaatgctagccatgagaagggccgtgatgcttttgctgttgcagatgctataagtcaaaagattggcctcacaacgtacttcttgaggtttgacgaattgaggagaagcttggcacatcctttgccagagcagcatcatcgcaaggagctttcccgatcaagtgcgaatagcatgtcagatttccaagaaattgaagaggatgaaacaaataaagatgatcaacaccctgtcctctcagaaatatttgattcacagtttgttaattttctta

SEQ ID NO: 97184 - DNA, 741 bp, Zea Mays
ggaggttgatggagagtatatcaaacgactaaagtcgtttgtagagaaacagtgcaatgagatgcaggacttgctggctcgaaacgcaatgttagcagaagagttagtgagaactggtggtggtaccaccacagatacttcacagagaccgaacaacgggcgagaaagggtccagatcgaagccctgagacaagaactggagggagcgagacgacagatagaggcactcgaaactgacaagtcccagatcgaagccgaagctaacaaccaacgaaaccttgcagtaaaactggagtccgatctcaagagcttgtcagaagcttacaacagcatagagcaggccaactaccgcctggatgccgaggtaaaaaccttgcggcagggaggcagtgtgccgtatcctgacgtggaggcaataaaggcgcaagccaaggaagaggctgagaaggacagtgaggcggagctgaacgatctgcttgtctgcctcggtcaggaacaaactaaggttgagaagctgagcacaaggctggcagagctcggcgaagatgtggatgcccttctgcaaggtattggtgacgacactgccattccggacgatgatgacgacgacgatgaagatagtgaagagtgatatgtttatgtaaccctgtaggtctgttggtgcacacaacctcacgttgggtcatgatattgtaatggcaattggcattgtacagtggataatgtgtagacaaaggcacc

SEQ ID NO: 97185 - DNA, 187 bp, Zea Mays
atcatttttgcatgcacagttttgcaagtttcgagtgacctgcagttcaaatctgattttccgaagaaattcaaataaacgaactaaatgtactagctatagaaaacattgttataattgtcccaaaatggtacatgtaggtctacatagtgtaggaacataccacaaaaagtttggtgaccaaaat

SEQ ID NO: 97186 - DNA, 622 bp, Zea Mays
atggtgtttaaagagaagcaaaaggagttctacaagaatgctaaattaattagcaagtacaaaaagacaaagaagcaacaaagtcagtcaaacaaccatccagaaattccagtccatgaggatggtggtgacactgtccgatatgtggcaaaaccgcatcacaaagggaagaagcaccctgtgcatagtttgaaggaagagtatgagaaaaaacgtgctgaggaggagaaggctaaggaagagcgtgatgcaatggttcaggcaaagagggagcatcgggagaagtctgaggcgaagcggaaagaactgagggagaagatgttcaagaagacaagatctggccaacctgtgatgagataccggatcgagcatctcttggagactgcactgagcaagtaacgcgataccaaccatttgtagctccgtgcaaccatttgtttactgtaaccgtcttttgtcgcttcatcgttgtgtatatctttggatttgttgatcatatcactcaagagttctctgctgttggcgctgtgcgcttccaatcctgcaagtgatgtcatgtgatctgataactgactcctcgaaaaacaagcaagccttgatttatttaaaaacctacttatcc

SEQ ID NO: 97187 - DNA, 194 bp, Zea Mays
gatatatgttcatatcacaaattcacagtccaaatacataagttcacaagaattggagattgtaccagtagtaatacaacacacaggaattgaagatgcatgtgtccatcaatccctcaagactctgttcctagctagacagtatccacctatcactaagagaaacatgtcaagaatggacaccctagctctag

SEQ ID NO: 97188 - DNA, 178 bp, Zea Mays
ctatgttttgatcgagcatctataagttgatgtgtctgggtcttgatgttctctttcacttgagaaaatcatctattagttgctacgaaatatgcagaaagaatccagtgagtcatgaagaaaacaacaagcaggtttgggacacttaagcactgacctgatcaagactccaaagaag

SEQ ID NO: 97189 - DNA, 2095 bp, Zea Mays
ggtagtacacccgagggtcgtacccgaggagcgataggtgcgccgtatcgctgccgcaggcgagccccggctccacggggtccatgagcccggtcaccccgaccgccgccaccgcgtccagccgcggcgtgcacgccgcctccagtggcgtacgcccgcccagcgacggaacgctcacgtccccgatcccgtccaccagcacgaacgccacgcggctccgcctcggacctctcccctccgcgcctgccatcgccgtctccgcagccgccgcaaaggcccctcgcctctctcaatttcagctctctgctgctgcttacgagatgcctctgccgcgtgctggttcagccgcgggtcgggcccgggcacagggttcacgggccggtttggtcactacaagaaccgggcgagcccgaggcccggcccccaaatctgcaacgcttggcgctcgctcggctccgccctccgcccccctgctccgtccgatcgccgcgccccctcgccgccggtgatcgctggggagccgacgaggccggacgccggaggttctcgctccctcctctgtgtctcccttcctcccgcgcgtcccgcctgctcgtcgcgtggcctcctgctcggggcttcctctcgccgcggaatttggcatgtgacgtggggcgaggccaacgaggcgcagccggcggcggcgtggggttgattggttaactggatttcgagattgttttgtctggatttttttccgagggaagcgcgcgctccaggtgactgcattgtaggttcatttccaaaatggtttgcatggtggggaattttaaaatgtcttctgtgttgaagcttgtaatgatggaaaatcacgcaacaccagatgacgtgatccatgagatgactgctgcacaggtcctacagaagcaactgtttgatgcacacgaaccaaatttactggatgaaaatgatatgcatatatttggatcaaaaccgatggccgacccattggacttggtctgctgtagtacttgcaagaagccagtcaaagccagccaatatgcaattcatacagggcaatgtagttcagggaaggtaaacacaaatggttcagtgggtgtggatcatgccaatcctacaaagcccctgaagaaaggcagaaaaataaagttgataagtaatggaaatcaaaaagtgcacataaaagtgaaagcaaaatctcaaactgaaagcaataacattgccaatagtttcgagttggacaatggacatgtcactaaagtacaacctatagattccacagggctgggcctgtctgctgatagttcagctactatcaatgtgcctaaaaatcatcccagagatgcgccagttcctcttgcaacaaaaatgtatcattcacagggcaactaccgtcttcgatttgagcttggccagctttatcgcgaatcatgtgtgcagcatttgagtggccacacaactccaaacgtgtcacatgagaatggattgatggcatcatcacggttttcttcttgtggcaactcagcattgcctactcagaagagccttgttcctcaaacaaagcctctcgcagaccctcagcaattagcagcaagcaggcctaaccagtcacaaggaacaaaaactgatagagcaagtgcacaagcatctgcaattaaaaatgaaggttcacgatccagatgcaataaagctaccattccccattcgagaaacaaaggcagcaagaagacgcaacagcaacctaatggacgtgttcatgcgatcaagttcccagtagagtagcccattcgtaggtaatttattggttaagtggaagtgtctcttctggtgaacagtctcttcttttctcctttccaaatgaaattggttattgtcaggattgttctaatttggactgtcccgatccgaggttttggttcgccggccattggtactagaagctaacagcactagttgtagcactgacgatgaacttacctgtaaatatggccacagaggccttggcttcttcctgccgaaggtcgtggacctgatgaacattttgaatgtagccttcatcttttgggcattgagttctagttgattgatgttttgt

SEQ ID NO: 97190 - DNA, 2080 bp, Zea Mays
ggtagtacacccgagggtcgtacccgaggagcgataggtgcgccgtatcgctgccgcaggcgagccccggctccacggggtccatgagcccggtcaccccgaccgccgccaccgcgtccagccgcggcgtgcacgccgcctccagtggcgtacgcccgcccagcgacggaacgctcacgtccccgatcccgtccaccagcacgaacgccacgcggctccgcctcggacctctcccctccgcgcctgccatcgccgtctccgcagccgccgcaaaggcccctcgcctctctcaatttcagctctctgctgctgcttacgagatgcctctgccgcgtgctggttcagccgcgggtcgggcccgggcacagggttcacgggccggtttggtcactacaagaaccgggcgagcccgaggcccggcccccaaatctgcaacgcttggcgctcgctcggctccgccctccgcccccctgctccgtccgatcgccgcgccccctcgccgccggtgatcgctggggagccgacgaggccggacgccggaggttctcgctccctcctctgtgtctcccttcctcccgcgcgtcccgcctgctcgtcgcgtggcctcctgctcggggcttcctctcgccgcggaatttggcatgtgacgtggggcgaggccaacgaggcgcagccggcggcggcgtggggttgattggttaactggatttcgagattgttttgtctggatttttttccgagggaagcgcgcgctccaggttcatttccaaaatggtttgcatggtggggaattttaaaatgtcttctgtgttgaagcttgtaatgatggaaaatcacgcaacaccagatgacgtgatccatgagatgactgctgcacaggtcctacagaagcaactgtttgatgcacacgaaccaaatttactggatgaaaatgatatgcatatatttggatcaaaaccgatggccgacccattggacttggtctgctgtagtacttgcaagaagccagtcaaagccagccaatatgcaattcatacagggcaatgtagttcagggaaggtaaacacaaatggttcagtgggtgtggatcatgccaatcctacaaagcccctgaagaaaggcagaaaaataaagttgataagtaatggaaatcaaaaagtgcacataaaagtgaaagcaaaatctcaaactgaaagcaataacattgccaatagtttcgagttggacaatggacatgtcactaaagtacaacctatagattccacagggctgggcctgtctgctgatagttcagctactatcaatgtgcctaaaaatcatcccagagatgcgccagttcctcttgcaacaaaaatgtatcattcacagggcaactaccgtcttcgatttgagcttggccagctttatcgcgaatcatgtgtgcagcatttgagtggccacacaactccaaacgtgtcacatgagaatggattgatggcatcatcacggttttcttcttgtggcaactcagcattgcctactcagaagagccttgttcctcaaacaaagcctctcgcagaccctcagcaattagcagcaagcaggcctaaccagtcacaaggaacaaaaactgatagagcaagtgcacaagcatctgcaattaaaaatgaaggttcacgatccagatgcaataaagctaccattccccattcgagaaacaaaggcagcaagaagacgcaacagcaacctaatggacgtgttcatgcgatcaagttcccagtagagtagcccattcgtaggtaatttattggttaagtggaagtgtctcttctggtgaacagtctcttcttttctcctttccaaatgaaattggttattgtcaggattgttctaatttggactgtcccgatccgaggttttggttcgccggccattggtactagaagctaacagcactagttgtagcactgacgatgaacttacctgtaaatatggccacagaggccttggcttcttcctgccgaaggtcgtggacctgatgaacattttgaatgtagccttcatcttttgggcattgagttctagttgattgatgttttgt

SEQ ID NO: 97191 - DNA, 247 bp, Zea Mays
gaccggcaattcacggcatatgttatactgtcgcataattaacatggtttcgtctgtttccgcctaggttcgccggccattggtactagaagctaacagcactagttgtagcactgacgatgaacttacctgtaaatatggccacagaggccttggcttcttcctgccgaaggtcgtggacctgatgaacattttgaatgtagccttcatcttttgggcattgagttctagttgattgatgttttgt

SEQ ID NO: 97192 - DNA, 676 bp, Zea Mays
aaggatttgatatcttttatcatgttgttttctaatatttgtgatatatgctatttaatcttgtatgtgtctctttataatgatgtttttatctctactataagattaatggcactggacttaatcaaagtatagagaactgaaactcatagcagtagcactggcactggcattgacacacttaatcacttcacagttcacaatgtttatttttgcttgaaggtggtctgttttttgccaagcatgcatgcaccttgttagttgtggttgtgggcaggcaggcagacaatgcgttctgcaagcaatccatctttttatctccatgcagactgaaacaagcctttgcttgcaccgaaattcttccaagatccttgctaaccggcagttagctcagaggtcgcaggtgaggaagttgcagtacatctccgagcccaagcgcaactgtcacaacactgcagggttccgcaaatgttggaaaatatgcatttatcagtgcaatgctaagaacaatggcgtacaaggacccggtggcagcggcagctcaaaaatacaagccaatacagtctgctgttcctagaacaacccttggccctattcaaattgaagcatttttaggcggaggggtatgaagggtctcttatcatgatcctttgatgcaatacaatcatctttatgc

SEQ ID NO: 97193 - DNA, 192 bp, Zea Mays
atgttttatcgcatgttttatgttacttataggaagataaggcaaaatgcagatgatctggacaattgtcacagcaatgcagaggcgctgaagccaggcagatatttgaatccgctgagcacccagcacaatcacagatacacttcagaggagaccccgtcgccttttgtaatcactcacactcagggttaa

SEQ ID NO: 97194 - DNA, 450 bp, Zea Mays
tacatctgacattgacaaatgtgaagctcacatttaaagatccataggtcgtactatagagtaattgttatgaacatgaatgaagtatgcaatgtgaactgcaagctcaaaaagccatacaaggcatcatcatgtgatgtaattcaaactcaagttattatcgccacagcccctttcatatccattgtctcctatcaagtaaatatgacatgcaaacagtgtattttcccattctgtggtaagcagaaaacaaacatgaaaaagaaactttgcagacacatactgaagacagacaaatgcagattagctgtagaccaagcaagtatactaaccatcatttatatgatgtgtactgtggtgcttgtgcggtcatgctagcaacatataggggagtgtggaaattttactcaggtccacaaatgaaacagaaagtttgcggtcatttatatg

SEQ ID NO: 97195 - DNA, 1042 bp, Zea Mays
ccagcaatccggccgcggccaggcagccaccagcagcgacaagaaatcgagaatcctcgtttcccattttgtggctggcgcgagcgtgcagcgtcacaggtttccggacggacgctttctatcgcaatcctatctatatatttatcccaaggcttcgtggtttttgttgctgctgctgctgtcacggccgccttccactcccacaagcttcagctagccttcttactcccgccgtcacccccgatccgagagcgagcatggcgcactctctcgccgcctccttctcgccggccgccgcccggcgccaggtcacaaatgtgattccaagctggacctcggtttccttccagagccacaggatgacttctgtatccatccgctcaagacaaaggtctcttgggtttaagatttgctgttcggctaagaaagagacagtggacaaggtttgcagtatagtgaaggagcagctggctcttcccgatgggaccgccatcactgccgaatcaaaattcgctgaacttggcgctgattcgctggatacggtcgagattgtgatgggcctcgaggaggcgttcaacataacagtcgacgaaacaagcgcacaggacatcgcaacagtgcaggacgctgcggaccttatcgagaagctcatgctggaggcacctccaaaggtcgtctagatccagcaaccttgcgatcgacgaccttgtgtttgatctatgttgtgtgttaatttgttcgtgttgccccatttgttctttcttgatgattcaagatgaggttttgtattggtgttgctgaggtgaattagatagccccaaaggccacatgaagcagatgaggacagttcattccactttgaatttgtatgttgtaacttgtagtgctgctatagagaaaccaatggactgttatgaagagtcaatgcaactgttgcttttttagttttgggaagtcacacacatgaaagtctgaatcagatgcagtactaattgttgagcttggggtgcagatatatgcaaataccaggatgtcaggtgct

SEQ ID NO: 97196 - DNA, 799 bp, Zea Mays
atagacaacttttttccaaaaaaaagaaaagaggaaaaaaatgttatcttctacctccttagctgctcttctccatggccgcccccattatcctttccgtccgtcgaaggcgcatcttttcctagctctccccaacaaccctacccgtttcctggcctccgcctccgtccgggtcgcctatcctccccggtggcatctccgcgccgccgacggggagcgggacaaccgcgtgcaggagctgagggtgcccgattcttggctgacgcctgcaggagcaacgcaggaatctgaatggctgagggagacactgcgcaagtggctcgacgacgagtactgcccggagccggccaacgtggacatcagcagcaccgccgcgcggtcgtatcgcgaatccctgatagcggggcagtctgacctgggagagatcttgctgaggatggtgggcgacctggacaagctgtcgtacagggagagcttccacggccccttctcggccgccaacgctgcagtccgtttgatcgctcagaggatggaggagtcactgcctgatgaatgacggtggtgcgcgacctggagtttctatatggcacgacttttgatgaagtcgtaggctatatgtacttttgacgatgaacaattcgatcaccattcctcaccgaggctgtcgctgacagaaaatggtgagaataggctcgagacttcatttttctgctgaaattcgccaacgtactattctgtttatgagcatgtctttgagacgagcggtgaaatgccaacgaggtgggtcgacttaagggag

SEQ ID NO: 97197 - DNA, 859 bp, Zea Mays
gcacgtgaaaattccttccgctccagttattacggagcaatagggtggtgaactggtgactggagctggaatcgcatttcttgctctttggtctctccagaatcatcctccggccgagccttcttggtctactcattcgattgcttcaccattctttcctgctcctgctctttggcatttttttcactcctcccatcgaattctcaatccaggaatcctcccgagattcgcttgcccgcccttttcttttcaagtggatctgaacttgggagggaaccccgatgcagccgcggtacggagaagcacgacagccgctgccggggcggtacgcgctgtaccacttcggcaccagcggcgccgccgtcgccgccgccaccgccgtgacccatccgttcggtcagctagctgctcttcttctcatctgttgcttgttattttgggtaatttgatattcttgaactgcctcgggtttcggttggggaaggacatcaaggaaatacgcatgtatgattcggcattcgggtgctaattcttgattttgttttagttccgccagtcagaaattctcccctctgaattctctgcttaggccgtgtttgcatccttggaattgaattccgttctaataattaattaaactaatttagttttatacataatatatttgtactacatttctacttttctacttgagataagcgagccgaagagtgcgttataagttacagcttagaaacatagaatagtgatatataaaatcaatttccaccacctcaccctaattttttggatagtcttatttaactttagaaaatgatagaatatcaaattccaaaccaaataactttactatattaaa

SEQ ID NO: 97198 - DNA, 813 bp, Zea Mays
gcacgtgaaaattccttccgctccagttattacggagcaatagggtggtgaactggtgactggagctggaatcgcatttcttgctctttggtctctccagaatcatcctccggccgagccttcttggaatcctcccgagattcgcttgcccgcccttttcttttcaagtggatctgaacttgggagggaaccccgatgcagccgcggtacggagaagcacgacagccgctgccggggcggtacgcgctgtaccacttcggcaccagcggcgccgccgtcgccgccgccaccgccgtgacccatccgttcggtcagctagctgctcttcttctcatctgttgcttgttattttgggtaatttgatattcttgaactgcctcgggtttcggttggggaaggacatcaaggaaatacgcatgtatgattcggcattcgggtgctaattcttgattttgttttagttccgccagtcagaaattctcccctctgaattctctgcttaggccgtgtttgcatccttggaattgaattccgttctaataattaattaaactaatttagttttatacataatatatttgtactacatttctacttttctacttgagataagcgagccgaagagtgcgttataagttacagcttagaaacatagaatagtgatatataaaatcaatttccaccacctcaccctaattttttggatagtcttatttaactttagaaaatgatagaatatcaaattccaaaccaaataactttactatattaaataaattctaattcctttaaaaccaaacggcccctagggaa

SEQ ID NO: 97199 - DNA, 1960 bp, Zea Mays
gcacgtgaaaattccttccgctccagttattacggagcaatagggtggtgaactggtgactggagctggaatcgcatttcttgctctttggtctctccagaatcatcctccggccgagccttcttggtctactcattcgattgcttcaccattctttcctgctcctgctctttggcatttttttcactcctcccatcgaattctcaatccaggaatcctcccgagattcgcttgcccgcccttttcttttcaagtggatctgaacttgggagggaaccccgatgcagccgcggtacggagaagcacgacagccgctgccggggcggtacgcgctgtaccacttcggcaccagcggcgccgccgtcgccgccgccaccgccgtgacccatccgttcgatgttatcaaagtcaggcttcaaatgcagcttgctgggcaaagaggaaacttagttggaatgggaacaatatttacacaaatggttgaaagggaaggggctcggtcactctacctgggacttgcaccagcgttggcgagagctgttgtctatggtggccttcggtttggactgtatgagccctgcaagcatgtctgcagttatgcatttggttcaacaaactttgcttttaaatttgcatctggagtcattgctgggggccttgcaactgctttaacaaatcccatggaagttttgaaggtgaggctgcagatgagtaaaagcagtaccagtacaataagagagatgagaaaagttatagcgcacgaagggtttaaagcactttggaaaggagtcggcccagcaatgacaagagcaggttgcctcactgcatcacaaatggcgacttacgatgaggccaaacaggccttaatgaagtggacaccacttgaagaaggttttcagttacatctcatgtacagtgaattctctatttctctattatgatgtgtatcctttaatgagatgaatggatggctaatctttatctgcttggaagctcgagtttcatagctggaacagctggtactcttgtgaccgcacctgtagacatgatcaaaacacggttaatgctgcaacaggagtccataggcgccagagtatacaggaacggattccattgtgcttcccaggtgttgatcttaatatttcatttttgatgtttgtgctattaggaattattcctggtaagaacattgctagaattactttctataagtgcctgaaagcactgcgaaattgttaagctacaacattagtagtgaactattgtcacaagatgagaacaggaatgttacaaccgaggagattggaaatacaataccttgagcgccaacaacatgaaggtattcttctgatatttgtttccattctcttggtttgcaggttgtggtgacagagggtgtgaagtcactttataaagggtgagaactgcatgtactgcatctatatgttttatattataataacagtggtcgtttactaatcagcttgatttgttgaacatgctgtctctattttcagtggatttgccacattcgcgagagtaggccctcagacaacgattacctttgtcgtgtgcgagaaactgcgcgaacttgcaggaatgactgccatctagtgccaccccaaattgcataatgtgtggggtccaacggttgaacagcatactctacccgagttttcacaccattctttattcaccattcatgatgagaagggagaagataagcacccactgggatgtttaaggattgggaagccagagctccttcagatttatcatacctcatttgaaatttcgaaatagcgtgattgttgttatgtttgctctaagacttactcatcatatctctaatctcatcttgtatttcgaactacactctacgaacaatacagtctacaatgtaaaaacattatttttggtgaccatatgggtaacctgttgtacatgctgtacacggtct

SEQ ID NO: 97200 - DNA, 1624 bp, Zea Mays
gcacgtgaaaattccttccgctccagttattacggagcaatagggtggtgaactggtgactggagctggaatcgcatttcttgctctttggtctctccagaatcatcctccggccgagccttcttggaatcctcccgagattcgcttgcccgcccttttcttttcaagtggatctgaacttgggagggaaccccgatgcagccgcggtacggagaagcacgacagccgctgccggggcggtacgcgctgtaccacttcggcaccagcggcgccgccgtcgccgccgccaccgccgtgacccatccgttcgatgttatcaaagtcaggcttcaaatgcagcttgctgggcaaagaggaaacttagttggaatggtacttaaagtcacagcacctacaggtttcatatttcgcacatcttctgatgttaaattcatttcctagttatatgtgtattgtgaaatatgttagggaacaatatttacacaaatggttgaaagggaaggggctcggtcactctacctgggacttgcaccagcgttggcgagagctgttgtctatggtggccttcggtttggactgtatgagccctgcaagcatgtctgcagttatgcatttggttcaacaaactttgcttttaaatttgcatctggagtcattgctgggggccttgcaactgctttaacaaatcccatggaagttttgaaggtgaggctgcagatgagtaaaagcagtaccagtacaataagagagatgagaaaagttatagcgcacgaagggtttaaagcactttggaaaggagtcggcccagcaatgacaagagcaggttgcctcactgcatcacaaatggcgacttacgatgaggccaaacaggccttaatgaagtggacaccacttgaagaaggttttcagttacatctcatgtacagtgaattctctatttctctattatgatgtgtatcctttaatgagatgaatggatggctaatctttatctgcttggaagctcgagtttcatagctggaacagctggtactcttgtgaccgcacctgtagacatgatcaaaacacggttaatgctgcaacaggagtccataggcgccagagtatacaggaacggattccattgtgcttcccaggttgtggtgacagagggtgtgaagtcactttataaaggtggatttgccacattcgcgagagtaggccctcagacaacgattacctttgtcgtgtgcgagaaactgcgcgaacttgcaggaatgactgccatctagtgccaccccaaattgcataatgtgtggggtccaacggttgaacagcatactctacccgagttttcacaccattctttattcaccattcatgatgagaagggagaagataagcacccactgggatgtttaaggattgggaagccagagctccttcagatttatcatacctcatttgaaatttcgaaatagcgtgattgttgttatgtttgctctaagacttactcatcatatctctaatctcatcttgtatttcgaactacactctacgaacaatacagtctacaatgtaaaaacattatttttggtgaccatatgggtaacctgttgtacatgctgtacacggtctaactacc

SEQ ID NO: 97201 - DNA, 1877 bp, Zea Mays
gcacgtgaaaattccttccgctccagttattacggagcaatagggtggtgaactggtgactggagctggaatcgcatttcttgctctttggtctctccagaatcatcctccggccgagccttcttggaatcctcccgagattcgcttgcccgcccttttcttttcaagtggatctgaacttgggagggaaccccgatgcagccgcggtacggagaagcacgacagccgctgccggggcggtacgcgctgtaccacttcggcaccagcggcgccgccgtcgccgccgccaccgccgtgacccatccgttcgatgttatcaaagtcaggcttcaaatgcagcttgctgggcaaagaggaaacttagttggaatggtacttaaagtcacagcacctacaggtttcatatttcgcacatcttctgatgttaaattcatttcctagttatatgtgtattgtgaaatatgttagggaacaatatttacacaaatggttgaaagggaaggggctcggtcactctacctgggacttgcaccagcgttggcgagagctgttgtctatggtggccttcggtttggactgtatgagccctgcaagcatgtctgcagttatgcatttggttcaacaaactttgcttttaaatttgcatctggagtcattgctgggggccttgcaactgctttaacaaatcccatggaagttttgaaggtgaggctgcagatgagtaaaagcagtaccagtacaataagagagatgagaaaagttatagcgcacgaagggtttaaagcactttggaaaggagtcggcccagcaatgacaagagcaggttgcctcactgcatcacaaatggcgacttacgatgaggccaaacaggccttaatgaagtggacaccacttgaagaaggttttcagttacatctcatgtacagtgaattctctatttctctattatgatgtgtatcctttaatgagatgaatggatggctaatctttatctgcttggaagctcgagtttcatagctggaacagctggtactcttgtgaccgcacctgtagacatgatcaaaacacggttaatgctgcaacaggagtccataggcgccagagtatacaggaacggattccattgtgcttcccaggtgttgatcttaatatttcatttttgatgtttgtgctattaggaattattcctggtaagaacattgctagaattactttctataagtgcctgaaagcactgcgaaattgttaagctacaacattagtagtgaactattgtcacaagatgagaacaggaatgttacaaccgaggagattggaaatacaataccttgagcgccaacaacatgaaggtattcttctgatatttgtttccattctcttggtttgcaggttgtggtgacagagggtgtgaagtcactttataaaggtggatttgccacattcgcgagagtaggccctcagacaacgattacctttgtcgtgtgcgagaaactgcgcgaacttgcaggaatgactgccatctagtgccaccccaaattgcataatgtgtggggtccaacggttgaacagcatactctacccgagttttcacaccattctttattcaccattcatgatgagaagggagaagataagcacccactgggatgtttaaggattgggaagccagagctccttcagatttatcatacctcatttgaaatttcgaaatagcgtgattgttgttatgtttgctctaagacttactcatcatatctctaatctcatcttgtatttcgaactacactctacgaacaatacagtctacaatgtaaaaacattatttttggtgaccatatgggtaacctgttgtacatgctgtacacggtctaactacc

SEQ ID NO: 97202 - DNA, 1445 bp, Zea Mays
gcacgtgaaaattccttccgctccagttattacggagcaatagggtggtgaactggtgactggagctggaatcgcatttcttgctctttggtctctccagaatcatcctccggccgagccttcttggaatcctcccgagattcgcttgcccgcccttttcttttcaagtggatctgaacttgggagggaaccccgatgcagccgcggtacggagaagcacgacagccgctgccggggcggtacgcgctgtaccacttcggcaccagcggcgccgccgtcgccgccgccaccgccgtgacccatccgttcgatgttatcaaagtcaggcttcaaatgcagcttgctgggcaaagaggaaacttagttggaatgggaacaatatttacacaaatggttgaaagggaaggggctcggtcactctacctgggacttgcaccagcgttggcgagagctgttgtctatggtggccttcggtttggactgtatgagccctgcaagcatgtctgcagttatgcatttggttcaacaaactttgcttttaaatttgcatctggagtcattgctgggggccttgcaactgctttaacaaatcccatggaagttttgaaggtgaggctgcagatgagtaaaagcagtaccagtacaataagagagatgagaaaagttatagcgcacgaagggtttaaagcactttggaaaggagtcggcccagcaatgacaagagcaggttgcctcactgcatcacaaatggcgacttacgatgaggccaaacaggccttaatgaagtggacaccacttgaagaaggttttcagttacatctcatctcgagtttcatagctggaacagctggtactcttgtgaccgcacctgtagacatgatcaaaacacggttaatgctgcaacaggagtccataggcgccagagtatacaggaacggattccattgtgcttcccaggttgtggtgacagagggtgtgaagtcactttataaaggtggatttgccacattcgcgagagtaggccctcagacaacgattacctttgtcgtgtgcgagaaactgcgcgaacttgcaggaatgactgccatctagtgccaccccaaattgcataatgtgtggggtccaacggttgaacagcatactctacccgagttttcacaccattctttattcaccattcatgatgagaagggagaagataagcacccactgggatgtttaaggattgggaagccagagctccttcagatttatcatacctcatttgaaatttcgaaatagcgtgattgttgttatgtttgctctaagacttactcatcatatctctaatctcatcttgtatttcgaactacactctacgaacaatacagtctacaatgtaaaaacattatttttggtgaccatatgggtaacctgttgtacatgctgtacacggtctaactacc

SEQ ID NO: 97203 - DNA, 1460 bp, Zea Mays
gaaaaaaaaacaggcctcgtcgattctgtgggccggagccattgggttcgaaaagccctggcttccctttcacggccgccctagcttccccacactgagctccttcgccgccgccctagctttcccgcgagcgggacggtagccgccgtatcctccttcctccaacaccgagcgggtccaggcaggcagcatcctcgcgccctgtcgtgtcgcctctgcctctgagttcagctcgccggcagccgccgcccgcaatggaggccctccggaaagcggaggcggagctcacggtgtatgtggaccgttttgatggcgtgttgctgatgcatgaagtttcattccttattggcaaagacaaagagggcaaacccatatatgaaaggagtgaccgtaatgatcaaattgctgaacccgtttcttatggcaaaatcatgaatggcttggtgccatatttcagcgtccaagtgcatgccaccctgctgctgttctctccccagccggacatgatcctggaagggatggttgaaatgattgggaaggagtcaattcatgccattgtattaggggttttctcagtggcaattatgtctgaagatattaagttcaaattcaaatggaaaagtgatggagggaaatttgtgagcctcacagataaaaaacatgtgattgaaagaggaacaatgataaggttttctgtcaaaagggtggatacagaaatgagttgtcatattactggatctttaatcccacctcacactggatgcatgcgttggttgtcagtacatgatcctaaatatgcatcagaactcaaaagtggtgaaagtagatcaagggatacaagcatcaaaattgagcagaatgaacaagaacatagaatactcaagaatgaagatggtatggtgaaatctgaacggccatataaatcccgaaagagggggcgacacattgagaaatgacatttcattgaggccgtgaagatacaagaatgtggaagtcatgttcgcttcaatggttctgctgcctatttatgtttcttgtgggggggagaaggtgcctccagttggagatcccggtagcttcatagaaatgtacgatgatttttgtaaaacgaatggagggttgcatttgcaaattatcaccttttttgacaagatagtagtaactgatctcaccgaaggggtttattggcaaatggcaagtcccatgtttcaattataacccgggcctctgttgtgtcctatatcctgtaaaaggcctttccttttgaagcataactgaaagagttgcacacccattataaccattttttatcaagcaaaatctgaaagttgacacccaaagtttcccaatacgatgtaaaggacgctctcgaaccttctggtgtatgcacagctacaacaataatatagcgttgtccagcatttaggagcattttatgcacagctacaacaataatatcc

SEQ ID NO: 97204 - DNA, 1493 bp, Zea Mays
cattgggttcgaaaagccctggcttccctttcacggccgccctagcttccccacactgagctccttcgccgccgccctagctttcccgcgagcgggacggtagccgccgtatcctccttcctccaacaccgagcgggtccaggcaggcagcatcctcgcgccctgtcgtgtcgcctctgcctctgagttcagctcgccggcagccgccgcccgcaatggaggccctccggaaagcggaggcggagctcacggtgtacgtgcacccctccaacgccaagcgcgtccggcacgccgtatcccgccagcttagcgcgcttctcttcacgtatgtggaccgttttgatggcgtgttgctgatgcatgaagtttcattccttattggcaaagacaaagagggcaaacccatatatgaaaggagtgaccgtaatgatcaaattgctgaacccgtttcttatggcaaaatcatgaatggcttggtgccatatttcagcgtccaagtgcatgccaccctgctgctgttctctccccagccggacatgatcctggaagggatggttgaaatgattgggaaggagtcaattcatgccattgtattaggggttttctcagtggcaattatgtctgaagatattaagttcaaattcaaatggaaaagtgatggagggaaatttgtgagcctcacagataaaaaacatgtgattgaaagaggaacaatgataaggttttctgtcaaaagggtggatacagaaatgagttgtcatattactggatctttaatcccacctcacactggatgcatgcgttggttgtcagtacatgatcctaaatatgcatcagaactcaaaagtggtgaaagtagatcaagggatacaagcatcaaaattgagcagaatgaacaagaacatagaatactcaagaatgaagatggtatggtgaaatctgaacggccatataaatcccgaaagagggggcgacacattgagaaatgacatttcattgaggccgtgaagatacaagaatgtggaagtcatgttcgcttcaatggttctgctgcctatttatgtttcttgtgggggggagaaggtgcctccagttggagatcccggtagcttcatagaaatgtacgatgatttttgtaaaacgaatggagggttgcatttgcaaattatcaccttttttgacaagatagtagtaactgatctcaccgaaggggtttattggcaaatggcaagtcccatgtttcaattataacccgggcctctgttgtgtcctatatcctgtaaaaggcctttccttttgaagcataactgaaagagttgcacacccattataaccattttttatcaagcaaaatctgaaagttgacacccaaagtttcccaatacgatgtaaaggacgctctcgaaccttctggtgtatgcacagctacaacaataatatagcgttgtccagcatttaggagcattttatgcacagctacaacaataatatcc

SEQ ID NO: 97205 - DNA, 2751 bp, Zea Mays
aagaatctgaccgaaaccaaagttgctaataacttgggacgtcgtttcccggcgtgcacagcaccgctcgatcgagcaaacacaaacccttggtggagtcctctccgccgccgcgcgctaacaacctacgtacgctatcgccgcccgctcgcctcgacgggattggtccggccgttggcccgtcccccccaccacgctcgctccattggcaggcgagaccgtccatcctccgaccccacccgtcggccgccgggatggcggcttcgggcggggatgcgccggaactcgccggtgttcctccttgccccatttcttctgccaggatggcgctgagtggggatctgttcagatctgccgtgataacaaatgcttgtaatgctgcaagcgcacctgaagaaaataggcttgctgatgacagcaacaccatttcagaaaatgcccaggaatcattgagctctttgccagaacaagagtcaaatgatgctagtgttaacacagaaaagaaagaacctggcatttcaaaatgcaaatcagtggacgaaataccaaaaacagtggctgtaaagaggtgcaagaacattgattcaaagaaagtctcctcaaataacaataataatccaagctttactggcagtctggttctgaaaaaacagccagcgaagggaggccatctttttcaattatgtgaaaatggaatgtctcaagacacaaagactcctagcacaaggatatgcataaattcagcatgcaaagctgtcttcaattcagacaatgcattttgtaagaggtgttcatgttgtatttgccatggttttgatgataacaaagatcctagcctttggttggtatgctcatcagagattggtgatcaggattgttgtggatcatcctgccacattgagtgcgcactcaagcaccgaaagactggatgcatagaacttggacaatctatacagcttgatggtaactactgctgtgctgcatgtggcaaggttattggaatacttgggttctggaagaggcagctggtagttgctaaagatgctcgtagagttgataatctctgttcccgcatatatctgagtcatagacttttggatggcacaactcgttttaaagagttgcatcggatcgtagaggatgcaaaagcaaagttggaaagtgaagttggcccccttgatggtacatcatccaagatggctcgtggtattgtaggccggctgcatgttgctgctgatgtgcagaaactttgcactttagcaattgaaaaggctaatgagtggcttagctcaaacattcaatctgaaacaaaacaaaatgatacacttccttctgcctgcaggtttaaatttgaagatattacagcttcatctttggtgttggttctcaaggaagctgtttcctcacagtatcatgctatcaaaggctataaactctggtactggaatagcagagaagcacctttcacaggagagcctgctgttttccccaaagaccaaagaaggattcttatatccaatctgcagccctgcacagaatattcgttccgtattatttcatttactgaggatggtgaactgggccattctgaatcaaaagtatttaccaagagtgtggaaattattcgtaagaacacagagctcggagcagaaggttgctcatcttctgccaagggagctggtaagagacaaaatgttaggtcattaggcttccaagtgcgccagctgggtaatgtcttccgaaaagcacagactgaggagaatggttaccccagcgcactgtgtaaagatgagattgaagattcatgcgatcagagtgattctgtgattccagtcaaggaccaaattccacgtggtgcctcccgtaagctcgatctcaatgagacctcagtcccagacctaaatgcagaagtagtcatgccaacagagtgctgccagaatgacaacggctgtagttctggaaagaatgcattcacaaaatcgaatggttgtggtgactccgaaacttgtgcggaggggcatgtaggggatgcaccggccatggaatccttgtctcaaagtcgcaagcaggcatcagatttggagcaggagacttgtgttgatgacagcaatttggtggcccgtgcagttaggctctttgccccgaagttaggccagttagatgacaactatgagtactgtgtgaagattatacgttggttggaatgttctggcctcattgagaaggatttcaggatgaaatttctaacctggttcagtttgagatcgacagaacaggaacggagagttgttatcaccttcatccgcaccctaatcgatgaacccagtagtttggctgcgcagcttttggattcctttgaagaaattgttaccagtaagaggctaagaactggtttctgtactaagttgtggcactaaccagatagagcatgaaacagctatctaataatactctagtattcttacattggcaagattaactgggatgacggtgtagtaagtacttctatatgttttctgataaatgtagttaaacagatgttgctgagcttgggtatttgccatgatgataatattcttacatgggcaaaaattaactgggctgtagtgtaatggtgctttttatttgttttctgataatgtagttgtctgatattgttgtggcttggatatttgccatgatgatgtattcttatatgtgaaaaattaactgggatgacagtgtaatgctacttccatttgtttttatgat

SEQ ID NO: 97206 - DNA, 2700 bp, Zea Mays
aagaatctgaccgaaaccaaagttgctaataacttgggacgtcgtttcccggcgtgcacagcaccgctcgatcgagcaaacacaaacccttggtggagtcctctccgccgccgcgcgctaacaacctacgtacgctatcgccgcccgctcgcctcgacgggattggtccggccgttggcccgtcccccccaccacgctcgctccattggcaggcgagaccgtccatcctccgaccccacccgtcggccgccgggatggcggcttcgggcggggatgcgccggaactcgccgtgataacaaatgcttgtaatgctgcaagcgcacctgaagaaaataggcttgctgatgacagcaacaccatttcagaaaatgcccaggaatcattgagctctttgccagaacaagagtcaaatgatgctagtgttaacacagaaaagaaagaacctggcatttcaaaatgcaaatcagtggacgaaataccaaaaacagtggctgtaaagaggtgcaagaacattgattcaaagaaagtctcctcaaataacaataataatccaagctttactggcagtctggttctgaaaaaacagccagcgaagggaggccatctttttcaattatgtgaaaatggaatgtctcaagacacaaagactcctagcacaaggatatgcataaattcagcatgcaaagctgtcttcaattcagacaatgcattttgtaagaggtgttcatgttgtatttgccatggttttgatgataacaaagatcctagcctttggttggtatgctcatcagagattggtgatcaggattgttgtggatcatcctgccacattgagtgcgcactcaagcaccgaaagactggatgcatagaacttggacaatctatacagcttgatggtaactactgctgtgctgcatgtggcaaggttattggaatacttgggttctggaagaggcagctggtagttgctaaagatgctcgtagagttgataatctctgttcccgcatatatctgagtcatagacttttggatggcacaactcgttttaaagagttgcatcggatcgtagaggatgcaaaagcaaagttggaaagtgaagttggcccccttgatggtacatcatccaagatggctcgtggtattgtaggccggctgcatgttgctgctgatgtgcagaaactttgcactttagcaattgaaaaggctaatgagtggcttagctcaaacattcaatctgaaacaaaacaaaatgatacacttccttctgcctgcaggtttaaatttgaagatattacagcttcatctttggtgttggttctcaaggaagctgtttcctcacagtatcatgctatcaaaggctataaactctggtactggaatagcagagaagcacctttcacaggagagcctgctgttttccccaaagaccaaagaaggattcttatatccaatctgcagccctgcacagaatattcgttccgtattatttcatttactgaggatggtgaactgggccattctgaatcaaaagtatttaccaagagtgtggaaattattcgtaagaacacagagctcggagcagaaggttgctcatcttctgccaagggagctggtaagagacaaaatgttaggtcattaggcttccaagtgcgccagctgggtaatgtcttccgaaaagcacagactgaggagaatggttaccccagcgcactgtgtaaagatgagattgaagattcatgcgatcagagtgattctgtgattccagtcaaggaccaaattccacgtggtgcctcccgtaagctcgatctcaatgagacctcagtcccagacctaaatgcagaagtagtcatgccaacagagtgctgccagaatgacaacggctgtagttctggaaagaatgcattcacaaaatcgaatggttgtggtgactccgaaacttgtgcggaggggcatgtaggggatgcaccggccatggaatccttgtctcaaagtcgcaagcaggcatcagatttggagcaggagacttgtgttgatgacagcaatttggtggcccgtgcagttaggctctttgccccgaagttaggccagttagatgacaactatgagtactgtgtgaagattatacgttggttggaatgttctggcctcattgagaaggatttcaggatgaaatttctaacctggttcagtttgagatcgacagaacaggaacggagagttgttatcaccttcatccgcaccctaatcgatgaacccagtagtttggctgcgcagcttttggattcctttgaagaaattgttaccagtaagaggctaagaactggtttctgtactaagttgtggcactaaccagatagagcatgaaacagctatctaataatactctagtattcttacattggcaagattaactgggatgacggtgtagtaagtacttctatatgttttctgataaatgtagttaaacagatgttgctgagcttgggtatttgccatgatgataatattcttacatgggcaaaaattaactgggctgtagtgtaatggtgctttttatttgttttctgataatgtagttgtctgatattgttgtggcttggatatttgccatgatgatgtattcttatatgtgaaaaattaactgggatgacagtgtaatgctacttccatttgtttttatgataaacggttttgatct

SEQ ID NO: 97207 - DNA, 737 bp, Zea Mays
cagtgcgctgccgcgtggatgcacgtggcggttgcctccagatctgtgttgccggcttgcggcgtggatgtacacgtggcgtggcggaggatacaaaatgaacagcacaggccagggcacagacgcacgcgtcaggtgcaccgtgcacccgctgaattgaacacctcaccaccatggacatggaggcgcaggcggcaaaggcgagaaccgaggacccgcgacgtcctcccagcgacggcgggcctgcaggagcgaagtgcgtggagggtggaggcgacggtgccagccggagcacggcaaagcgggaggccgagaaggcggctgcggtggaggcggagggcgccctgccgctgccgctgccgcacgaacgggtgccgcagccgcgcgacgtgtacaacgagcagctggagcggatgtgaatgcatgttttctgctcggcagtctcgatgaaccccaatcgacccaatgatcgatcgagcgatcctgctacgggtcctctttgattcctagagctctcacctcagcagtggaggaaaaaaactggatgcactggctattatgtgtgtatgttgtgagagtagtggggaggtttccctaaacatttttatgaggtgaacgttagcggtgtcagaaaagctggagtcggtgaagctcaaacagtatatagtacgtaggagatggacctacctaatacgtaggtggagtcagaggagtgtatatatttaacagtatgtaat

SEQ ID NO: 97208 - DNA, 1009 bp, Zea Mays
aaacgcgagatcccgcgcttgcacgcgggcgcgcccgctctccgatccgacggccctcgcctcttccacgtcagcgatccgcgccccgcccgctccgccagtcttccccgcggcctctacatataaccccgcctcgccgcctctcctcatcccacttccgcccaaatccaccaccgccataccagcgtgtccgcgattccgtcgagtagactgggcgagagagtagtctcggacgagaagaggcgaatatgagttccggcggcggcaggggcaagcccaaggggtccaaggctttgtcgcggtcgaccaaggccgggctgcagttccccgtcggccgcatcgcgcgctacctcaaggccggcaagtacgccgagcgcgtcggcggtggtgcgcccgtctacctctccgccgtcctcgagtatctcgcggcagaggtaactgcctcctcttcttttccctgccctccatttctctctccccctccctttagcgaatccgtttggatgtttgttgaatctttgcggtacgctcataatcgtttgcctgcaggtgttggaactggcgggcaacgcggcgcgcgacaacaagaagaaccgcatcgtgccgcgtcacatccagctcgccgtgcgcaacgacgaggaactcagcaagctgctcggagctgtcaccatcgccgccggaggtgtgttgcccaacattcatcagacgctgctgcccaagaaggccggtgggaagggcaaggccgacatcggttccgcatcccaggagttctaagcggccgcggcggcggttgcaggtttctctgacttgttcgaactggagctccaacatgcatgaagtccccccgtcgctcaagtttcgtcgattagtagtgttagggtgttttctatctttggttaggtttagattgtctgatggatggtttatcagacgaaagtttggtgatcgagggcttcctgtatgtatcaatcaatcttgctggaatggaacaaatcgttggttgcagtta

SEQ ID NO: 97209 - DNA, 1006 bp, Zea Mays
aaacgcgagatcccgcgcttgcacgcgggcgcgcccgctctccgatccgacggccctcgcctcttccacgtcagcgatccgcgccccgcccgctccgccagtcttccccgcggcctctacatataaccccgcctcgccgcctctcctcatcccacttccgcccaaatccaccaccgccataccagcgtgtccgcgattccgtcgagtagactgggcgagagagtagtctcggacgagaagaggcgaatatgagttccggcggcggcaggggcaagcccaaggggtccaaggctttgtcgcggtcgaccaaggccgggctgcagttccccgtcggccgcatcgcgcgctacctcaaggccggcaagtacgccgagcgcgtcggcggtggtgcgcccgtctacctctccgccgtcctcgagtatctcgcggcagaggtgttggaactggcgggcaacgcggcgcgcgacaacaagaagaaccgcatcgtgccgcgtcacatccagctcgccgtgcgcaacgacgaggaactcagcaagctgctcggagctgtcaccatcgccgccggaggtgtgttgcccaacattcatcagacgctgctgcccaagaaggccggtgggaagggcaaggccgacatcggttccgcatcccaggagttctaagcggccgcggcggcggttgcaggtttctctgacttgttcgaactggagctccaacatgcatgaagtccccccgtcgctcaagtttcgtcgattagtagtgttagggtgttttctatctttggttaggtttagattgtctgatggatggtttatcagacgaaagtttggtgatcgagggcttcctgtatgtatcaatcaatcttgctggaatggaacaaatcgttggttgcagttagttgctctggccgtatctttttttgttcttgattttgtttttatccagttgaagttgctactgattgtgatctgtggaggcttggttcatggttgtagttgctgctgtcaga

SEQ ID NO: 97210 - DNA, 2518 bp, Zea Mays
ccaataaaataccttaagagtcaaaataatgttacaaaattaaaatactacattatttaaagtgtttagagcactaaaaaagttgagctccaacaactatgccctaaatcatgtatttagaaaataaaatattgagaataatgtatcaaacaaggatatgacactgatctagggtgtagtatatttatgtcacttcaaggtctgtcttatatttttctaattctaataaataattataaaatatgacactgtggaaaagttgtttttatgagttaagccttaattttgaaaataggacactgttaacgtataaatgtgtatatcagtctcggactctcggtttgcaaataaaaaatataaaaaacatgaaggagcatcgggcctagaggcaattgggccacatatatgttgcccggcccaacatttgctgtgttaaaattttggaaacatcctactcggcccagatagcccatcaggtcgccctcctcctccgacctcgtcccgcagcaacgcagcagcagcgtcagcggtaccgccgggtgcggctcctcctccctcctagccattcggccatgtccggcggcgggtgcagcatacgcgccatctggatccttacgcccaacgacacagtagccttctccaggcggttcgctgtggtggagaagcggtggcgtgccgcgtgggaggaggaagaaggagacggagagagacaccgttggggcaccggggcggcgaagatgccgctgcccgccgaccacgaggtcgccgccgcattcgccgagcgccggagaagggagggcactgcacgcagttcaggcatccgaacaaacgtatcatctgtgggactggattcttgggttgatgatccaattacccgccacattatctcattacacatggataaagaggaaggagatccctttatgctgtggcctgtggtcctacaaaagcgtggagggtactatgtccttgtgttgcctctggtggatcctcagccatttagagcatatgagaatctcttgaaaaggtctgattgtgggggttcggccaaggagaacaacaatctttcttcaatcctgttcaatcttccatgcataacaggagcatttatggttgcacaagttgttggggacataattactggtgatattgctgaacctgaggtgattgttagctctgggccatctgttggtggactcttggattcattgactggaagtataggtatttcagcacgagcgaagcctattgccgcacctgttgcagcaccaactgcatcagtctcttcccctgttggtgctgctcaatcagactccttaaaagggggtgtaaggccttttgacaaggatttactgcagaacttcatcattggtgcaatgccttttggcacacctcaagatctcaattatgccaatgttacttcgattagaactactggattttctggtgaccctcttccaacagaccagaaacaacctgcctggaagccctacctgtacaaagggaggcaaaggattctgttttctagcttggagactataaatgctgcactgtatgaccgtgatgatgttccagatttcctttctgtttcaggacaggtgacctgtagggctgaactagaaggactacctgatgtttctttgccattgactggtttaaaaactgctcatattgaggtttcatcattccatcactgtgttcaagcttcagagcccactgctaataagcaaaccctggtttttcagccaccattaggaaattttgtattgatgcattatcaagcaccatgcaacattgctcctcctgttaaagggttctatcagttgtccatggtttctgaaaatgaaggtgcttttctatttaagctgtcattgatggagggttacaagtctcccttcattatggacttttgcatgattacaatgccattccctcgaagaagagttgcatcatatgacggaaatccatcaattgggacagtttcaatgacagagcattcaattgaatggagaattgtctcaagtggacggggacttagtggtaggagcattgacgctaccttccctggtactgttaaatttcagcctagaacgacacagagaataaattcatcatctcgattcatttcaagcactggatatactgaagatagtgacagtgaacaagataacgttaagaatggagctagcttggatgactacataatggaaaaaatcaataaggatcttcaggcagttgatttagaagagccattgtcttggcaagcgtataattatgctaaggtttcttttaaggttactggaggcacgctgtctggtcttgcaattgatccaaaatctgtaagtaataaattacttctctcactcacctgcattgagctttcgtcataaatccattcttggctaaccttatcatccgatcagcagagatctgatagatattacgttcctaacttagtgcacagatattgttagagagtattcctgcagattagattgtattgcattgcattgaggcc

SEQ ID NO: 97211 - DNA, 2301 bp, Zea Mays
ctaataaataattataaaatatgacactgtggaaaagttgtttttatgagttaagccttaattttgaaaataggacactgttaacgtataaatgtgtatatcagtctcggactctcggtttgcaaataaaaaatataaaaaacatgaaggagcatcgggcctagaggcaattgggccacatatatgttgcccggcccaacatttgctgtgttaaaattttggaaacatcctactcggcccagatagcccatcaggtcgccctcctcctccgacctcgtcccgcagcaacgcagcagcagcgtcagcggtaccgccgggtgcggctcctcctccctcctagccattcggccatgtccggcggcgggtgcagcatacgcgccatctggatccttacgcccaacgacacagtagccttctccaggcggttcgctgtggtggagaagcggtggcgtgccgcgtgggaggaggaagaaggagacggagagagacaccgttggggcaccggggcggcgaagatgccgctgcccgccgaccacgaggtcgccgccgcattcgccgagcgccggagaagggagggcactgcacgcagttcaggcatccgaacaaacgtatcatctgtgggactggattcttgggttgatgatccaattacccgccacattatctcattacacatggataaagaggaaggagatccctttatgctgtggcctgtggtcctacaaaagcgtggagggtactatgtccttgtgttgcctctggtggatcctcagccatttagagcatatgagaatctcttgaaaaggtctgattgtgggggttcggccaaggagaacaacaatctttcttcaatcctgttcaatcttccatgcataacagggtaatagcatttatggttgcacaagttgttggggacataattactggtgatattgctgaacctgaggtgattgttagctctgggccatctgttggtggactcttggattcattgactggaagtataggtatttcagcacgagcgaagcctattgccgcacctgttgcagcaccaactgcatcagtctcttcccctgttggtgctgctcaatcagactccttaaaagggggtgtaaggccttttgacaaggatttactgcagaacttcatcattggtgcaatgccttttggcacacctcaagatctcaattatgccaatgttacttcgattagaactactggattttctggtgaccctcttccaacagaccagaaacaacctgcctggaagccctacctgtacaaagggaggcaaaggattctgttttctagcttggagactataaatgctgcactgtatgaccgtgatgatgttccagatttcctttctgtttcaggacaggtgacctgtagggctgaactagaaggactacctgatgtttctttgccattgactggtttaaaaactgctcatattgaggtttcatcattccatcactgtgttcaagcttcagagcccactgctaataagcaaaccctggtttttcagccaccattaggaaattttgtattgatgcattatcaagcaccatgcaacattgctcctcctgttaaagggttctatcagttgtccatggtttctgaaaatgaaggtgcttttctatttaagctgtcattgatggagggttacaagtctcccttcattatggacttttgcatgattacaatgccattccctcgaagaagagttgcatcatatgacggaaatccatcaattgggacagtttcaatgacagagcattcaattgaatggagaattgtctcaagtggacggggacttagtggtaggagcattgacgctaccttccctggtactgttaaatttcagcctagaacgacacagagaataaattcatcatctcgattcatttcaagcactggatatactgaagatagtgacagtgaacaagataacgttaagaatggagctagcttggatgactacataatggaaaaaatcaataaggatcttcaggcagttgatttagaagagccattgtcttggcaagcgtataattatgctaaggtttcttttaaggttactggaggcacgctgtctggtcttgcaattgatccaaaatctgtaagtaataaattacttctctcactcacctgcattgagctttcgtcataaatccattcttggctaaccttatcatccgatcagcagagatctgatagatattacgttcctaacttagtgcacagatattgttagagagtattcctgcagattagattgtattgcattgcattgaggcc

SEQ ID NO: 97212 - DNA, 2421 bp, Zea Mays
atgcgccggcgaaaacctaggagtttgatgaaagttgaaagcgaccacttgagatttgaaagcggcttgcccgggtgccggccccgggccccgtccaacccccccccccccccccatcttgtcgttttttgcgcgccgtcgcctccctttctcccccaaaaccatccatcgtctctgcccgccatcccatttcccaatcgcctccaaccccccacaccccgcccgccgcaaacccctccatttccgccgcatttccctcgctgtcccagctcaccggtcggtcgggtgctggggctcgcggctcctctcttcctggggcctggaagggacggggaaggatgcaggccgcgaccaggagcgtctcttgcatcggcgcgcagccgtccgtcctcatccggtgcggcggtggtgcgctgtccgcttcgcccggcggcctcggaggagggggatgcagggtccgggtcgtcgccgtgctgcggtgctgcgcacaggagaagcgtccgcctcgggtgcggaaatccaaggaggagagaagggagatggtggagtccttcatcaacagctatcgagcttcaaacgaaggaaaattcccatcggttaaccttacacataaggaagttggagggtcatattatatagttcgtgaaatcgtgagggatatcatccaagagaatagagtccttggtcctggtggcttagatgctatggtgctgaattttgaagattttgctgattcttcagggtcatccatgaagcatgaactgggtcaagacaatatcgagatattagatacgtctggtagtgaagtcagtaagggttatgtgcctgaaatatccaacactgatggatcttttctattgcaagacaatgccatcagcaaccagacactgttgggttcttccaatatcttagaggctggtattttgaatagtgtggtccaaaatgggagtgcagcagatgcaatattcatggaaacaaaccttgagaaacaagatgaagttccatctggtgaatcaattgagtttgacttgaatagttctgaagagcaagctcatttatttgctcaggtttctgattcagatgaaaacattgcactagacagtcaggcggatgcacaggacgtgatggccagtagtgctaccaatagagctattcttcccttagaagcttctgctgtttatgatgctgcacttttaagagatcatgagacattgcctaatgataatcatgatgcatcaactgatagttccgtggatgatgcaagtcacgttgagacgaccaatggtgttcaagcaaagcaagcttctttacatgagcatgatgcatcaactggaaatgtatcgattgaaaatgctcagagcttagatggtcagtttagtaatatatctactgatccaataaatggtgctaaattggaggctgaagttgcaaccaagacagttgaagcgtctaaagtacacaggctgcaagatgggtttgagcaaccattggctgatgctagctgtgatgggcaagaaaactctgacagccctgtttctcatccagcattagatacaaaggggctgttgcacacagaagatcagcagagtgtggtacaggtagatgaaagtgaattcaagaactcaacatctgggatcacaaaggaagatttcaagcatgagcaaggaattagcactgcaacagtgatcagcaggcatgcactttgcctcctaactttgcgttgcatgcttactgtttataatttccttcacacgtcacaaagggcagcagtatattaggagaactttgaaagctcagcagaagaaagatgacaatctattctggcttgtgcttagggcatttgttgttgctatatcgaaaatctgggcaaaatgaacagtgcagaaaggcagcgtatgtggaactgaagatcgagtgaatccttcctagtggaaaacgagaaaccggtccatgaagttccatttctcccatgtgaatatagatgcgctacttttgtgccgcagtttaagtaatcttttttggagacagctggtctggtttgtagtcgcttcccactgtaggtgaaagaccatgttgggccgtgttcaacatttcacccatatagtcactccaaaacattgttttgcactttaaattgtactgatcgtagagtggattttgaatatgggtacgaggatgggtaagctgacggaaatagcttaaagtttagttatcctagtctggtgttcatgtgttagatgtttggtacaatggatgtcatgtgtcttttggtaaaaggaggatggatctcttttaatgctctatgaaatttgcagatttgttcattggatccacaaataaactgccgttggtttgttcttgttgaggtgaatttaggtttggatttgcctccccggttggagcgtaagcattgtttggttt

SEQ ID NO: 97213 - DNA, 2336 bp, Zea Mays
atgcgccggcgaaaacctaggagtttgatgaaagttgaaagcgaccacttgagatttgaaagcggcttgcccgggtgccggccccgggccccgtccaacccccccccccccccccatcttgtcgttttttgcgcgccgtcgcctccctttctcccccaaaaccatccatcgtctctgcccgccatcccatttcccaatcgcctccaaccccccacaccccgcccgccgcaaacccctccatttccgccgcatttccctcgctgtcccagctcaccggtcggtcgggtgctggggctcgcggctcctctcttcctggggcctggaagggacggggaaggatgcaggccgcgaccaggagcgtctcttgcatcggcgcgcagccgtccgtcctcatccggtgcggcggtggtgcgctgtccgcttcgcccggcggcctcggaggagggggatgcagggtccgggtcgtcgccgtgctgcggtgctgcgcacaggagaagcgtccgcctcgggtgcggaaatccaaggaggagagaagggagatggtggagtccttcatcaacagctatcgagcttcaaacgaaggaaaattcccatcggttaaccttacacataaggaagttggagggtcatattatatagttcgtgaaatcgtgagggatatcatccaagagaatagagtccttggtcctggtggcttagatgctatggtgctgaattttgaagattttgctgattcttcagggtcatccatgaagcatgaactgggtcaagacaatatcgagatattagatacgtctggtagtgaagtcagtaagggttatgtgcctgaaatatccaacactgatggatcttttctattgcaagacaatgccatcagcaaccagacactgttgggttcttccaatatcttagaggctggtattttgaatagtgtggtccaaaatgggagtgcagcagatgcaatattcatggaaacaaaccttgagaaacaagatgaagttccatctggtgaatcaattgagtttgacttgaatagttctgaagagcaagctcatttatttgctcaggtttctgattcagatgaaaacattgcactagacagtcaggcggatgcacaggacgtgatggccagtagtgctaccaatagagctattcttcccttagaagcttctgctgtttatgatgctgcacttttaagagatcatgagacattgcctaatgataatcatgatgcatcaactgatagttccgtggatgatgcaagtcacgttgagacgaccaatggtgttcaagcaaagcaagcttctttacatgagcatgatgcatcaactggaaatgtatcgattgaaaatgctcagagcttagatggtcagtttagtaatatatctactgatccaataaatggtgctaaattggaggctgaagttgcaaccaagacagttgaagcgtctaaagtacacaggctgcaagatgggtttgagcaaccattggctgatgctagctgtgatgggcaagaaaactctgacagccctgtttctcatccagcattagatacaaaggggctgttgcacacagaagatcagcagagtgtggtacaggtagatgaaagtgaattcaagaactcaacatctgggatcacaaaggaagatttcaagcatgagcaaggaattagcactgcaacagtgatcagcaggagaactttgaaagctcagcagaagaaagatgacaatctattctggcttgtgcttagggcatttgttgttgctatatcgaaaatctgggcaaaatgaacagtgcagaaaggcagcgtatgtggaactgaagatcgagtgaatccttcctagtggaaaacgagaaaccggtccatgaagttccatttctcccatgtgaatatagatgcgctacttttgtgccgcagtttaagtaatcttttttggagacagctggtctggtttgtagtcgcttcccactgtaggtgaaagaccatgttgggccgtgttcaacatttcacccatatagtcactccaaaacattgttttgcactttaaattgtactgatcgtagagtggattttgaatatgggtacgaggatgggtaagctgacggaaatagcttaaagtttagttatcctagtctggtgttcatgtgttagatgtttggtacaatggatgtcatgtgtcttttggtaaaaggaggatggatctcttttaatgctctatgaaatttgcagatttgttcattggatccacaaataaactgccgttggtttgttcttgttgaggtgaatttaggtttggatttgcctccccggttggagcgtaagcattgtttggttt

SEQ ID NO: 97214 - DNA, 491 bp, Zea Mays
tacaaaacaccccagatacagcggcgttacctgcttcttttacatccaaggtaatctaaaacctcctcggtttccctaccctagcagattctaatggaaagcaaatgggcttccggcaacaaagtctgttacacgctaggctagcgaaacatggcgcaacagatgacgttgcgctcggtatctcgtccagtcagcagcaaaggctgagaggcagcgcgtttccccacatgaacagcaggtggtcactgctgtgcttcagcggatgtcaaacctcaaggggagaactctacctgccataatcacggcaatgggttgagcgagaacaggtcctaagctgcacatggggaaaaaggtttcatcgcttccggccctttgatcttgaagcaatcaagcggatggcctgcttccccagctccacgttctcagacctgccattgtctaactgaatacacagtgtgccacccatgacattcgacaccatcccttgatgc

SEQ ID NO: 97215 - DNA, 1788 bp, Zea Mays
cccgcttaaaaaaccgtcctccacagcccgacgaattttttagggcctcactctctcattcggccggcgaggaagccttggcctgccgaccaaaccatgcttgcgcgccgactcgcggcccccgacggcggtaggctgttctctgcggcgtcctccgcctccgcccgaggcggtcacgcgggtggcgacacactagggaagcgcctgctgaagctcatctacccgaagcggagcgcggtggtggtgctgcagcggtgggcggacgaaggccgcaccgtgcagaagtaccagctcaaccgcgtcgtcagggagcttcggaagtacggtcgcttcaagcacgccctggagatatgcgagtggatgcggacccagccggagatgcggctgcttccgggggatcacgcggtgcaccttgacctcgtcgccaaggtcaggggactcgccagtgccaccaagttcttcgaggacatgccggagcgcgccaaggggccgtccacctgcaacgcgctgctgcacgcgtacgtacagaatggcgcaagagagaaggccgaggccatgctggcggagatggcccgtgttgggtacctcacctgtgccctgcccttcaaccacatgatgtcgctctacatggcgactggtgagctcgagcgggtgccagaaatgatcaaggagctaaggaggtacacactccccgacctcgttacctacaacatatggctgacatactgctccaaaaaggacagcgtgaagagtgccgaaaaggtctttggtctgatgaaggatgactgcgtggttcctgattggatgaccttcagcttgctcggtagcatttacatcaacgccggactccatgtggaaggtcggaacgcgttggtggagatggagaagagggcctccaggaaggagcgagctgcttactcatcgctcctcaccctgtatgcaagcttgtcagatagaggtaacttggacagagtatggaataagatgagaggaaccttcaggaagttcagtgacacagagtacaagtgcatgctcacttccctcttgaggtttgacgacatagcagcagcagaaagcatttttagtgagtgggaatcaacatctggaacacgtgattcaaggatcccaaacacgatcctttcatattacatcaagaatggcatgataaaaaaggcagagagctttcttgaccacattgtggagaaaggagtcaagcccagctatagcacatgggaggcattcgtctggggttatctcggtgacaagacggacaaagtccttgagtgcatgaagaaagccctgtcatgcttggagaaatgggagccgaaccatgagctcgctaccgcgatcttttctcagatcgagaagacaggtgacattgaagctgcagagaagctcctggtcatattccgggatgcagagtatgttaccactgagatgtacaactcagtcttgcgcacttatgcagaggccaagctcatgcctctgatagttgacgaacgcatggagcaggataaggtggccatggatgtggaaaccaagagattgttgaggttgaccagcaaatatccaatcggtgaggtttcagtatcgatgtcttgaggtgtgccaacaatagaagggtgtttcaggatgcaatgtgtactagcccttacgttttcatgcactttagttctgaagtacaatgcaatgcaaataacaaacatttagttttgaagtgcaatacagatggttgtgattttttttgcatacttatctaacttgttggactgtattgtctctatctat

SEQ ID NO: 97216 - DNA, 201 bp, Zea Mays
gctttgcagggaacaaaaatggtctacaagcatttggccacactatactttgtttttgtctttgatatctctgagaatgagcttgccatgctcgacctcgtacaagtgtttgttgaaacattggacaaatgcttcaagaatgtatgcgagcttgacatcgtatttaacttcaacaaggtaccatatgtccatatgatccta

SEQ ID NO: 97217 - DNA, 2087 bp, Zea Mays
cttgctttattcaaatgcacgaggcgtgcgtgcgtgcggctaaatatataggagcagcagcttcatcattctaataatcggtgtcaactacggttgatggtgtttgtacagggattcgcggccccgtaccgtacgccaaagcacaatccatgggatattccccgcaaatttcggttttttttaactagaccgactggatcagttgaagcacaaggaggaaacagttgctagcccaaacccaaacctagagctcgttattagggggagttgttgcatcttctgtgtgactgtgtgtatatatatctccggccgtgggcggtggcgagttctgttgagggaggagaagggggtggccagagaaaacaggggcagaggaagcagagtagtagagccaaggcgagcgtatcaatgatggggcctctgcctctccgccgccgcgtgggcgtcctcctgttcctggccctcgtgctcctgggcggcggcggcggcgcggacgccggcacgacgagctcgtacaggcggaagctggaggcgacggtggagatgccgctggacgccgacgtgttccgcgtcccgccggggtacaatgcgccgcagcaggtgcacatcacgctgggcgaccaggagggcacggccatgatcgtgtcgtgggtgacggccagcgagccgggcaacagcaccgtcgcgtacggcgaggacccggcgaggatggagcgccgcgccgacggcgcccacacgcgctacgactacttcaactacacctccggcttcatccaccactgcaccctcagaaacctcaagcacgccaccaagtactactacgccatggggtttggccacacggtcaggaccttctggttcaccacgccgcccaagccgggccctgatgtgcccttcaagttcggcctcatcggcgaccttgggcagacgttcgactccaacatcacgctgtcgcactacgagtccaacggcggcgacgccgtgctgtacgtgggcgacctctcgtacgccgacaaccacccgctccacgacaacaaccggtgggacacgtgggcgcggttcgtggagcgcagcgtggcgtaccagccgtgggtctggacggcgggcaaccacgagctggacttcgcgccggagctgggcgagaccacgccgttcaagcccttcgcgcaccggtacccgacgccgtaccgcgccgccgggagcacggagcccttctggtactcggtcaaggtcgcctccgcgcacgtggtcgtgctggcctcctactccgcctacggcaagtacacgccgcagtgggcgtggctgcaggcggagctggcgcgcgtggaccggaagaccacgccgtggctcgtcgtgctcacgcactcgccctggtacaacagcaacaactaccactacatggagggggagacgatgcgggtgcagttcgagcgctggctcgtcgacgccaaggtcgacctcgtgctcgccggccacgtccactcgtacgagcgcagccaccgcgtgtccaacgtcgcctacgacatcgtcaacggcaagtccacgcccgtccggagcgccgacgcgccggtctacgtcaccatcggcgacggcggcaacatcgagggcatcgccgacaacttcacgcgcccgcagccgggctactccgccttccgggaggccagcttcggccacgccacgctagacatcaagaaccggacgcacgcctactactcgtggcaccgcaaccatgacggcgccaaggtcgtcgctgacggcgtctggttcaccaacaggtactggatgcccaccgacgacgacacaaactgacgatcaccgccgcagagggaacaaattactgatagatcagcgtagcacgttcctgagctagccccgccccctttatgttctccaattcagtaatgcaatgcgtttttatgattactgatgaatgaataagaaaaatggctacgactgcccgccggtcatcccaaccagactctcgaccgcagaaacaaccaggattatgtatggtccagtgcaaataattataacattgaccaaatgcatactaaggatgtgtttgtttaagcaaaaaagaataaaaa

SEQ ID NO: 97218 - DNA, 2712 bp, Zea Mays
atggcagaaggtttgatactagttgtgcttcaaaaaatcgcaaccaccttaggaggagctgcattgagtgtaattaagtcaaaattagggaaaggagccaacattttacttgaagcagagaacagcatgaaagaaattgagagtgagttcgaaataatgcaagcatacataagtcaagcagacccgtacagtgaaagtaacaaaattctgaaaccatggttgaagaatgtaagaaaaatagcttctgaagtcgaggacatcattgatgaatatgcctttctacttggaaaactggacaacgcaggatacttggcgaagaagttccaccattcgagatacatcactgcatggagtgacatttcttctcagttgaagcaagtgcaagcacgcctacaaaatttgacagttctgaaagacagatatggcatcacagtagttggacctggtggtggatcatcaagccataataacagtcgtaagaattacctgtctgaatcttcctacctgaatgatgatggtgatggtgtaatggtaggcaacgaagatgaagtaaagaagttgacagaatgcatagatggtgctggtgcagatcgtgcagttatctccatctggggaatgggcggttcaggaaaaacaatccttgcaaggggcatctatagaaaacgagaagttagaaagaacttccagtgctgtgcctggataacagtatcactgaattatcaagtcgaagaccttttgaacaagctcataaaggaactccacatccaagatgtgcctgatgcaactgacagtacacatttggttgctaggatccagaatcatctcaaggacaagaggtaccttgttgttttggatgacatgtggaacagggagtcttggttattctttgatcgagtatttgtcaagaatctttatggaagtagagtcatcgttaccactcgaacagaagctgttgcgtcaatagctgagctgaaccatactataagaattggccttctttcacagggggagtcatggaagctcttcggcagaaaggcattctcaaagataggcaaggaagaaccgacctgccctcagggccttgttcaatgggcaaacaaaatcctcgagagatgccaaggtctgccacttgctattgtagccatagggagccttctgtcatacagagaaatggaggaacaagagtggagactcttctacaatcaacttaattggcaactgacaaataacccagaactcaacttcgtatcgagcgtcctaaagctaagcttgaatgatcttccaagccacttgaggaattgcttcctgtactgtggcttgttccccaaagactatcaaatacgtcggaagtgtctaatcagactgtgggtagctgaaggttttgtggaagaccggggaacagagattacactggaagaagtggccgaggagtacctcaaggaactcacacggcgttcactgtttcaagtgatggaaaggaatgaattttcacggccaagaagattccaggtgcacgatcttgttagagagatgacactggccatatcaagaaatgagaggtttggtcatgtaagtgaccagccagatgtaacagacattggcgatgtaggaaaacgtgtatcagtgcacagtgggggccaaatctatcagccaggtccgtcttcgcagcatctgcgttcatttttgttgtttgacaaacacgtgccgctttcatggatcagcatcgcttcatcggacttcaaactgttaagagtcctgtgcctcaggtactccctccttgaggacattccagatgccatgacttgtttgttcaatctgcaccatctagactgctctcgtactaaagtaaggaaggtaccaagatcagtggcaaggctgaagaaactagagacattgcatctcaggttcgcccgtgtgagggagttgccgtctgaaataacaatgctcacaaacctccgccacttgtctgtgagtgacgacttgtatggcacatcaatttgtggtactatccgcagtctcaagcacctgcaaactcttcgagaggtgaaagtcaacaaagatttggctaaaagtcttggttacctgacacaactaagaagcttaggaattactggagtcatacaaagccacaatgcagatctttgggcttctatcaggaagatgactgtccttaacaaactagccgtcgcaactcctggcgagagtaacgaagtgcttagttttgaagagctgaggccgctcaagaacctggagaagttctacttgaccggcaagttggcagaagggaagctttttccagtatctaatggttttcagaaacttaaggtcctaacaatgcgctggtctaagctaacacacgaccccctaagttccttatgtcaaatggaaaatctcgtctaccttaatctttactgtgcatacgatggggaatgcttgatcttctcttctgggtggtttccaaagctcaagcaactctacctaggcaagcttgagagactgaggtcaattcaaataagtgatggcgccattgaaaatttaacatacctggaacttcatgagctgtggaatctaaaaagtgtccctgaaggccttgtataccttaggtctcttcagcacttgtatgcacgaaagatgcctgcagatttcgtggaggaactggagggaagttgccagggctttgttcggcacattgccaacattgaatgtatgtga

SEQ ID NO: 97219 - DNA, 528 bp, Zea Mays
atatgtgtgcaggcccagaacatctgcaatttagtttttgataagtcctccaatatttggcagtgctctttatattagttctggatgtcagggcaatgaacaaacacgttgagtatgatagtgatgctaaaattattgcagtcggttgaagccctaccgtgtggcaaccattgatccatgcccaaaatgtgcctgccactggtgttcctgtcccaacactcgatcaacatgcaggtagaaatgaagcctagagccaaacgatgcgagaggagtatggtctagacacgagccagttcacataaaccctttagacccaagcaggtaccagcagaatggcacgccagctaaagaaaggagtcaatgcactgtaatgcgaagaattcttcatgacatcctatgagataatggttttcttgaatgggctagctcaagttgtgcagtttggtgtcatggtattgttcaaacctcgcagtggtgtgtggaatagaagaatcccaattcccaaccatattatttgtcacgcttggt

SEQ ID NO: 97220 - DNA, 791 bp, Zea Mays
ggcgggtagatcacatacagaatgagcggcacgagcacgagcgacagcagccccggcacaatggcggccttggcccagagcgtccacccgatcccctcgccgatagtggcagctgtgaggttggccgagagcgggttggccgccatcgcagtgaggaacatggctgacgagacgacggaggtctgaaagcacgtgagcatgagccaggctccgagccggcgctccgtgccgtcgccggcgcgcgagccgcatgcctcacagagagacttgacgagcggtaggaagatgccgccagcgcgcgccgagacggaggggatggcgggggcgaggagcgcctcggcgaagacgagcgagtagccgaggccgagggaggaggacccgaaggcggcgacgaaggcgtaggcgacgcgggagccgaggccggtcttgatgaaccccctcgcgaagaagaaggcgagcgcgatgagccaggggatcgggtcgccgaaggccgagaaggccgcggcgaacgtgagcgtgcggctgagcacggcggcgccgaggccgaggagggcgaccgcgccgaggggcagcggctgggtgatgatgccgacgatggtggagaggaagatggctaggagctgccacgcgttgcggggcacgccggcggggggcgggatgagccagatgaggacgccagtcgcgatggaggccaggagcggcttgatggccgcgccctgcagcgcgggcttcttcggcggggcggccgccgcggcggcggaggcggaggcgggtacgggggtgagaccgcg

SEQ ID NO: 97221 - DNA, 466 bp, Zea Mays
gaagctcaaacgcgtcggcgtacgaagcttgggaattatacctggagcttcgccatcgaccaaggaatacgggcgtggcatcatcggccaagaactcggcctgtacgggccggaattcgtcgttggtgctctcctccatcgcagatccgccttccgtcgtgagccgggtagaacgccgtcatggggtgggtatcttctctggttgccgtcttcgctgtacgtagggccgttcaactagaggttagggcgaggtagggccgtagggtcgaccccgggggggctcctgtcatgtccgccgttgtgaggggtttgggcggcgtgcagttcgcattctggctgggggaggaagataagctcctagccgttgatcgtctggcgtagggctgagattagaagggcctcataccgattcgctcattatatcgcggccatagattgggtgttgatcggtcctgatgaactcctg

SEQ ID NO: 97222 - DNA, 1475 bp, Zea Mays
gaggctccaagctgtgccgacaaagtgatgaatcacccaaacaaccacactgacatctcatcttgatccatccagctttgcctcgatcgccggccggtagccatgtcccccacggaagaagccgctggtggtggtggcgacgactatgaccgcttgagcgagctgaaggcgttcgacgacagcaaggccggcgtcaagggcctcgtggacgctggcgtcacgaccatccctgccatcttccgcggccatctccttcaggaagggccgaaggtatcgtcctctagcagtagcagcagtactagtcttagcattatcccggtcatcgacctctcggcggcggacgcagtcgcacgggaggaggtggtcgcccagttgaaggctgcagccgagacggtggggttcttccagctggtgaaccacggcgttcccagcgagctcctgtgcgagatgctgccgtcggtgaggcggttcaacgaggagccccacgaggtgaagcggccctactacacgcgggacgcacgtcgcaaggtgcggttcaactccaacttcgatctgttccagtcgccggcggccaactggcgcgacacgctcttctgcgaggcagcgccggagccgccgcgggcggaggagctgccggtcgccgtcaggcacgtgatgctggagtacggcggcgcggtgcgggaggtggcggcgcgcgtgctggggctgctctcggaggccctggggctgagccccgggcacctcgcagggatggggtgcgcggagggcctcagcctggtgtgcaactactacccgccgtgcccggaaccggacctcaccctgggctgcagcaggcactcggaccccagcttcctgaccgtgctgctgcaggactcgcatgcgcagggcggcctgcaggcgctcctcgcatccaggtggctggacgtgcctccggtggccggcgcgctcctggtgaacgtcggagaccttctccagctggtcagcaacgggcggttcaagagcgtggagcaccgggtggtggctaaccggagcagggacacggcgagagtgtcagtggcgtgcttctgcaacgcggacatcgcgagatccacgaggctgtatggacccatcgcggagctcatcgccgcggacgacagcgacggcgcgggaagggcgctgtacaggaacgtgacggtcccggagttcctagcgcactacgacaagaaaggcctcgacggtcgcccggcgctccaccgcttccagctgcttcaataattttacatcacatcagtcctgactctggtgatatcatgtcagtatgtcactgtgggctactccggtactctaatacagttatggatggatcagatcaatactaatctctggtaattttttttaaggatctagaggagtcgaagcccctatagcttaaattaagaacttaaagaaagagttaaggtcttaaggatatacagattcaagaaacaaaaaaaaaa

SEQ ID NO: 97223 - DNA, 1364 bp, Zea Mays
cccaaacaaccacactgacatctcatcttgatccatccagctttgcctcgatcgccggccggtagccatgtcccccacggaagaagccgctggtggtggtggcgacgactatgaccgcttgagcgagctgaaggcgttcgacgacagcaaggccggcgtcaagggcctcgtggacgctggcgtcacgaccatccctgccatcttccgcggccatctccttcaggaagggccgaagtcgcacgggaggaggtggtcgcccagttgaaggctgcagccgagacggtggggttcttccagctggtgaaccacggcgttcccagcgagctcctgtgcgagatgctgccgtcggtgaggcggttcaacgaggagccccacgaggtgaagcggccctactacacgcgggacgcacgtcgcaaggtgcggttcaactccaacttcgatctgttccagtcgccggcggccaactggcgcgacacgctcttctgcgaggcagcgccggagccgccgcgggcggaggagctgccggtcgccgtcaggcacgtgatgctggagtacggcggcgcggtgcgggaggtggcggcgcgcgtgctggggctgctctcggaggccctggggctgagccccgggcacctcgcagggatggggtgcgcggagggcctcagcctggtgtgcaactactacccgccgtgcccggaaccggacctcaccctgggctgcagcaggcactcggaccccagcttcctgaccgtgctgctgcaggactcgcatgcgcagggcggcctgcaggcgctcctcgcatccaggtggctggacgtgcctccggtggccggcgcgctcctggtgaacgtcggagaccttctccagctggtcagcaacgggcggttcaagagcgtggagcaccgggtggtggctaaccggagcagggacacggcgagagtgtcagtggcgtgcttctgcaacgcggacatcgcgagatccacgaggctgtatggacccatcgcggagctcatcgccgcggacgacagcgacggcgcgggaagggcgctgtacaggaacgtgacggtcccggagttcctagcgcactacgacaagaaaggcctcgacggtcgcccggcgctccaccgcttccagctgcttcaataattttacatcacatcagtcctgactctggtgatatcatgtcagtatgtcactgtgggctactccggtactctaatacagttatggatggatcagatcaatactaatctctggtaattttttttaaggatctagaggagtcgaagcccctatagcttaaattaagaacttaaagaaagagttaaggtcttaaggatatacagattcaagaaacaaaaaaaaaa

SEQ ID NO: 97224 - DNA, 934 bp, Zea Mays
cacaaacaacaaatcactccgttgagccttcaccatcacctccctctctggctctctctctctctcacgcatacgaacacactctctactagtactaacctctcactaatctatatctagcagcaagcacacaccgtaacatcaaagccaacgacgacgcggggccggccgcccatggccttcacgtccttattgggcagcgacgcggagcggaaggtggcggtggcggaggtggcgctgcgggcggtgctgtgcgggctaggcgcgctggcggcggcgctggtggcgacggacacgcagacgcgcaccttcttctccctgcagaagaaggcgacctacacggacatgaaggccatggtgctcctggtggccgccgcggccacggccgccggctacagcctgctgcaggcggcgcgctgctgctgctgcgtcgccctgctgcgcacgtccatccgcccccgcgcccgcctgctgctggcctggtgcgtcttcgcgtgcgaccaggcgctggcgtacgcgctgctggccgccgtcgccgccgcgctgcaggcctccgtcgtcgccaagcaaggcctgccccagctgcagtggatggccatctgcgccctctacggcgccttctgcaggcaggcaggcgccggcgtcgcctgcgccgtcgccgccgccgtcgacgccgccctgctcgccttcctttccgccttcaacctcttcaggctctacggcgccaaggcctagcgcccagcccaccaccacgacgtagctttgttgcattaattagcacagcagaggtgccttccatctgaccatcctctcttgcaaacaccgtaacaccgcgtagtagagtagagattatggagagacaattaataaggtgcgttcaagctttattaacatatataaacgcattactcatcaataaattctacacgcatgt

SEQ ID NO: 97225 - DNA, 668 bp, Zea Mays
cgacggctatccaggctccagtcgtccccggattagttgtactgtacattgttcctgcgaagacactgggtcgtccgggtcaatcggcagcttgaaccagccatggcggcgcaccggccgaacgccgcggcgccgctgctcgccaagctcgacgccaccgccacgccgccggcgaagcgcaacaagtaccccttcttctgcgccgtgctcgcatccatgacctccgtgctcatgggctacaacgtcgcggtgacgagcggcgcgcagatcttcatggcggaggacctcgggatgagcgacgcgcagatcgaggtgctctcgggggtcatcaacatatactcgctcgtcggcgcgctgctggcaggctggacctccgaccgtctcggccggcgcctcaccatcgtcctcgccaacgccttcttcctcgtcggcccgctcgccatggcgcttgccggcgggtacaccttgctcatggtgggccgcttcatcgccggcgtcggcgtcgggtacgcgctcgtcatcgcgccagtctacgctgccgagatcgcgccggcgtcatcccgcgggctcctcagctcacttcctgaggtaacctctgctgtgtggcttggtgcgctgttttgtgcagttcatcagattttgcggcgcttgaattagtaatcttcgga

SEQ ID NO: 97226 - DNA, 1913 bp, Zea Mays
cgacggctatccaggctccagtcgtccccggattagttgtactgtacattgttcctgcgaagacactgggtcgtccgggtcaatcggcagcttgaaccagccatggcggcgcaccggccgaacgccgcggcgccgctgctcgccaagctcgacgccaccgccacgccgccggcgaagcgcaacaagtaccccttcttctgcgccgtgctcgcatccatgacctccgtgctcatgggctacaacgtcgcggtgacgagcggcgcgcagatcttcatggcggaggacctcgggatgagcgacgcgcagatcgaggtgctctcgggggtcatcaacatatactcgctcgtcggcgcgctgctggcaggctggacctccgaccgtctcggccggcgcctcaccatcgtcctcgccaacgccttcttcctcgtcggcccgctcgccatggcgcttgccggcgggtacaccttgctcatggtgggccgcttcatcgccggcgtcggcgtcgggtacgcgctcgtcatcgcgccagtctacgctgccgagatcgcgccggcgtcatcccgcgggctcctcagctcacttcctgagatttttatcaacactggggtgatgctgagttacgtgtcgaatctcgccttctcggggctgcccgtgcacctgtcgtggcgggtgatgttcgcggcgggcgtggtgcccaccgtgttcatggcggccggggtgttcaccatgccggagtcgccgcggtggctggttatgaagggccgggtcgccgaggccaaggccgtgctcgacaagacgtcggacacgcccgctgaggccgagcagcggctgctcgagatcgaggacgtcgtgatggacagcagcggcgacagcggcgcgtggaaggaggtggcgacgaaggctggcgtccagcgcgtgttggcaaccgtggtgacgctgcagttcttccagcaggcgtcaggcatcgactcggtggtgctgtacggcccgcgcgttctcgccatggctggtgtcacgtccaacagcttgctcctgagcctcaacatcctcttcggcgttgccaaggttggctccatcctcatcgccatggcgctagccgaccgcgtcgggcggcgcccactcctgctggtcagcactagcggcatgacggtggcgctgctcgtcctaggctccctgttcgcggtgtttgcgggagccaaggataacgctgcggtggctgcggtgagtgtggtggccgtcatggcgttcgtgatggccttctccgtcggcttgggccctctggcgtgggtgtacagctccgagatactgccgctccgatttcgcgggcagggtgccgggctcggcaccgccatgaaccggatcatgaccggcgcgatcaccatgaccttcatctcgctctaccagggcatcaccatggccggcgcgttctacctatacgccgccatcgccgccgcgtcgttcgtgtttatgtacgcctgcctgccggagaccaggggccggagcctcgaggacatggaagagctcttccacaccaagtgatttcgtatgtgctgatccaaccaccatttggttcaatttctcgattcagtgggcaatgcagattttgccattgttggagctggttttgagcttggtcgttatcatcatggcacatgcgtatacaattgcaagattatattgaaatcgattgattgagccggttggcgtcgacatgggaacacgtgcatatatagaattgaagcattgtacacatactgcataatcatggccatttattttagattcaacatttcttttatatctatttcttcgtacacagaacaaggtgaaagtggtggaaggtagtgatggaggatgtttttttacaaaatatacaaggcaacaagagaggtgtgaaaagacgtcaaatatgt

SEQ ID NO: 97227 - DNA, 103 bp, Zea Mays
agcatcttggcgtggaaggaggcggatatcgcccgcgtcaacgagcttaccatttactactgaactcgctttctttgccgactgtcttatacactcgacaaag

SEQ ID NO: 97228 - DNA, 1128 bp, Zea Mays
gcaggctagcaggtacaggtgacttgatgaataaaattaccgtgtagctacaggtatagataaaattctatagccacgatcttgtatgagtaatttgatgggtaatttttttaacgggtaatgaatatatgataatactagtggatagatatataccgttgccatctataaagcacgccgtgccgcgcgcgactcacgttgcgtcggctggcgcaggccacgatttcattggccgccaagcgtcccggagcgcgcctcgtgttgccttgtgcttatatagctgtccatgcacatctctctctgtagggcgctaatttcagccgtgttctcttctctctcgttcgagagatttatactacgtgtataaaaagcatcgtccaacagaggtacctttgctgcgcctctcgatctctagctatagcccgtagctagctagccctcccggcgaatcggccgatcagccggtcgggaacgatgaagaaagatgatgacctcgagtcggcgctgctggccgccaaagagcccgcgccggcgcccgccaagggctacgcgtacgcgctcacctgcgcgctcctggcttccctcacctccatcatctacggctacagtaagtcacgttgctatccacctcgcaccatagcaactaatgcgcgtgatctatatcgccgcgcgctcgtcttcacccgtgccgcgcgtgcatggccatggagggccatgaaaaagcggaagagacatgcatgcatcatcaagccgtcgtcagcttgcatctgaattcattgtcggcgttcgtgtgcgcgcgcttacagaccgcggggtgatgagcggggcgcagaagttcgtgcaggccgacctcggcgtcacggacgcgcagctggaggtgctcatcggcgccaccagcgtctactccctcgtcggctcgctggcggcgggctgggcgtgcgaccgcgcgggccggcgccgcaccatcgcgctgtcggcggccttgttcctcgccggctcagccgtcaccgccgccgccgacggctacgccgcgctcatggcgggccagttcgtcgccggcgtggcctgcggattcggcctcgtcgtcgctcccgtctacatcgcggagatctcgccggccaacgctcg

SEQ ID NO: 97229 - DNA, 2206 bp, Zea Mays
gcaggctagcaggtacaggtgacttgatgaataaaattaccgtgtagctacaggtatagataaaattctatagccacgatcttgtatgagtaatttgatgggtaatttttttaacgggtaatgaatatatgataatactagtggatagatatataccgttgccatctataaagcacgccgtgccgcgcgcgactcacgttgcgtcggctggcgcaggccacgatttcattggccgccaagcgtcccggagcgcgcctcgtgttgccttgtgcttatatagctgtccatgcacatctctctctgtagggcgctaatttcagccgtgttctcttctctctcgttcgagagatttatactacgtgtataaaaagcatcgtccaacagaggtacctttgctgcgcctctcgatctctagctatagcccgtagctagctagccctcccggcgaatcggccgatcagccggtcgggaacgatgaagaaagatgatgacctcgagtcggcgctgctggccgccaaagagcccgcgccggcgcccgccaagggctacgcgtacgcgctcacctgcgcgctcctggcttccctcacctccatcatctacggctacaaccgcggggtgatgagcggggcgcagaagttcgtgcaggccgacctcggcgtcacggacgcgcagctggaggtgctcatcggcgccaccagcgtctactccctcgtcggctcgctggcggcgggctgggcgtgcgaccgcgcgggccggcgccgcaccatcgcgctgtcggcggccttgttcctcgccggctcagccgtcaccgccgccgccgacggctacgccgcgctcatggcgggccagttcgtcgccggcgtggcctgcggattcggcctcgtcgtcgctcccgtctacatcgcggagatctcgccggccaacgctcggggcttcctctcctccatccccgagatcgccggcaactcgggcatcctgctgagctacatcgccgacttcgcgctcgccggcctcccgacgccactcaactggcgcctgatgatcggcatcggcgccgtccctcctctattcctagcggccgcggccgcgcttgccatgccggagaccccgcgctggctcgtcctccacggccaccgcgacgaggcgcgccgcgtgctggagcgcacggtgggggacgcggaccgccggctccaggagatcttgacgtccgtgcaggaggccacgaagcaggcgggctccggcggcggcgacgcgccgtcgtcggcgagcgtgcggcgcgagatcctgctccggccgacgcccgccgtccgccgcgtgatgctggccatcctggggctgcaggtgttccagcaggcgtgcggcgtggcggccatggtgctgtacgccccgcgcgtgttcagccacgtcgggatcacctccgagcgcgacgtgctcggcgccaccgtcctcctcggcgccgccaagacggtggcgatcgtcgtccctctgttcctcgccgacagcctcggccgccggcccatgctgctcaccagcgcgggcggcatggccgcgtcgcttctggtcctcggcctgtccatacgcgcgacgtcggccgcgacgtgcgtcgccgccgccgtggcgttcatggcgaccttctcgctggggttcggacccgtgatctggatgtacgggtcggagatcctgccgctgcggctgcgcgcgcaggggactggcgtcgggacggcggtcaaccgggtgatgagcgccatcgtggggatgaccttcatcccgatgtacgaggcggtgggcatggccgggaccttctacatcttcgcggcgatgtccgcggcggcgtgggtgttcgtctacgcgtgcctgcctgagaccaaggggaggagcctcgaggagatggaggcactcttcgacgccggtgctgcgccgtcgccacgggcggcgttgtcgtgacgttccagacaccgagtacacagatgcatcatgtccacgcaaggaacaagcacgtgatgacatgaagttgtcaggtgtgcagtgtagcaaggttagacaggggctagtgtatttgtaagcagccaagatgccgtcgacgaatagttttgtactcttgtcatttgaatgggttgattatccggtagctgtttctagcaacgcgcgcgtcccttaaatttcattctctaaatcaatatttaccgtcctttacacttacaatatc

SEQ ID NO: 97230 - DNA, 1775 bp, Zea Mays
ataattcacattcagttttttcatttttaaaacgagtgtgacatgaatgctctagatttagcacacctagtacttgtttgagcacgtcgcctaataaaattccccattccaatacacagatctcgcacccgtaagtggcgacgaatctcgcggtgcggaggcgcgacagaggcggtgtcgactccgacggactcgcagctaccggtggagacgccccaccggcgcactcctccaacgttcatagtttaagggcttgatttggataattagtcatcaacagaagtgataaaaaatggtggttcttgcagcatcaatcgtttcaaagtcgggaaaagcacttgtttcaagacagtttgttgacatgtctcgcataagaattgaaggattacttgctgcgttcccaaaactggttggaactgggaagcagcacacttatgtcgaaactgaaaatgtgcgatatgtttatcaacctattgaaggtttatatcttctacttatcacaaacaagcagagcaatattcttgaagatctggacactttgaggctcctctccaagctcgtgcctgaatactccccttcattggatgaggagggtatttgtaaaacagcatttgagattatatttgctttcgatgaagccatatctcttgggaacaaggaaaatgtaacagtgcaacaagtcaaacaatattgtgagatggagagccatgaagagaaggcacacaagctgatgatgcaaaccaaaatcaatgaaaccaaggatctcatgaagaagagggctaatgagcttgacaaaatgaggatggaaagaggcaaacttgacaaaggaggatactcatcaatatctggtccacgcgtgattgaaaaaactttcagtgacatgagcatcagtggttctggattaggtggactgagcactgacatggactcatttgctagcaagcccaaaggccgtccatctacagcagctactgcacctggtaaaggttttggtatgaaattaggcaagacacagaagacaaatcaattccttgaatctttgaaagccgaaggagaagtcattttggaggatgtacaaccaagtgcagtttctacaagatcatctgctcttccaagtgaccctgtcacagtaactatagaagagaagctcaatgttgttgttaaaagagatggtggtattaataactttgatgttcaaggaacacttgctcttcaggttctcaatgatactgatgggttcatccaattgcagattgaaagccaagatattcctgggcttagcttcaaaacacacccaaatatcaacaaggatttgtttaacagtcagcaaattttgggagcaaaagatccaaacaggccttttccgagtggtcaaaatgaaactcctctggtgaaatggagaatccaggggatggatgagtcatctttacctctgtcagtcaattgctggccgtctgtatctggaaatgaaacctatgtgaacattgaatatgaagcttctgagatgtttgatctgcacaatgttgtcatatctatacctctgcccgcagttcgggaggctccaagtgtcagacagatagatggagagtggaagtaaaattttctttcctcttcaatttattcatgctcatgtttactgaagcatatacttgtaaatggccttatgccacttggttgctgtcctttttttatgtgaggcctttttattgttaatgttaacaagtcaaatgtgatattcatatccccaagtttttcgctgttataactggtatatc

SEQ ID NO: 97231 - DNA, 2160 bp, Zea Mays
ataattcacattcagttttttcatttttaaaacgagtgtgacatgaatgctctagatttagcacacctagtacttgtttgagcacgtcgcctaataaaattccccattccaatacacagatctcgcacccgtaagtggcgacgaatctcgcggtgcggaggcgcgacagaggcggtgtcgactccgacggactcgcagctaccggtggagacgccccaccggcgcactcctccaacgttcatagtttaagggcttgatttggataattagtcatcaacagaagtgataaaaaatggtggttcttgcagcatcaatcgtttcaaagtcgggaaaagcacttgtttcaagacagtttgttgacatgtctcgcataagaattgaaggattacttgctgcgttcccaaaactggttggaactgggaagcagcacacttatgtcgaaactgaaaatgtgcgatatgtttatcaacctattgaaggtttatatcttctacttatcacaaacaagcagagcaatattcttgaagatctggacactttgaggctcctctccaagctcgtgcctgaatactccccttcattggatgaggagggtatttgtaaaacagcatttgagattatatttgctttcgatgaagccatatctcttgggaacaaggaaaatgtaacagtgcaacaagtcaaacaatattgtgagatggagagccatgaagagaaggcacacaagctgatgatgcaaaccaaaatcaatgaaaccaaggatctcatgaagaagagggctaatgagcttgacaaaatgaggatggaaagaggcaaacttgacaaaggaggatactcatcaatatctggtccacgcgtgattgaaaaaactttcagtgacatgagcatcagtggttctggattaggtggactgagcactgacatggactcatttgctagcaagcccaaaggccgtccatctacagcagctactgcacctggtaaaggttttggtatgaaattaggcaagacacagaagacaaatcaattccttgaatctttgaaagccgaaggagaagtcattttggaggatgtacaaccaagtgcagtttctacaagatcatctgctcttccaagtgaccctgtcacagtaactatagaagagaagctcaatgttgttgttaaaagagatggtggtattaataactttgatgttcaaggaacacttgctcttcaggttctcaatgatactgatgggttcatccaattgcagattgaaagccaagatattcctgggcttagcttcaaaacacacccaaatatcaacaaggatttgtttaacagtcagcaaattttgggagcaaaagatccaaacaggccttttccgagtggtcaaaatgaaactcctctggtgaaatggagaatccaggggatggatgagtcatctttacctctgtcagtcaattgctggccgtctgtatctggaaatgaaacctatgtgaacattgaatatgaagcttctgagatgtttgatctgcacaatgttgtcatatctatacctctgcccgcagttcgggaggctccaagtgtcagacagatagatggagagtggaagttggactcaagaaactctgtgttggaatggtctattctccttattgatcagtcaaatcgcagtggttccatggaatttgttgttcccccagctgatccgtcatcatttttccccatctctgttggattttctgcatcgagtactttcagtgatctgaaggttactggaatccttcctctgaaggaaggcaaccctccgaagttttcccagcgggctcgtttgctcacagctaactatcaagttgtttaatggttgtaccgttgtccgagtgttgatccacttaaatatattcgaatagcatatttttgtgacatggcatgctactggcatgaacttttgcaagtcatgggatggaagatcattttgggttttgaaaacctttactatgtgcttctcattgttagcatgttgcacaaatgctctgatgtgttgctaccagagaaataagtaatgttcttgcctttcgtttgcctgcattttgtacccgttctttccccttgaggataatcttgtaaggacgatgttatcgtctgggcttgtgtaatgtgatctgctggtggaagagc

SEQ ID NO: 97232 - DNA, 1605 bp, Zea Mays
ttacagtatcttgtttctggtaggtctgattattttttaccatttgtgtactcctaggtggttcttgcagcatcaatcgtttcaaagtcgggaaaagcacttgtttcaagacagtttgttgacatgtctcgcataagaattgaaggattacttgctgcgttcccaaaactggttggaactgggaagcagcacacttatgtcgaaactgaaaatgtgcgatatgtttatcaacctattgaaggtttatatcttctacttatcacaaacaagcagagcaatattcttgaagatctggacactttgaggctcctctccaagctcgtgcctgaatactccccttcattggatgaggagggtatttgtaaaacagcatttgagattatatttgctttcgatgaagccatatctcttgggaacaaggaaaatgtaacagtgcaacaagtcaaacaatattgtgagatggagagccatgaagagaaggcacacaagctgatgatgcaaaccaaaatcaatgaaaccaaggatctcatgaagaagagggctaatgagcttgacaaaatgaggatggaaagaggcaaacttgacaaaggaggatactcatcaatatctggtccacgcgtgattgaaaaaactttcagtgacatgagcatcagtggttctggattaggtggactgagcactgacatggactcatttgctagcaagcccaaaggccgtccatctacagcagctactgcacctggtaaaggttttggtatgaaattaggcaagacacagaagacaaatcaattccttgaatctttgaaagccgaaggagaagtcattttggaggatgtacaaccaagtgcagtttctacaagatcatctgctcttccaagtgaccctgtcacagtaactatagaagagaagctcaatgttgttgttaaaagagatggtggtattaataactttgatgttcaaggaacacttgctcttcaggttctcaatgatactgatgggttcatccaattgcagattgaaagccaagatattcctgggcttagcttcaaaacacacccaaatatcaacaaggatttgtttaacagtcagcaaattttgggagcaaaagatccaaacaggccttttccgagtggtcaaaatgaaactcctctggtgaaatggagaatccaggggatggatgagtcatctttacctctgtcagtcaattgctggccgtctgtatctggaaatgaaacctatgtgaacattgaatatgaagcttctgagatgtttgatctgcacaatgttgtcatatctatacctctgcccgcagttcgggaggctccaagtgtcagacagatagatggagagtggaagttggactcaagaaactctgtgttggaatggtctattctccttattgatcagtcaaatcgcagtggttccatggaatttgttgttcccccagctgatccgtcatcatttttccccatctctgttggattttctgcatcgagtactttcagtgatctgaaggttactggaatccttcctctgaaggaaggcaaccctccgaagttttcccagcgggctcgtttgctcacagctaactatcaagttgtttaa

SEQ ID NO: 97233 - DNA, 2724 bp, Zea Mays
ccagtccatctaatcaccccgcgcccctagagaataggcattgaagaaactggtagcctgttcctcaagatcatatatagggggaaaaaagcacaaaataaagaacgaactcatctgctgttctttcaataattgtatggtcatcacggatacaatcaaaagtcagtagcaagactgggaagctagctgaggagatggtcatttgtcgtcaagtgcagagattagcaagaaaaaccgcaaaaattggtctcagtgcaatcagctcgttcaagaagaaggccctgcatcttatgggctgtctttgctccaaaggcgccaaagaagatgccaatgccgcttctggacgcagaacgccgccaaggagaagtgagccagccactgatgcgatcgcgaaggacagcagcagttcagccgcgcttaataatgcaaagaccaaaggaaatctgtatggtgcagaaaaggtggtagtgtctctagatgctaggatcagcagtggaaacaacgcagagtttaaagggcttaatgcagtctctggctggccatcttggctcgtgaatgtggcacctaaagcagtagaaggctggttgcctcggcgagcagattcctttgagaaactggccaagattgggcaaggaacctacagtgtggtgtacaaagcccgggatctggaatctgggaagatcgttgcgctaaaaaaggtgcggttcgtcaacatggatcccgagagcgtgcgcttcatggccagagaaatccacatccttcggaggctggaccatcccaacgtcataaagctccaagggatcgtaacgtcccgcgtgtcgcagagcctctaccttgtcttcgagtacatggagcatgacctcgctggtctcgttgcaactccaggcctcaagctcactgagccgcagataaaatgcatcgtccagcagctgctccacggcctcgaccattgccacagaaacggggtcctgcatagggacatcaagggctcgaacctgttgattgacagcaacgggacgctcaagatcggagacttcggcctggcaatatcgtacgatcccagcaacccgcagccactgacaagccgcgttgtgacgttatggtacagaccaccggagcttctgctgggtgccacagattatgctgctgcggtggacatgtggagcacaggatgtatcgtggctgagttgtttgctggcaagccaatcatgccaggaagaaccgaggtggagcaaatccacaagatatttaagctgtgtggctccccatccgagaactactgcaagaaatcgaaggtgccagaaactgcaatgttcaagcctcagcagcaatacaggcggtgtgtcaccgagactttcaaagatttacccactccagctgtacttctcatcgactcattgctttcgctagagccagaaggacgtggaacagccacctcagctcttcaaagtgaatttttcagagccaaaccactcgcttgcgacccttcgagcctaccgaaactcccaccaagcaaagagtacgatgtcagacttaggcaagaagaagccaggaggctaagaaacgcggcggcacttggcgggccaggagctgaatctgtcaaacctggaaatgagagccatgtagtagccagtcgcgccattgatatagctgctcaagttaagcaacccacgcatagcacttcgaagagcacctgtgagaagttcagcgccgaggacagtgtgccagggttccgtgtagagcctcgggcactgccaacctcagcgcaggttcctgagtgtggatccacgtggaataacacaggggatcaccatcgttcggtcctcggccgcgtttgcagctctgttcgcgttgcgaggaagaaagggccatcgaattcgaatacgccacagtacgacgctgcagacttgaggaacggcggtgaccgcaaccagcgagcagacaggcctgccgtctcctctcagaagaaagaccagcaggaggaccgtggaaggaagtacaaaaggatccactattctgggccgttgatgccaccgggtggcaacatcgaagacatgctcaaggagcacgagaggcacatccaagaagcggtgcgcaaggcgcgactctgtaagggaagcaagtagctacatagagcagctgaaggcgctaggagaagcctcacatggactcacccagactcatcaaaagctgccatatcgaggagccgcaatagctgtctgtcacatgcaatgcaacacggtcagctattgaagtagtgagatgagacagctctcaccttttaaaattcataggtgagaaccttcgcttgtaatgcgatgagacattttaaaattgaagtgcagagaaatcgggaaggagaattgctaagccactgtaaagtttaggcacccttttttttgtaagtttgatgcagttgtaatagccactgtaaagttgttcatcgattttgctgacaactctggattatggaaaacaacaggagctggatttgaaacttcagacgagcagtctcatggcccttcaagacataattgcagcctgaggatgatgcagctagaacaacatgatgtgtttaagcatacttaaattattaacgaacgatgagtcaatgctaatcatcagtttatcacgagcatcagatagtaatcttagaaggtggaatcgacatttcgaatctgaaagtttcgaagaaaacaattgttgtggctcctcaaaaaaaaa

SEQ ID NO: 97234 - DNA, 583 bp, Zea Mays
cttattataggacatgatgccactgaattaggatgtttgttcttttgctacctttgttaaaaacatcagatcattcgtattgtatccttcctcggattgcttcttttgttctactacaaatatgctcaacatggcagggagaggtacgctcctaaatttcttattttgtgcattgtgaaatgattgttctaacaacatcaattttgtgttcttcatataatctatctcagatttctctgtgttttgcaggtctcgaggtcaagcctggacccactgtcaagtgtgtgcttggacatgactttatcctgcactttccagtgctgcagttagggaatcaaagaaaagtgaaagtgccatgtcaaagttgatgaccagaagcttgttattggaaccctctctattgaaaaatacccctagatagaaattgatttggttttcaataaagagtgtgagctgtcaaacacatcgaaaactaccagtgtatttttctttggttacaaggttgagcaaccaatcgaggaagatgaatatcctttttaacattgattttttattagttttatttcatatgaagagaaggagc

SEQ ID NO: 97235 - DNA, 223 bp, Zea Mays
aaatatttaactcagtttgaacttttgtttggaacttcacaattcagaatattattttagtataaataatgcttccactggttgccataacaatatttatcataattactcttattattattttcccactcttttgtttctatgtatataatttcttttctagagcccaatttcatgtaaaaattagatttgttttaattgtgaattttgagttttaatgcac

SEQ ID NO: 97236 - DNA, 1404 bp, Zea Mays
caaatttctcctcccctccctagtccctaccaaattcgccaccatccccatctatattatccagtcctctgctcatcctatacctttgctttgcctctccttcacttcacttcaactccatcgcccgttgcagcggcggcggcggcaatcatatcacccagacgcggacgccatagtagattagattgatctctccgtggggaggaagaggagcaagagccatgtccagccccacgcacgtccgcaaggccatccgcttcgcctccctgcgggcaaagatcgcgcagcagggtaagacaggcctggcgctgcgcctgctcctcgccgccgcactcgccggcttcctcctcgtgttcgccgcgcgcaccctggtcacgccgtcccctgccccgacctcgtcgtcccaggcgcaggaatatcaccaggacgccgcgccggagtgcggcaaggggaacgcgggcctgccgctggcggtggcggaggcgctggtgcactacaccacctcgaacgtgacgccgcagcagaccgcggacgagatcggggtgtcgctgcgcgtgctgcagcgccgcgcgccctgcaacttcctcgtcttcgggctgggcctcgacagccctatgtgggcggcgctgaaccacggcggccgcaccgtgttcctggaggaggacgcgtcgtggatcgccagcgtgcgttccaagcacccggggctcgagtcctaccacgtcgcctacgacaccgtgctcaccgacgccgactcgctcctggggctccgcgaccacccggcctgcgtcgcgcagccagacctcgccgccgccgccgccgcgtcctgccgcctcgcgctcgccctcaagggcctcccgcccgtcttccacgaactggagtgggacctcgtcatggtcgacgcgcccacggggtggacgccgcaggcgcccggacggatggccgccatctacaccgccggcatggcggcgcgcgcgcgcaggcccggggacggacccaccgacgtcttcgtgcacgacgtcgaccgacccgtcgaggacaacttctccaaggcgttcctgtgcgagggatacctcgccgagcaggtcggccggatcaggcacttcgtcatcccgtcccaccgtgagaaggacggcacaccattctgcccttgacaatctttattttgattctttgagagtttgagtgagagccatccatccataatccatctctctttttttttttgcttttcctgcgctctgccttggctttatttacatacatatatatgagacgaaaaaacactacagcatgcatatgcagcagccgtcagcaactggagctccttcatcattctttctgtactactactactaccgttgctagtattactcctgctctagagctgttgccaaaaaaaattaa

SEQ ID NO: 97237 - DNA, 223 bp, Zea Mays
ctctttttcacaaaagtgccgcaaaaacaagatacaactcaagagtattaaaaaatcacgtctgtttgttacaaattttctactctaacttcaacaagctgtttgacaaatatagcaacatcaaacgtaaaaacgcacaacacgaaagttgtagatctcttttttctctttatttttatatatggatcacctgttttggataacagaagtgggagataatgac

SEQ ID NO: 97238 - DNA, 889 bp, Zea Mays
atctgtatcacgggaagcacatctgctggcctacaccagattcttccatggttgtattatcacaatgtcattggtgtttcacatttctttctattagttgaaggagaggctgcaaagccagctgtcacctctgttcttgaatctattcaggatgctagaatggattggatcattcacctcgatactgatgagttgattcatcaagctggtgcccgagagtactccctgaggcgattgcttttagatgttcctgacaacgttgacatggttatcttccccaattatgaaagcagcattgaccgtatgacattaaggatccttttactgaggcctttataattgcatcgacagcaactgaggaggagatggggaactggtaacacccttagccctccgtgtaccaagcatcgaccattcctccctatcctacctgaattaagagagatcatcacattggtctgatgattacctttgttcaggctatcattcgtggcctcaaggaacccgacgtctttaccaatgcagtaacatcagcgaaagcacagtcgaaaacgaagccgtcaaacatgggtctcggaaacaaggaggctatggatccaaccgaacgtaactgctggtcagtccacactggaaggtggtcacgagaggttacaggcaaccgtaagaaagatcttggaaatggtggacgcccaggaacaggaagaagcaatgccgccgaggccgtcccctggtttgctcgagctctcggaacgcgccactgctttgtcatgacgacttgacgacgctgtgaggttctggaggcgttattaagcatggactcgggttgtttaaccatgctaggtgatacagcgcccgatagggcgctattttttctagtgaatattcatat

SEQ ID NO: 97239 - DNA, 1345 bp, Zea Mays
ggcttttataattttggttcgctcgaaataaattcaacacgtttaaatatttacgtacagaccgtgagctgaggactaggctagtgggtcgactcggtacgacctgaaattcaaaaaaaagacctgcgggcttgggccgggcgggacggcccgaatgtacctccggatacagacgtgtcatccacccacccatttgcttcccctctgcagctctgctctgtttgcttactcttcccttccatggcggcatacgccggaaccctagttccacccttcctcaccgtccgcctcgcggtctcccacctcagatccattaccccggggtcctactccctgagccactgtctcccccgcctcgcggtcgcccgtgcggcctcccgcggaaacggagacggcgacggcgggcctccagcggagggggagaaggagcgccggcgctcgtcactcccagcgctgtcggagatccggtggggggagctgctatccccggaccccaccaacgccgtggctgtggtgctcacgggcgcgctcgtatgggctggcgcctcactgctgctgcagctcgcgctcatctccgcggcaatctttgccgccgctgtcaagtactcgtttgtcgccgcgctcctgttattcgtccttatcgcgctgctgtgatcgatccgccttaaggaaaaaagctgtaaattcgcacgaagcattcggatggaagatcaggtagaggaaaaaacagaggatttcaaatgtttccatttttgtatggagcagtagaaaatatttgtctgccagtgccaactgccaagtgcttaaaatttttctgcacactgagatatttggattgcaaattagtctcagcaaacaggggatacctaagaagaacaaccagaataaagtgctgttcaattcaaatgtttattcaatatacaaacgtgctatctgaaaccagaatgatgaaaatatcaatacatgggtgtcttacagacaaacacaccaaataacatcaacaccagttattccagaatgactatattgtagattagaaactctcatttgtgttgtaatgcatcaaatatgaagacctagaaaagaccaacgacaacgacgatgaagctttttctggtatcaacctagccaatggagatgaaaccagaaaagaccaatctgttgtttataaattcattgtgctcattttcctggcagtaaaaaatgagcttgtcagttacctgtaccattagcatcttctacttttctaatgaaagtatgacctttatttgcaatcaaatggagagtgtgatctgccccttgtaaaatttgcaatcaatgaagagtatgatctgccccttataaa

SEQ ID NO: 97240 - DNA, 1096 bp, Zea Mays
ggcttttataattttggttcgctcgaaataaattcaacacgtttaaatatttacgtacagaccgtgagctgaggactaggctagtgggtcgactcggtacgacctgaaattcaaaaaaaagacctgcgggcttgggccgggcgggacggcccgaatgtacctccggatacagacgtgtcatccacccacccatttgcttcccctctgcagctctgctctgtttgcttactcttcccttccatggcggcatacgccggaaccctagttccacccttcctcaccgtccgcctcgcggtctcccacctcagatccattaccccggggtcctactccctgagccactgtctcccccgcctcgcggtcgcccgtgcggcctcccgcggaaacggagacggcgacggcgggcctccagcggagggggagaaggagcgccggcgctcgtcactcccagcgctgtcggagatccggtggggggagctgctatccccggaccccaccaacgccgtggctgtggtgctcacgggcgcgctcgtatgggctggcgcctcactgctgctgcagctcgcgctcatctccgcggcaatctttgccgccgctgtcaagtactcgtttgtcgccgcgctcctgttattcgtccttatcgcgctgctgtgatcgatccgccttaaggaaaaaagctgtaaattcgcacgaagcattcggatggaagatcagttttgattggcctcgcagatttaatttgcagaggtggcactcgtggcaaacagacactgactttgctttcctctgaagccgaatacacatgcattgacatggcctgcttttatatagcaatccaccttgtaagaaatatgacctttgggttacttgcatagctgtgggccgccccacatgaaactatgaaagcatctcgctggccactgtacatctttatttaagctctgtaaattcttatgaatattgtaatatgatatagtttgtatacttgtgttatgattaagtgaactcatcttgtaagatcctgttcggctgttcctgcgtgtaaggagaatttgttgttattgcttaccttgaacataacggcatgtgatgttta

SEQ ID NO: 97241 - DNA, 1078 bp, Zea Mays
ggcttttataattttggttcgctcgaaataaattcaacacgtttaaatatttacgtacagaccgtgagctgaggactaggctagtgggtcgactcggtacgacctgaaattcaaaaaaaagacctgcgggcttgggccgggcgggacggcccgaatgtacctccggatacagacgtgtcatccacccacccatttgcttcccctctgcagctctgctctgtttgcttactcttcccttccatggcggcatacgccggaaccctagttccacccttcctcaccgtccgcctcgcggtctcccacctcagatccattaccccggggtcctactccctgagccactgtctcccccgcctcgcggtcgcccgtgcggcctcccgcggaaacggagacggcgacggcgggcctccagcggagggggagaaggagcgccggcgctcgtcactcccagcgctgtcggagatccggtggggggagctgctatccccggaccccaccaacgccgtggctgtggtgctcacgggcgcgctcgtatgggctggcgcctcactgctgctgcagctcgcgctcatctccgcggcaatctttgccgccgctgtcaagtactcgtttgtcgccgcgctcctgttattcgtccttatcgcgctgctgtgatcgatccgccttaaggaaaaaagctgtaaattcgcacgaagcattcggatggaagatcagatttaatttgcagaggtggcactcgtggcaaacagacactgactttgctttcctctgaagccgaatacacatgcattgacatggcctgcttttatatagcaatccaccttgtaagaaatatgacctttgggttacttgcatagctgtgggccgccccacatgaaactatgaaagcatctcgctggccactgtacatctttatttaagctctgtaaattcttatgaatattgtaatatgatatagtttgtatacttgtgttatgattaagtgaactcatcttgtaagatcctgttcggctgttcctgcgtgtaaggagaatttgttgttattgcttaccttgaacataacggcatgtgatgttta

SEQ ID NO: 97242 - DNA, 1174 bp, Zea Mays
atttgcttcccctctgcagctctgctctgtttgcttactcttcccttccatggcggcatacgccggaaccctagttccacccttcctcaccgtccgcctcgcggtctcccacctcagatccattaccccggggtcctactccctgagccactgtctcccccgcctcgcggtcgcccgtgcggcctcccgcggaaacggagacggcgacggcgggcctccagcggagggggagaaggagcgccggcgctcgtcactcccagcgctgtcggagatccggtggggggagctgctatccccggaccccaccaacgccgtggctgtggtgctcacgggcgcgctcgtatgggctggcgcctcactgctgctgcagctcgcgctcatctccgcggcaatctttgccgccgctgtcaagtactcgtttgtcgccgcgctcctgttattcgtccttatcgcgctgctgtgatcgatccgccttaagaattttcgtcattatcacaggaaaaaagctgtaaattcgcacgaagcattcggatggaagatcaggtagaggaaaaaacagaggatttcaaatgtttccatttttgtatggagcagtagaaaatatttgtctgccagtgccaactgccaagtgcttaaaatttttctgcacactgagatatttggattgcaaattagtctcagcaaacaggggatacctaagaagaacaaccagaataaagtgctgttcaattcaaatgtttattcaatatacaaacgtgctatctgaaaccagaatgatgaaaatatcaatacatgggtgtcttacagacaaacacaccaaataacatcaacaccagttattccagaatgactatattgtagattagaaactctcatttgtgttgtaatgcatcaaatatgaagacctagaaaagaccaacgacaacgacgatgaagctttttctggtatcaacctagccaatggagatgaaaccagaaaagaccaatctgttgtttataaattcattgtgctcattttcctggcagtaaaaaatgagcttgtcagttacctgtaccattagcatcttctacttttctaatgaaagtatgacctttatttgcaatcaaatggagagtgtgatctgccccttgtaaaatttgcaatcaatgaagagtatgatctgccccttataaa

SEQ ID NO: 97243 - DNA, 275 bp, Zea Mays
ctgtacctcggaggttagctgcacgctgagactaatttacccgaagccgcatgaagagagaggagagcatcgccgccgcgtcgagcatgtggcaaccggtgtctgggtcgcagggcagaggggcgttggtgtccgctggtgccaagggtcatccgcgtgcaagcagctggtcgcacgcgtcctcgaatttccggaggttcttcgccgaagcaccctgcgcgcctgcttcgcggtccgacgtggtcggcctatttgggcacccaattgaccggtga

SEQ ID NO: 97244 - DNA, 1029 bp, Zea Mays
atcagtagtagtggcattttgcccctgctgtgccatctctctctcgctctcgctcctctcctctttttctctcctgctcagccttgcttcccgtcccatcctttctttcccttgggcgcattcagcagcttcagcctggccggccggcctgctattaaaccactttgcttgcaagtccaagaaactgctagagaggaacaagctgagatctccagcatggggaggggaaggattgagatcaagaggatcgagaacaacacgagccggcaggtcaccttctgcaagcgccgcaatgggctcctcaagaaggcgtacgagctctccgtcctctgcgacgccgaggtggcgctcgtcgtcttctccagccgcggacgcctctacgagtacgccaacaacagtgtgaaggctacgatcgagaggtacaagaaggcacacgccgttggctcttcctctggccccccactcttagagcacaatgcccagcaattctaccagcaagaatccgcaaaactgcgcaaccagatccaaatgctgcaaaacactaacaggcacttggttggtgactctgtgggaaacttgtcactcaaagagctgaagcagctggagagccgccttgagaaaggcatctctaagatcagggccaggaagagtgagctgttggctgccgagatcaattacatgggtcaaaaggagaacttgagcttccagatggacacatggaatcttcagacaaggtatggcattgctattgaggagggagagcaacagctgcagcaggtgactgtggcccagtctgtcgcagcagcagcggccaccgacgtggagctgaatccgttcttggagatggataccaaatgcttcttccctggcggccccttcgcgacactggacatgaagtgcttcttccccggcagcttgcagatgctggaggcacagcagcgccagatgcttgccaccgagctgaacctcggctaccaactggcgccgcctgacactgacgttgccaacaataaccctcagcagttctaa

SEQ ID NO: 97245 - DNA, 1235 bp, Zea Mays
atcagtagtagtggcattttgcccctgctgtgccatctctctctcgctctcgctcctctcctctttttctctcctgctcagccttgcttcccgtcccatcctttctttcccttgggcgcattcagcagcttcagcctggccggccggcctgctattaaaccactttgcttgcaagtccaagaaactgctagagaggaacaaggtagagtagcatctcttttctatctaggttatctctttacatgctaaatttcagccgtatttctttctggatcagttctgtatacttctgtgatacacatcttgcgatgcggcttgtagtagtttctgctagctgagcgagatcgatctcgtttgtactttctccctttgaggaaacaactccccttttctgtgcttcaagttgttctgagatctccagcatggggaggggaaggattgagatcaagaggatcgagaacaacacgagccggcaggtcaccttctgcaagcgccgcaatgggctcctcaagaaggcgtacgagctctccgtcctctgcgacgccgaggtggcgctcgtcgtcttctccagccgcggacgcctctacgagtacgccaacaacagtgtgaaggctacgatcgagaggtacaagaaggcacacgccgttggctcttcctctggccccccactcttagagcacaatgcccagcaattctaccagcaagaatccgcaaaactgcgcaaccagatccaaatgctgcaaaacactaacaggcacttggttggtgactctgtgggaaacttgtcactcaaagagctgaagcagctggagagccgccttgagaaaggcatctctaagatcagggccaggaagagtgagctgttggctgccgagatcaattacatgggtcaaaaggagaacttgagcttccagatggacacatggaatcttcagacaaggtatggcattgctattgaggagggagagcaacagctgcagcaggtgactgtggcccagtctgtcgcagcagcagcggccaccgacgtggagctgaatccgttcttggagatggataccaaatgcttcttccctggcggccccttcgcgacactggacatgaagtgcttcttccccggcagcttgcagatgctggaggcacagcagcgccagatgcttgccaccgagctgaacctcggctaccaactggcgccgcctgacactgacgttgccaacaataaccctcagcagttctaa

SEQ ID NO: 97246 - DNA, 1639 bp, Zea Mays
cttggataatatgcttcttatttgtttatcacactcgatttccctttttcctgctttctatatgtatgtgtatccatgggctgcgtttccctgcgttactaatatttgattcttttcttctaatgagatttttccagttctcgtctgcttcttgcttaatttgccataatctaattaacttgaccccagattatattcttggctacctacaatgttctaaagattctttgctagattttgttgcttcttttcgcatctgatcctttatctgcatccaatcgatccacaagtgttcttccagttgaaggagttggacgaagatgagctttctgtttagggaaaaaacaagcagctccttattattgttcatcccatttgctgggtttacgttgtttagtttcctttctgttttagcttattttcttccatctagctttgcgccgaatgaacgaactcgtaaatcttgtgttcctgtgtggctgctttcgttagatctctcggctatgtctatatgatcgtcttggccagcatctctgggttcttttcgcggccgagaggaaacttactaactgatcgagtgtgccaggcatcaatctgtcgaatcgtgactcgtcgctttttcatgtcttcagattttgtccatctgtcaaatcatgtggaaaaattggcatatcttcttgtattctcttctgtcctttttaatgcctccagcggattaatttctagctagttccgttccattgatctgccttcagataatataacttaaattctcgctttcttatgcaagaactaaattacttgcatttcagctgagatctccagcatggggaggggaaggattgagatcaagaggatcgagaacaacacgagccggcaggtcaccttctgcaagcgccgcaatgggctcctcaagaaggcgtacgagctctccgtcctctgcgacgccgaggtggcgctcgtcgtcttctccagccgcggacgcctctacgagtacgccaacaacagtgtgaaggctacgatcgagaggtacaagaaggcacacgccgttggctcttcctctggccccccactcttagagcacaatgcccagcaattctaccagcaagaatccgcaaaactgcgcaaccagatccaaatgctgcaaaacactaacaggcacttggttggtgactctgtgggaaacttgtcactcaaagagctgaagcagctggagagccgccttgagaaaggcatctctaagatcagggccaggaagagtgagctgttggctgccgagatcaattacatgggtcaaaaggagaacttgagcttccagatggacacatggaatcttcagacaaggtatggcattgctattgaggagggagagcaacagctgcagcaggtgactgtggcccagtctgtcgcagcagcagcggccaccgacgtggagctgaatccgttcttggagatggataccaaatgcttcttccctggcggccccttcgcgacactggacatgaagtgcttcttccccggcagcttgcagatgctggaggcacagcagcgccagatgcttgccaccgagctgaacctcggctaccaactggcgccgcctgacactgacgttgccaacaataaccctcagcagttctaa

SEQ ID NO: 97247 - DNA, 445 bp, Zea Mays
gccgtcacgacatccccaaatctatcgtgtcatgctccggtcgtcgatcggctgatcgtcgtcgtcgtgttccctgcttccctcgtcgctcgacctcgctgcggctaagtccatccgccgtgctatgtgctgtggtctctggtcgaaggacatcaataccctatgccccttgctcacctccctggtcgtgctcaccgggacactattctctagccaactaccgtggtgagctcgcgagacctctgcctcatcatcgtcctcgcctctgatcgtgcccctggtgcgcctgccgccgattatctccacccatgcgttcctgctctcctctagttgagctcaatcccaagtgctcgcttaagctgtgtggccaggttccctttcctggtcgccgtcagtggaagccctaccatcaatatcgcatgatattggttgtcttcttcgacca

SEQ ID NO: 97248 - DNA, 779 bp, Zea Mays
gccgtcacgacatccccaagtctatcgtgtcatgctccggtcgtcgatcggctgatcgtcgtcgtcgtgttccctgcttccctcgtcggtcgacctcgccgcggctaagtccatccgccgtgctatgtgctgtggtctctggtcgaaggacatcaataccctatgccccttgctcacctccctggtcgtgctcgccgggacactattctctagccaactaccgtggtgagctcgcgagacctctgcctcatcatcgtcctcacctctgatcgtgcccctggtgcgcctgccgccgattatctccacccatgcgttcctgctctcctctagttgagctcaatcccaagtgctcgcttaagctgtgtggccaggttccctttcctggtcaccgtcagtggaagccctgccatcgatatcgcatgatattggttgtcttcttcgaccacgtcattgcctcacaagatttggacaccttgtcgacactcgaccacgtgttcgctcgttaccacgccatcttcagcatcatggttctataagactccgcgcactctcggcacccggctgtcaatctccaccacgcagcgctgcatggaacttaccctgtatgatgttcgacgacaagcccgaaccagaatttatcaacattctcacaagtattgagtcacgtttgaatgctggtacgataattaatcacgtgatgcggaggaaaagagccaagtctaccctggctaatccgcaggatgatgctgatggacgaaccggaagatggataatctgaa

SEQ ID NO: 97249 - DNA, 168 bp, Zea Mays
atggggacgcaggcgcatccggctgtttttcaggaaccgcgacttgaaatgctgggatctccatataggctttgtagaacctctccagaagagggtactttgacatatcaattccgaagcgcgtcacgcctgcatacatctggggcgcaagaaacacatctgcctgtc

SEQ ID NO: 97250 - DNA, 593 bp, Zea Mays
atgccaaccacgctgctctgctcgaccaccaccgatatctacggtcggattaggttcaacgccctcttcgcctcagatgtctcccgaggtatccctgcggcggcggtcaccatagtggactccggccacccccacgacgacccgcaaaagggtgagggagtgcaagaaactggggtacactggcctcgcgaacagctccatcaacaatctcttcgatctcatcacgaaccaaggtacgggattgtgaactatgtcgtgcaaagacctgcgcttcactgcctttgcccactcctccggctagaaaatggttcctgattccgtcaataaccaaggtatgaactgttgaaagctattgcaatatactactgcaacattcattgctttgtgccactttgcttatgtcagtaatttcgacaacgctctgcttatttagttgacacttgttgatacgattgtgcttgtcgtccataagtgagttctaaagactattgatttcattgacgatatttaatcttatgtactatttttatgtaacctattaatatttttgctgctttgttgattgcttatacctctttactgttatctcggga

SEQ ID NO: 97251 - DNA, 1396 bp, Zea Mays
ctagctcacaaggcagcaaggccactaacactagttatcacatccaccataacgaccatggctaccacctcagctttgctagctcttgtcttgttagccagcctccttgcaggcacggtgttcagtgatgatatcgtacccatccatatacccttgttggatcggttccaagcctggcaggccgaatacaaccgcacatatgcgaccccagaggaattccagcaacgcttcatggtctatagcgagaatgtcaagttcatcgagaccatgaaccagcctgggagctcatatgagctcggtgagaaccaattcgctgacctcaccgaggaggagttcaaggacacgtatcttatgaagcttgacaacgtggcctcgtcccctgaggccatggcactgaccgtcgataccatgaatagagcaggcacatctggcggcagcaacaccaacgaggctcccaatagtgtggactggaggaccaagggagcagtgacgccggtcaagagccagcaacattgtggctcttgctgggcgtttgccgcagtggcgtctatcgaaggtgtgcacaagataaagacaggtcgtctcgtgtcactgtcggagcaagagattgtggattgcgaccgtggggggaataaccatggctgccatggtggtcactctagttctgccatggagtgggtcacccgcaacggcggcctgaccaccgagtcggactacccatatgtgggtaggcagggacaatgcatgagcgacaagcttggtcatcatgcggccaagatccgtggccggcaggcagtgcagggcaagaacgagggcgcgctacagcatgcagtggcggggcggccggtggccgtaagcatcaatgcaagcagggccttccagttctacaagcgcgggattttctcaggcccctgcaacaccacccggaaccacgccgtcacggtggtcgggtatggagccaacgctagtggccacaagtactggattgtcaagaactcatggggtgagaggtggggagagaagggctacgtgcgaatgcagaggggtgttagggctagggagggcgtgtgcggcatcgccatagcgcccttctatgcggtgatgtgagagtaccgtctctccccatactagttaccagttgcattctgattctaaacaagtatgggtgtcatcttggagaagaatgcatggaattaaataaactacagctcaccgagggatggtacatgatgtttgctacgcgttgccaatttatcgtttgtttgctaatgtaacaaaatctcaaaatcaatgacttttgggatgtaatatgtgttcttgttaaataaagagaatcacaattgatctcttgccttaaaacatcatcactgcgatgtgcaagaggttagtttgtcaa

SEQ ID NO: 97252 - DNA, 876 bp, Zea Mays
atgactattgaaaggatacatgacagttttacaaatgatatcttcctaaatcctcctataacagttatatctttatatcttgaaaatcatggcttggagattccaggtttgaatatgtccaaagctcctaaggattccatggaagttgacctggtgcagaaaacagataaagtaaaagttacaggagaactgtcatctgaagaagttgagactgcaaggcaaacatctcaagtggaagctgcagacagtacatttatcggtgaagttgacaggcttgagaaagcaggaaatattgatgttgagctaattgtccatgtgaatcaaattggggaaggtgcagaagctgcatctgtatctgaagagtcatctcagcaagtgggcaacattgagcacgcttacactcaaaaggaagcgtcagttagtgatctacccacaaagatagaaaccttacattttgatgctataataaaagagttgcctcagaaggctccagataatatgcaaactgatatagccatgaccccaaaacagagtcacaatccagaagataatgctgtatttgaagccgtcactgaagtgccaagtactgcacaagatcataaatccaacaaagtcgaagaaaatcatgtaaatgcggagcctaggagaaagaataatgaaagtgatcatggtgtagtgccttctgataaggaaatacagaacaatgtgcctggtgacatggaggaaagctccgagcaacatgaaggtgatggagcacctgcagttgaccagcccaataacacatctgaaatgctcccagaaacaggagagcagtttcctgacagtggaaatagcccagacatcaacttagaggctgctagtttgggggaatgttga

SEQ ID NO: 97253 - DNA, 732 bp, Zea Mays
atgagccaggttgcaggccacggtttttgctgttggtggtgtctggcaaacgagacagcagcgatcgatctgagtgagtttctaagggattggattatctggttcagtgttttttgggggttttctttggcagaacagatcaaccagattgttgttgggaggaggagaggaattggagatggcaagactgtgaagcgcgatgtttggagtcccaaatatgcaattctcttggagcgagctccgcagaccgcagcaggttactgctcgccgatgtgctcggctttcggggtacttaggctatggccgctcgagcacggcatcgaccacaccggaaagtacgtcggcgactctgacctccagctcaagcgcatcaacatctactacaacgaggccagcggtggccgctttgtcccgcgcaccgtcctcatggacctcgagcccggcaccatggactccgtgcgctcgggtcccttcggccagatcttccgcctcgacaatttcgtcttcggccagtccggcactagcaacaactgggccaagggccactacactgagggcgccgagctcatcgactccgtgctcgacgtcgtgtgcaaggaggccgagagctgtgactgcctccaagggttccaggtctgtcactcgctgggaggaggtacaggttcagcgggacgcccagcccgcaggtactcaccccgaacactctgcctcctgttgccgtgtagggtttag

SEQ ID NO: 97254 - DNA, 856 bp, Zea Mays
aacccgtgaccctaaaaccaactaaagtccagaacagaggcagctctcttggcgtgctcacctgcttgctccaagatttacccctccctcggtgcctgatacctctatcctccgcatccgtctctaaagacaaggcagtcgtcaagaaagggagtttgaccaagagcctgtggtgtccgtcggctgccatccatggcaggggaggccaagaagctcttcttcgcatccgaggttactctccacgcctccaggaaggactgctgggtcgtcatcggcggcaaggtgtatgatgtgaccaagttcttggaggaccaccctgggggagaggatgtgcttctccatgcatcagcctctggggatgccacggaagcattcgaagaggtgggacacagcacttcagccgtcagcatgatggacagctacttgattggaagcatcaaggactatgttcgtccgagtgcatcgaaggccacagatccttggagcgctgatgttctaccaaattccaggacgatgcaagggaacaaagtcactcctaatccaaataccttcctggactttcttctcccattgtttgtgcttggcctggcatttgcagcttggtattacctaaccttcatctccaagaaccattaaatacagtgaagctgggaattatttctcactattatactgttagggttatatcagagaaaacattaaaagaaggcaaaccttgtattatggtattttgcacttgaaggttgctagctagggtttccttggatgtcctttcttacatgtaacaggcatgtcagtacgcagatgtatgaatgaaacaatttatccttatttttccaatttgtgcttcagattc

SEQ ID NO: 97255 - DNA, 1147 bp, Zea Mays
aacccgtgaccctaaaaccaactaaagtccagaacagaggcagctctcttggcgtgctcacctgcttgctccaagatttacccctccctcggtgcctgatacctctatcctccgcatccgtctctaaagacaaggcagtcgtcaagaaagggagtttgaccaagagcctgtggtgtccgtcggctgccatccatggcaggggaggccaagaagctcttcttcgcatccgaggttactctccacgcctccaggaaggactgctgggtcgtcatcggcggcaaggtgtatgatgtgaccaagttcttggaggaccaccctgggggagaggatgtgcttctccatgcatcagccgccccatgccccgtccaggcccgggctcacccctgctgcgccatctgccgagctcgaccctgcgcgctggccgaggccgctgccgcgccgaccaccacgctgggcgagatcgcgctaggtgaggtcgtgctgggcgatgtcatgctggacagggcgcctcgtctgcatcatagcccatggacacaccgaccatggaaaagctgtatcgttgtcctggtgtttcatgagcattacgtgagcaataagagttgtttgcatcctacaagttgcaaatactagcttcatgctgcctctggggatgccacggaagcattcgaagaggtgggacacagcacttcagccgtcagcatgatggacagctacttgattggaagcatcaaggactatgttcgtccgagtgcatcgaaggccacagatccttggagcgctgatgttctaccaaattccaggacgatgcaagggaacaaagtcactcctaatccaaataccttcctggactttcttctcccattgtttgtgcttggcctggcatttgcagcttggtattacctaaccttcatctccaagaaccattaaatacagtgaagctgggaattatttctcactattatactgttagggttatatcagagaaaacattaaaagaaggcaaaccttgtattatggtattttgcacttgaaggttgctagctagggtttccttggatgtcctttcttacatgtaacaggcatgtcagtacgcagatgtatgaatgaaacaatttatccttatttttccaatttgtgcttcagattc

SEQ ID NO: 97256 - DNA, 748 bp, Zea Mays
ttcctatgttgtttaaaactacgtttaaacaaagtttaaacgtttaaaagtcaaaatttcacccatgagcgttccaacgttttatcgttttaataagcttggtaaacaatgtcatttatagtttcgcgtctcctattttactctgcaaacagtgtagagctttacatgattccatcaaaatactttgtataaatagaatttgctaagcttgattttatctggctgtaataaatttttgaagcctctggggatgccacggaagcattcgaagaggtgggacacagcacttcagccgtcagcatgatggacagctacttgattggaagcatcaaggactatgttcgtccgagtgcatcgaaggccacagatccttggagcgctgatgttctaccaaattccaggacgatgcaagggaacaaagtcactcctaatccaaataccttcctggactttcttctcccattgtttgtgcttggcctggcatttgcagcttggtattacctaaccttcatctccaagaaccattaaatacagtgaagctgggaattatttctcactattatactgttagggttatatcagagaaaacattaaaagaaggcaaaccttgtattatggtattttgcacttgaaggttgctagctagggtttccttggatgtcctttcttacatgtaacaggcatgtcagtacgcagatgtatgaatgaaacaatttatccttatttttccaatttgtgcttcagattc

SEQ ID NO: 97257 - DNA, 1551 bp, Zea Mays
ctataaatatccgatctcgtcggaaccctacccttttgagaactccccttctccgccactaccgaagcccttgtacccctcaccgccgccgctgctgctagggagcttccatccgcgcgcgcctacaacgagagctagcagcggtagcggccgttatcttgtcgctccggctccgttcgtgtacccaagtcccagcctagatgccgcagatggaggggtccactgatcagatcgccgccggctggttcgctaaggagccggcttccgagcggcccgtgggcttgccgaggaccggctcttccagtcgcctcaacgcgcaggcgccggagttcgtgccgcgggggccgccgccaccggcgccggcggttgtgctgccgcctccgccgcaggtgatccgcatgttcgccgcgcctcccccgccgccgcgtgggggcttcttctccgcgccgcagccccggccgttcgagtactatgcgcctatcggtgaacgcagcggatttgctgccaaggagcaacaggcgccggagctggaagcggagatgctcccgcccgccgcggtgaagacggagccggtggtggatgggctcgacgacgaggtggtgcacaagatcaccaagcaggtggaatactattttagtgacatcaaccttgctactacagaacatctgatgagattcattaccaaggattctgagggatttgtgccaatatcggtaattgctggctttaagaaagtaaaaacttctgtgcgcaataatgtgatgcttgctgcggctctccgaacctcatcaaaacttgttgtaagcgatgacggtaagagagtcaaaaggcagcagccatttacagaatctgatttgcaggagctccagtcccggattgttgtagcagaaaatcttcctggtgatccctcctaccagaatcttaagaagatattttcagctgttggaagtttgatttcaatccgaacttgctatcctcagactccaaatggcactggtcctgcaactaatagatcttccaagttagatatgctttttgctaacaagctgcatgctttcgtggagtacgaaactcctgaggatgctgcgaaggctattttggagctcaatgatgagaaaaactggagaaatgggcttagagttcggttgctgaatacttgcacggtgaagggggcaggcaaaggaaaaaacggaatgaatgaaactgatggaaatagtgaggaggatgtctccactttgaaccattctaacgagaaacagtttgaacaatcctctcaactgttagatgtactgccggaacacttggtaagatactgttgtgggccttctttttctaaacccaaaaaatagactagagcaaaaaggacctataatttatttagtgccttgacattttgtgaagaaccatttgggtgacgatccattaccacccctacatagaatacgagtgcatttatactcgtgttagataccatctgatttcaaatgtaggtcatttaggacagtaacatggccttctatatgacaaaggacttttaacatttgttaaaat

SEQ ID NO: 97258 - DNA, 2035 bp, Zea Mays
ctataaatatccgatctcgtcggaaccctacccttttgagaactccccttctccgccactaccgaagcccttgtacccctcaccgccgccgctgctgctagggagcttccatccgcgcgcgcctacaacgagagctagcagcggtagcggccgttatcttgtcgctccggctccgttcgtgtacccaagtcccagcctagatgccgcagatggaggggtccactgatcagatcgccgccggctggttcgctaaggagccggcttccgagcggcccgtgggcttgccgaggaccggctcttccagtcgcctcaacgcgcaggcgccggagttcgtgccgcgggggccgccgccaccggcgccggcggttgtgctgccgcctccgccgcaggtgatccgcatgttcgccgcgcctcccccgccgccgcgtgggggcttcttctccgcgccgcagccccggccgttcgagtactatgcgcctatcggtgaacgcagcggatttgctgccaaggagcaacaggcgccggagctggaagcggagatgctcccgcccgccgcggtgaagacggagccggtggtggatgggctcgacgacgaggtggtgcacaagatcaccaagcaggtggaatactattttagtgacatcaaccttgctactacagaacatctgatgagattcattaccaaggattctgagggatttgtgccaatatcggtaattgctggctttaagaaagtaaaaacttctgtgcgcaataatgtgatgcttgctgcggctctccgaacctcatcaaaacttgttgtaagcgatgacggtaagagagtcaaaaggcagcagccatttacagaatctgatttgcaggagctccagtcccggattgttgtagcagaaaatcttcctggtgatccctcctaccagaatcttaagaagatattttcagctgttggaagactccaaatggcactggtcctgcaactaatagatcttccaagttagatatgctttttgctaacaagctgcatgctttcgtggagtacgaaactcctgaggatgctgcgaaggctattttggagctcaatgatgagaaaaactggagaaatgggcttagagttcggttgctgaatacttgcacggtgaagggggcaggcaaaggaaaaaacggaatgaatgaaactgatggaaatagtgaggaggatgtctccactttgaaccattctaacgagaaacagtttgaacaatcctctcaactgttagatgtactgccggaacacttgtttgatgagaatttcaacaaggaagttcccaagcgcggcaaagggcgcggtcgcggtggcagagggcatgggcgtggcaaccatcaatataacaatcaccatcacaataaccagcaccaccagaacaaccagccgcagtacaataaccatggcaacaaccaccttggtgggaaccgtggcagccttcactctgttggtactacaccgcataacctgataaccaagcttgagccgcatccgcagctgcctattggggccaacaagcttccaccaggcccccgcatgcctgatggcaccaggggtttcaccatgggcagggggaagccacaggctgtgctacctgggttgtgtgctgttggtgttgagtgaggcatgcagattgctgcttgtatgcttgtattgtatatctttgtggtgggagtatttgtgcgtcacactttgtggacacggcgagctgtcaaaaccagtatattacattcgctttgtaatcgtgtatctggcaatttggtcggttggcacgggtatgaatcaattttttttgaaatcagtatctatcatagaaaaggacaagcacactaaaatgtagcgtggtgatttagggcacgtttagtttgtggctaaatgtgccacactttgcctaaggttagtggttctaattgaataactaaccttagtcagaaaaattaggcaaagtatgacaattgaggtaatgaaccaaacatgactttagtctgccctcctattgcgtcattttgttgtcat

SEQ ID NO: 97259 - DNA, 777 bp, Zea Mays
tctttgcgtaaactacaccttggaaaattcaggaaaaatcctaaataaaccagataaccaaatacatgtattggctgataaaccagctgttgctagggatgaaaacggtcgaaaacggtcggtaaacactaaaaccattaccgttttcatattttttatcggaaacaaaatcgaaaacggtaactccagaaacggaaacgatatcggtatttcggaaacatcggaaacgaaagttcggtgcgaaaaatacaccggtaacggtcgaaatctaaaatacgatcggtaaacatatcaaacttcacaataaaataaaattgacaaaacatcacaaatccgacaagttcacaattcatgatataacaagtttacaatataacaagttcacaaggatcacaaatttataaaataaaaagtttacaaagatcaaaagttcacaatataacaagttcacagtataacaagttcataaagatcacaagttcacatactcaaagttcataattcataatatccactcgatttagttgacatggcatgcttactcatgaaatatttttactcacataaagggttttttcacagcctcacaggaaaatactaaattctagtgtgtggaaaagacagactgtcggctctctatcattatatattactaatacataacatgtgcatagaaaatggtggattcattcgagagaccaaatcgttaatctcaactgccttccaacaccatctaacccccaaaaaaatcttaaagcgtccaaaaaatacaaaaat

SEQ ID NO: 97260 - DNA, 561 bp, Zea Mays
atgggcgtgacgagcaggaaggacgcgcggccaggatcccagtgcgcgacctgcagaagaacatgcgtgcgcgacaccaagaacctgtgttcgctgcaacatatcatcgagcaagcagagtgcgcgaagcaggcagccatgggagcagagaaaatcgcgcggacggccggaacagagacggcgagcatggtccgagctcgacggtgtccgcgagcgaagaaaaccgagctggggactgggcagagcgcggacggcgggattcgacggctgagagaggaatgcgccaccatgggcgagcgccagggaacttcaaggccaagagaacgcggggaaaacgacgccgtggggaagaaccgcgcagcgggtcaaacaggggctgagcaccggcagggaccgagcattgagattgggcgaccacgaagccgtacaccggccatgggaagcggtagaggaagtcgccatgtgaaggaggccgagctacaggagcaagggagaggagccgcggcgccatgggagaggacaggagcagagatagtgcgggcgcgtccacggctgctctag

SEQ ID NO: 97261 - DNA, 1884 bp, Zea Mays
acacacttcacaagcagctcaaagctctagttctagctagctagcaaagggggggaaaatggctccgcttctcgctgctgccatgaaccacgctgcagcccatcctggccttaggagccacctagtaggacccaacaatgagagtttctcacggcaccacctgccgtcttcttctccacagagcagcaagcgaaggtgtaaccttagctttactacacgatctgcaagagtaggcagccaaaatggagtccaaatgttgagcccctcggaaatcccacaaagggactggttcccctctgacttcaccttcggtgccgccacttcagcgtaccaaattgaaggtgcttggaatgaagatggaaagggggaaagcaactgggatcacttctgccacaatcatccggaaaggatactggacgggagcaattcagacattggagcgaattcgtaccatatgtacaaaacggacgtcagattgctcaaggaaatgggcatggacgcatataggttctctatctcttggcccagaatactgccgagtaaagggaaccaaagaaggaggtattaacccggatggcatcaagtactacagaaacctcatcaacttgttgctggaaaacggcatagagccatatgtaacaattttccactgggatgtacctcaagcactagaagagaagtacggcggcttcctagataagagtcataagagcattgttcctacggaactggggtctttgccccagggcggtgctcacctggactagactgtgcctacccaactgggaattcactcgtcgagccttacactgctggccataacattctcctagcccacgctgaggctgttgatctttacaacaagcattacaagcgcgacgacacccgcatagggcttgcgtttgacgtaatgggtcgtgtgccatacggaacatcgtttctggataaacaggccgaagaaaggtcatgggacatcaacctaggatggttcttagagccagtggttcgtggtgactaccccttctccatgagatcattggctagggaacgactacccttcttcaaggacgagcagaaggagaagctcgccggttcctataacatgttggggttaaactactacacctcacggttctccaaaaacatcgacatctcaccaaactactcacctgtgctcaacactgacgacgcctacgccagtcaagaagttaacgggcctgacgggaagcccattggtcctcctatgggaaatccatggatctacatgtaccctgagggcttgaaggatctccttatgataataaagaacaaatacggaaacccacctatctacatcaccgagaacggaatcggggatgttgataccaaagagacacctctacccatggaggctgccttaaatgactacaaaaggctagattacatccagcgccacatcgctactcttaaggaatcaatagacttgggatcaaatgtgcaaggctacttcgcttggtctctgctggacaactttgaatggtttgccggcttcaccgaacgttatggcattgtctacgtcgaccgcaacaataactgcacgcgctacatgaaggagtctgccaagtggttgaaagagttcaacaccgcgaaaaagcccagcaagaagattcttacgccagcttaaaaatcgggggcctcatgatgtgggtgcagcccataaaaactgtgtggtttggaaccgaagattttctctttttttttctgccacgagaggttctctggaggcatactctccagcaccgtggctaataacgcgttgttccaattcagtctggccttgtcatgcatgcaataaataaagtgatgggtttccctgtttcaatatccacaataatgttgaatcac

SEQ ID NO: 97262 - DNA, 1994 bp, Zea Mays
acacacttcacaagcagctcaaagctctagttctagctagctagcaaagggggggaaaatggctccgcttctcgctgctgccatgaaccacgctgcagcccatcctggccttaggagccacctagtaggacccaacaatgagagtttctcacggcaccacctgccgtcttcttctccacagagcagcaagcgaaggtgtaaccttagctttactacacgatctgcaagagtaggcagccaaaatggagtccaaatgttgagcccctcggaaatcccacaaagggactggttcccctctgacttcaccttcggtgccgccacttcagcgtaccaaattgaaggtgcttggaatgaagatggaaagggggaaagcaactgggatcacttctgccacaatcatccggaaaggatactggacgggagcaattcagacattggagcgaattcgtaccatatgtacaaaacggacgtcagattgctcaaggaaatgggcatggacgcatataggttctctatctcttggcccagaatactgccgaagggaaccaaagaaggaggtattaacccggatggcatcaagtactacagaaacctcatcaacttgttgctggaaaacggcatagagccatatgtaacaattttccactgggatgtacctcaagcactagaagagaagtacggcggcttcctagataagagtcataagagcattgtaagattacacctacttcgctaaggtgtgctttgataacttcggcgacaaggtgaagaattggttgacctttaatgagccccagacatttacttccttttcctacggaactggggtctttgccccagggcggtgctcacctggactagactgtgcctacccaactgggaattcactcgtcgagccttacactgctggccataacattctcctagcccacgctgaggctgttgatctttacaacaagcattacaagcgcgacgacacccgcatagggcttgcgtttgacgtaatgggtcgtgtgccatacggaacatcgtttctggataaacaggccgaagaaaggtcatgggacatcaacctaggatggttcttagagccagtggttcgtggtgactaccccttctccatgagatcattggctagggaacgactacccttcttcaaggacgagcagaaggagaagctcgccggttcctataacatgttggggttaaactactacacctcacggttctccaaaaacatcgacatctcaccaaactactcacctgtgctcaacactgacgacgcctacgccagtcaagaagttaacgggcctgacgggaagcccattggtcctcctatgggaaatccatggatctacatgtaccctgagggcttgaaggatctccttatgataataaagaacaaatacggaaacccacctatctacatcaccgagaacggaatcggggatgttgataccaaagagacacctctacccatggaggctgccttaaatgactacaaaaggctagattacatccagcgccacatcgctactcttaaggaatcaatagacttgggatcaaatgtgcaaggctacttcgcttggtctctgctggacaactttgaatggtttgccggcttcaccgaacgttatggcattgtctacgtcgaccgcaacaataactgcacgcgctacatgaaggagtctgccaagtggttgaaagagttcaacaccgcgaaaaagcccagcaagaagattcttacgccagcttaaaaatcgggggcctcatgatgtgggtgcagcccataaaaactgtgtggtttggaaccgaagattttctctttttttttctgccacgagaggttctctggaggcatactctccagcaccgtggctaataacgcgttgttccaattcagtctggccttgtcatgcatgcaataaataaagtgatgggtttccctgtttcaatatccacaataatgttgaatcactatggatgatgtcttt

SEQ ID NO: 97263 - DNA, 2092 bp, Zea Mays
acacacttcacaagcagctcaaagctctagttctagctagctagcaaagggggggaaaatggctccgcttctcgctgctgccatgaaccacgctgcagcccatcctggccttaggagccacctagtaggacccaacaatgagagtttctcacggcaccacctgccgtcttcttctccacagagcagcaagcgaaggtgtaaccttagctttactacacgatctgcaagagtaggcagccaaaatggagtccaaatgttgagcccctcggaaatcccacaaagggactggttcccctctgacttcaccttcggtgccgccacttcagcgtaccaaattgaaggtgcttggaatgaagatggaaagggggaaagcaactgggatcacttctgccacaatcatccggaaaggatactggacgggagcaattcagacattggagcgaattcgtaccatatgtacaaaacggacgtcagattgctcaaggaaatgggcatggacgcatataggttctctatctcttggcccagaatactgccgaagggaaccaaagaaggaggtattaacccggatggcatcaagtactacagaaacctcatcaacttgttgctggaaaacggcatagagccatatgtaacaattttccactgggatgtacctcaagcactagaagagaagtacggcggcttcctagataagagtcataagagcattgtagaagattacacctacttcgctaaggtgtgctttgataacttcggcgacaaggtgaagaattggttgacctttaatgagccccagacatttacttccttttcctacggaactggggtctttgccccagggcggtgctcacctggactagactgtgcctacccaactgggaattcactcgtcgagccttacactgctggccataacattctcctagcccacgctgaggctgttgatctttacaacaagcattacaagcgcgacgacacccgcatagggcttgcgtttgacgtaatgggtcgtgtgccatacggaacatcgtttctggataaacaggccgaagaaaggtcatgggacatcaacctaggatggttcttagagccagtggttcgtggtgactaccccttctccatgagatcattggctagggaacgactacccttcttcaaggacgagcagaaggagaagctcgccggttcctataacatgttggggttaaactactacacctcacggttctccaaaaacatcgacatctcaccaaactactcacctgtgctcaacactgacgacgcctacgccagtcaagaagttaacgggcctgacgggaagcccattggtcctcctatgggaaatccatggatctacatgtaccctgagggcttgaaggatctccttatgataataaagaacaaatacggaaacccacctatctacatcaccgagaacggaatcggggatgttgataccaaagagacacctctacccatggaggctgccttaaatgactacaaaaggctagattacatccagcgccacatcgctactcttaaggaatcaatagacttgggatcaaatgtgcaaggctacttcgcttggtctctgctggacaactttgaatggtttgccggcttcaccgaacgttatggcattgtctacgtcgaccgcaacaataactgcacgcgctacatgaaggagtctgccaagtggttgaaagagttcaacaccgcgaaaaagcccagcaagaagattcttacgccagcttaaaaatcgggggcctcatgatgtgggtgcagcccataaaaactgtgtggtttggaaccgaagattttctctttttttttctgccacgagaggttctctggaggcatactctccagcaccgtggctaataacgcgttgttccaattcagtctggccttgtcatgcatgcaataaataaagtgatgggtttccctgtttcaatatccacaataatgttgaatcactatggatgtgctatgtgttccagctttatcgtgaagctgcggtgtataatagaaatttatatggttttaaaaatatttttatacaactttgtaattaaaacatttttcattt

SEQ ID NO: 97264 - DNA, 668 bp, Zea Mays
gatctggttgcgctgtgtgttattttttgtgaaataaaaatctagatggttgtgtttatgatagatgttactatacggtcgcacttgccgtcaattcaatttttatttgtgcaggaatcggggatgttgataccaaagagacacctctacccatggaggctgccttaaatgactacaaaaggctagattacatccagcgccacatcgctactcttaaggaatcaatagacttgggatcaaatgtgcaaggctacttcgcttggtctctgctggacaactttgaatggtttgccggcttcaccgaacgttatggcattgtctacgtcgaccgcaacaataactgcacgcgctacatgaaggagtctgccaagtggttgaaagagttcaacaccgcgaaaaagcccagcaagaagattcttacgccagcttaaaaatcgggggcctcatgatgtgggtgcagcccataaaaactgtgtggtttggaaccgaagattttctctttttttttctgccacgagaggttctctggaggcatactctccagcaccgtggctaataacgcgttgttccaattcagtctggccttgtcatgcatgcaataaataaagtgatgggtttccctgtttcaatatccacaataatgttgaatcactatggatgatgtcttt

SEQ ID NO: 97265 - DNA, 723 bp, Zea Mays
atggtgccgctggtcgacgaatatggcttcagctgtgctgcgccccctcaagacatggtgccgctggtgagaaagcttaaggacataatacaggctaacaacaacacaaccacagtcaaatgcctgcggacagtgaagcttacctgcaagctggtcgtttcaatggcacagctcaagcccatgtgcatcaaagatttcacagagcacaatttcatggatctacacttggagtctttgaagacgttgtcagatctcgataactgtctcatattatttgaggtcgatgatcattatcaggtgacaaagactgatcaaatttatcaaatgatggtagcagctcaaggggtgcaacatatagaaagcccatcacaacatgggtctaattctcgacagaactcaagggtgcatcgttcagatgaggtagcacatgattacaatggtaataaccattcacaaaatatggttgaagatgacttccaacttactaggcgagttgcaagcactatgggtcgtctaaggaatcgtgtagatgttaatactattgaagagcaaagtcacaggcgagacattgcaacaatgatgggtcgtaacaaaaaatcaacgttgacccaaggttctatagcagcagttctcttgcatcaggctgttggcgacaatcatgatataaggggcctgattgattgcccgcatcaatggcaatgcaagcctgaccaggctctctag

SEQ ID NO: 97266 - DNA, 252 bp, Zea Mays
ttcttttcttatttttttctttccttttcgttctttcatgtgcatatcaatagaaaggatactggacgaggaaagtggagacgttggagcgaattcgtaccatatgtaccaaacggatgtcagattgcttaaggaaatgggcatggacgcttataggttctctatctcttggtccagaatactgccaaagggaacggtcgaaggaggtattaacttggatggcatcaatgtaacagcctaaatccatcaact

SEQ ID NO: 97267 - DNA, 516 bp, Zea Mays
atggagcgaggcttggaggcagaggaggtggaggtcgtggagcgcatggtggcagacgagcgcctagtcgagtgggaagtctcccgcgaggacggtggcggcggtgaggtggacacggttcttgaagccgaacaagagatcgaggttgaggaggccagcgtcgacgatgacggctgggaggccgtggcgcgcgagggaggcggcgaggctggcggttgtggtggtctttccgacgccggccttgctggagtcactcaactacatccgagcgacgtgcccttgcgtcggccgagcaaaatgcagcacgtcatcaaagaagcacgagggggtggggagacggaggggcaggcggggccagaggtggaggcggcgtgcgcaggcggggccagttgggagagaatagacgctttcgcaagtcgcaactccactaaattgaagacaaatttcaggtccgtgggtacgcgtccacacgtcgaccgacccaaaagtattcatcatgatcaccactttgtctaa

SEQ ID NO: 97268 - DNA, 759 bp, Zea Mays
atggctggttttagcacggaagcatctgcagctggctctcaaatacgaagtgatggatatgatccactgaaagatccaaaaaggaaacccaaatctgatgatctaggctggaagtatgcctattatgtagagcctggcaagcgagagttgatccaatgcgccctttgcccgaggcaaattaaaggagcaattctgagggtgaagaaagatcttgtgggcggatacaaagatatcctcaagtgtcccaataccacaactgcaattgctagagaattaaaggaggctttggatgaaggaaaaagggatagaccaaagggacaatactttgatgaaaaaatatctgtgggacaatatcatagcttgttacagtggtcagaccccaaaaagaacactgcaggtcacaaacagcacaattgtcgcattgatgatccgccgcccctggggcttgagcagcaggccagcggcgggctcctgtgctccgccccggcctcgctggtgctggcgcttgggctggcgcggggggcgcccttgtcgaaaggcgagcacccgttgcgcctgcgcggctgcgccgttcccgctggacggccaagcaccgaggggagatggcgacgatcgaccgctaagacagcacgaagcacgagcaagaccggatcgaagtgcagccgtgctggggtaggcggcaaccgtcggtgcctcggcaggacggcgggctgcggcgcatcgtccgtgactctgcgacgggcggacgggagacggtag

SEQ ID NO: 97269 - DNA, 1911 bp, Zea Mays
agcctatcctacgacacaagcaaagcaaagcagctcaaaaaactttagccagctatcaagacatggctccacttgttgctgctgccacgaatcacactgcccatagaagccacatagtaggacccaacaatgagaattttccaaggcaccaaccttgttcatcacaaaacagaaacaagagactcaggcttaggtcacgagcacaaaggataagcagtcagctgcttgcaagccgaaagcttatgccatggcaaatccctaaaagggactggtttcctcctagcttcatctttggtgccgccaccgcagcataccaagtacactaatttaactttaatttgtttctctacaacggaaaaatgaccatgtctttatttgttagctgaaacgaaattatacatgtcataataactaataataccataaagaaaatcatgcattatacatgtcatctatgtgtgtgtgtagattgagggcgcctggaatgaagatgggaaggggccaagcaattgggatcacttctgccacaattatccggattggatactggacggaagcaatggggacactggagccaattcctatcatatgtaccctgcggatgtcagattgctaaaggaaataggcatggacgcgtacagattctccatctcttggtccagaatactgccgaagggaacgctcgaaggaggtattaatcaggccggcatcaagtactacaaaaagctcatcaacttattgatagagaacggaatagagccatttgtaacaatttttcattgggacgtccctcaagcactggaagacaagtacggtggctttttaggcgacaggattgtaaaggattacacagacttcgctaaggtgtgctttgagaacttcggtgacaaggtgaagaattggttgacctttaacgagccacagacatttacaaccttttcgtacggaacgggagtttttgcccctggacggtgctcaccaggagaaaaatgtgctcagcctattgctaactcactcaccgaaccatacattgctggccacaacatccttcgagcccacgctatgactgttgacctctacaacaagaattacaagggtacagacggccgcattgggcttgcgtttgacgtaatgggtcgcgtgccatatggaaatacatttctcgatgaacaggcccaggaaaggtccctcgatcaaaacctaggatggttcttggagcctgtggtccgtggtgactaccccttctccatgagatcattagcgaggaaacggctacctttcttcacggataatgagcaagcgatgctagcgggttcctatgacatattggggataaattactatacctcaaggttctctaagcacgtcgacttctcagaagactactcacctaagctcaacgccgacgacgcctatgccactgcagaaatctttggacctgacgggaattctattggtcctcctatgggaaatccatggatctacatgtaccctaaaggcctaaaggatcttcttatgatcatgaagaacaaatacggaaacccgcctatctatatcaccgagaacggaatcggggacgttgacacaaaggacaatcctctatccatgcaagatgcgttggaggactacaagaggctagattacctccagcgccacatctcagttattaaagaatcaatagacttgggggcggacgtgcgcggccacttcacatggtctctgttggacaacttcgagtggtctagtggctacaccgagcgttacggcatcatctacgtcgaccgtgacgacggctacaggcgctacctgaagcgctcagctaagtggctgagagagttcaacggagctgccaaaaaggctgaaaagaaggttcttacgccagcttagaatgtagtggtgtgtagtttcagt

SEQ ID NO: 97270 - DNA, 2045 bp, Zea Mays
agcctatcctacgacacaagcaaagcaaagcagctcaaaaaactttagccagctatcaagacatggctccacttgttgctgctgccacgaatcacactgcccatagaagccacatagtaggacccaacaatgagaattttccaaggcaccaaccttgttcatcacaaaacagaaacaagagactcaggcttaggtcacgagcacaaaggataagcagtcagctgcttgcaagccgaaagcttatgccatggcaaatccctaaaagggactggtttcctcctagcttcatctttggtgccgccaccgcagcataccaaattgagggcgcctggaatgaagatgggaaggggccaagcaattgggatcacttctgccacaattatccggattggatactggacggaagcaatggggacactggagccaattcctatcatatgtaccctgcggatgtcagattgctaaaggaaataggcatggacgcgtacagattctccatctcttggtccagaatactgccgaagggaacgctcgaaggaggtattaatcaggccggcatcaagtactacaaaaagctcatcaacttattgatagagaacggaatagagccatttgtaacaatttttcattgggacgtccctcaagcactggaagacaagtacggtggctttttaggcgacaggattgtaaaggattacacagacttcgctaaggtgtgctttgagaacttcggtgacaaggtgaagaattggttgacctttaacgagccacagacatttacaaccttttcgtacggaacgggagtttttgcccctggacggtgctcaccaggagaaaaatgtgctcagcctattgctaactcactcaccgaaccatacattgctggccacaacatccttcgagcccacgctatgactgttgacctctacaacaagaattacaagggtacagacggccgcattgggcttgcgtttgacgtaatgggtcgcgtgccatatggaaatacatttctcgatgaacaggcccaggaaaggtccctcgatcaaaacctaggatggttcttggagcctgtggtccgtggtgactaccccttctccatgagatcattagcgaggaaacggctacctttcttcacggataatgagcaagcgatgctagcgggttcctatgacatattggggataaattactatacctcaaggttctctaagcacgtcgacttctcagaagactactcacctaagctcaacgccgacgacgcctatgccactgcagaaatctttggacctgacgggaattctattggtcctcctatgggaaatccatggatctacatgtaccctaaaggcctaaaggatcttcttatgatcatgaagaacaaatacggaaacccgcctatctatatcaccgagaacggaatcggggacgttgacacaaaggacaatcctctatccatgcaagatgcgttggaggactacaagaggctagattacctccagcgccacatctcagttattaaagaatcaatagacttgggggcggacgtgcgcggccacttcacatggtctctgttggacaacttcgagtggtctagtggctacaccgagcgttacggcatcatctacgtcgaccgtgacgacggctacaggcgctacctgaagcgctcagctaagtggctgagagagttcaacggagctgccaaaaaggctgaaaagaaggttcttacgccagcttagaatgtagtggtgtgtagtttcagttcagctgtgtgtctgatgtgtatggccgtgggatgaaacaagctagctagaatgtagtggtgtgtagtttcaattcagtagtgtgtgtccgacccgttttatgcaaataaataattaatggacgtgtgatccatttgtcgatatcactatcgatcggtaatgttgaattactacgtacgatgtcctgtttttttaggcaaacaccaagggttcaaccgtccataaatctgttatatcggtgatgaacaacagcacgtaaccaaggataaagggttcacccataga

SEQ ID NO: 97271 - DNA, 1724 bp, Zea Mays
gattttctgtttggtaattcggagaatgaaatgtgtagccgtatagcgcgtcgacccattatacatcgctaaaaatcttgattcgaaatatgtacgatttcctttaaaaaaagaagaaataaaaaaaatctacgccgccctcatcctatgattttcttgcagccaccaggggatttttttagtcaccatgctgccgtcgtcttcatctcgtggagatttttctctcccgtcgttctctctctctccctctccctgatattctctgcgcacgctctgtcttcctcaagtcgtcgtgcgcccagctcggccttcttcccgacgcccggccggagctccctcctatcccagccatggcgcgcccctctccctggcacttccccagcgcgcgccctcgtctcctccactcatgcccaaccgagttccctgctgtagcgccctggcccctgctcggatcctcgtcatcgagcccagccgaagccccatgccatggatgagcaccctgccaaactccctgcgcgcagccgcgcgcttctctgctcggccatgcctcgtcttctcaccagctcgacgcccttctctctgcaggaactcgcctcgccgtcctcactgctgatggccggttgtcttctcactgccaacatcgactccagctccttggacacgcgcccctgattcccatgccgagcttgcccattttctgctcggcttgagttctaaacctcccttcctgtcgcgttcttcccctacctggttgagctcgcccctccctatggtgctcgaccgagccctccatcgctgctccatagcgcaaggagctcgcaaagtcaccgccccttccctggctactcccctactccattccgctgcttgcgaggtatccgataaaatgtctgagcagatcgtcgagtcgtgcgcagcgccattgacgcctgccgggtgttcgatactttgcgtggctaagtcacggtcctgcacagtagtgcctgctccctgctccctgctccgtgttccagtccccagtgcctgaccgtcgtcgtcaccggtagtgcactgccgcagcgttcctacgcatcaacaccggcgagtcgtctcgtgaccagctgaaacacccctgcgctcgtctcctgtggcagcgcccggtgttcttgccattgtcgtggacctcgtcctgctcctctctacgccggtgcgtgcccaagtcctcgtccaagcaccagccgtgcctctggcctttggtcgtcgtgctgtgcgcgaggactgttcgtagctcgcctgtgtgcccagacgtctcgaaccacatcgtcaactctcggcaccacgagctcacatttccttgcacacatttccgcagaccctgccttatcacgcgtgtgcgttatcgatctcgtcgtcgttccgtgcgtcatcaagaaatcccaagagtcgggtgaagacgaagctagcagcgtgatgttcaccaagtgctcgacacaagggctgaaccggaatccttgccgtgttcgcggatagcgcgtcaaatttagtcaggagtaagtcgattcatatttctgttagcttaattattggattgatgaatggatgcatctagtattattgaattagttcgatgaatgtgatgtgattattttcatgattttcgagtactcgcgttgggtgctattgttaggtttgagatgttaattatgtgaagtgtggtaaattagtgaatgaagtttaaatttagc

SEQ ID NO: 97272 - DNA, 1014 bp, Zea Mays
ctccgtctctctcctccgatcctctcttgccctagggagagggagagggagaggaagagagagatatccgcgccgtccgcccagggagagaagcaaagatcggcaaccactgaaccgcgctacgcgtggtcgtcgtccggagccacgcgtggcgccgcggcgatgggcaactgctgcgtgacccggccgttttctggcaagcggcgaggcggctcccgcggtggcgctggcgggaaccgttgcgggcgcctcggcggcgccaacgtgcggtcctgctccacgctgtcctccatctccgacgcggcgcgcaccgccgcgacgcaggcgtggtcgccgctgaccgtgctggggaagggcctggccgcggaggccagcgccgaggagctgctccggcgttaccagctcggcgaggagctggggcgcggcgagttcggcgtgacgcggcggtgcacggacacgtccacgggcgaggtgctcgcgtgcaagtccatcagcaagcggaagctgcgcagcagcgtcgacatcgaggacgtccggcgtgaggtggccatcatgaggtcgctgcccgagcaccccaacgtcgtacgcttgcgagaggcgttcgaggacgccgacaccgtgcacctcgtcatggaggtctgcgagggcggcgagctttttgaccgcattgtctcccgcgggcactacaccgagcgtgcagcagcctgcgtcatgcgcaccatcatggaagtcgtcctgcattgccacaagcatggcgtcattcaccgggacctcaagcctgagaactttctgtatgccaacacatctgagaactcggctctcaaggtcatcgactttggtctctctgtgtgcttcaaaccaggtgacaggttcagtgagatcgttggatccccctactatatggctcctgaagtgctgaagaggaactatggacaagaaatagatatatggagtgcaggagtcatactctacatcttgctatgtggcgtcccaccgttctgggcaggatcttaa

SEQ ID NO: 97273 - DNA, 1019 bp, Zea Mays
ccaaagttgtttggtggaatgaacctgaccatcatttatcgccttcaacaatgaagaacatccctggatacagaatgccagtgcagctcccaacatcccacttggagaagcagtgaggtccaggctgaagcaattcactgttatgaacaagttcaagaagaaggccctgcttgtggtggcagagtacctaccagccgaagagctggaagcaatcagggagttgtttcagttgctggacacgaacaaggatgggcatcttacaatcgaagaactcaggaagggaatgcgattgataggccacaatgtccatgacactgacgtcgatatgctcatggaagctgccgacatcgacgggaacgggaccctggactgcaaggagttcgtgacagtctccattcacctgaagaaaatccgtagcgaggatcacctgcccaaggtgttcagctacttcgacaagaacgggagcgggtacatcgagatcgaagagctgaaggaggccctctctccaagaggtgaccagaaggcgatcgaggacataatcctagacgtcgatatagacagggacgggaagataagctacgaggagtttgagctgatgatgaaagctggagtggactggaggaatacgtcgcggcagtactcgagagcggtgtacaacaccctcagccgcaagatgttcaaggacgcgtcactgaagcttggtagtaacaatggtccacttgctgctgcagccgtcaaagaacaacaagatgttgattgagtgatgtgtctactgcctgcaaactcgactaaaacagagaacacgagaactgtacccagttttccatgttttgtgtataggtcgccacattttggcaaggaaatgtatcaggggcggtcaattgactcaggttcaggtgcattgtgcatatgtcaagacactcccaattacaccctttatttttctcataaaaaaaacaatgttgttatctaccaacatcagcaagctgtgttgtaaaacatatctttaatcgttatta

SEQ ID NO: 97274 - DNA, 590 bp, Zea Mays
gccgacatcgacgggaacgggaccctggactgcaaggagttcgtgacagtctccattcacctgaagaaaatccgtagcgaggatcacctgcccaaggtgttcagctacttcgacaagaacgggagcgggtacatcgagatcgaagagctgaaggaggccctctctccaagaggacgggaagataagctacgaggagtttgagctgatgatgaaagctggagtggactggaggaatacgtcgcggcagtactcgagagcggtgtacaacaccctcagccgcaagatgttcaaggacgcgtcactgaagcttggtagtaacaatggtccacttgctgctgcagccgtcaaagaacaacaagatgttgattgagtgatgtgtctactgcctgcaaactcgactaaaacagagaacacgagaactgtacccagttttccatgttttgtgtataggtcgccacattttggcaaggaaatgtatcaggggcggtcaattgactcaggttcaggtgcattgtgcatatgtcaagacactcccaattacaccctttatttttctcataaaaaaaacaatgttgttatctaccaacatc

SEQ ID NO: 97275 - DNA, 1331 bp, Zea Mays
agtaatgagatccacagatttatgtattcacaatgattccccgatttgcttgcagtactaattactctgcgcattattttgatcactactgctagcagtacaattacaatagtttatttccactggagatggctgctgcacactcggatggttggttcatcaggcagaggcaggttgctcagctggaacagagagcacagcatgtcggtcgggcaaccaacccatctactcagcccctatgtgtgctgctaccacaactaccaaactctgcagctgcaatcatggcagctgccaacgcccgccgtcgcagctgaaacgctgcacctggatcactttacagcagcagcaacgtgttcgcgatcaggtctggtcatctggtttcttgtgtggtggcggccggcataccggcatggtgtgtgcttccagacggcgaagaatggcgcgcatggttcggcgccgttcagctgcaaaggcggacggtgcacgccaccgcctgcgcccagtacttgagccgcgccttcacctcgtcagggctgtcacctgcgctatccaaaaagaaaggactgcattcgttagaacatatgccgataaacaaagaagcgaacagatcgtcgacaagtggtgtccttggttggttccgtgacgggaaaagattccatcttgatgtagacaagttggttttctccgctccggtgaccaaggaaggaaggaatcccaagtcaagtcatggaggaagacaggcggcgatctgctatgtgttgcttaccggggctggagatcttccagttggtgacaggcggcgacggcgtggcggcatctggtgcggcggcctcgtgctgctgcggcttctcgtcgtccagctggaggcgctggctcatggagtagcacagctcgagcgccggcagggtgctccggagctcggggatctcgtcgtagttgaagccgaagcccaggtcggcgcatcccttgagctcctcgaggtcgtcgtccgtgaggctcctggaccgccccaccgcgtcgtctccgcccgcgagcacgacgggtttcgagtcccgccgcgccggccacgccgcctcccactgcgccccacgccacacgtcctccgcctcggggtcggcgacgccgtcgacggcgctggcactgccctgtttccggctgctgcggcgtcggcggcggttgcgttggcggagaaggcgtgctggtggcgggctcggcggcggggaggcagaggcggatggggaggaagatgagggctccacaaaggcggaatctgagatccacatctcggcggcgtggtgtcgtcgcttggacactgagaggggacagcgagg

SEQ ID NO: 97276 - DNA, 117 bp, Zea Mays
atgggtgacggatgggagcctggaaaggtggagatcctcctagaagcatcgcgtgacggagaggctggtgggtgggcgagaaggtgtggacttctgagaatatcaagaggaacttag

SEQ ID NO: 97277 - DNA, 325 bp, Zea Mays
cttggcttagcgatttaaattgctctctgaactttatgtgttgggaatgtcagaaacgagcagcttgacagacctaataactagcattcttcagagggtcggagatgacattgacagaaaacacatgccacaaattttgtatgaagatgaggaccatgataaggtcatattgtcgtcggacagtgaccttatagctgccgtagaccacgcaagacagatcggttggaagagcctaaggctgcacttggactacgcccaccggaagagaggggacagttcctcagacttcgagtacgctggcaaggatgcatgggcttctgcatac

SEQ ID NO: 97278 - DNA, 166 bp, Zea Mays
atgtactacttgtatttttttaataatcaatgcttcaaaagtctatatagatggtgacttgtgtcagggttttcccattattgtaagtttgttacaagcaagtgctttccctcacacaacttcaccttttctttgcatgtttattacttttgtttgctggttttga

SEQ ID NO: 97279 - DNA, 3270 bp, Zea Mays
tagttttctttcttgttggacattcgggcggccaaagcagcggcccccttatctccagggaccaggggaggtcgcacaccaacgcaccgtccttccctttcctcctcctcctccctctcctcggaaggtcaagtgacggtatttgtgaccatggcagggaccttactccagtcagttgccctgggaacaccatttgggggtcgcatgagaacccattgttggaggtcccatggcaccaggaggcctgcctctatgttggcagtgtcacttagccgccctgtcaagatgtcagcatttgtgggtctaagatcagtgcatagcttctcggtcacaccgacggtgtccaattccaggtcggcagttgcatcttacaggtcatcgcgacagacaagacgatctcgttttgtcactcaggcaatgtttgagaggttcacggagaaagctattaaggtcatcatgcttgcgcaagaggaagcaaggcgcctgggccacaactttgttggaactgagcagatcctcttgggtctgattggagagggcactggtattgcagctaaggtgctcaagtccatgggaataaatcttaaggatgcacgtgtggaggtggagaagattattggccgcggcaatggttttgttgctgttgaaataccattcacaccacgtgcgaaacgtgttttggagctctccttggaggaagctcgccaattaggacataattatattggatctgagcacctgctccttggactgcttcgtgagggtgaaggtgtggcggctcgtgtgcttgagagtctcggagctgaccccagcaatatccgtacacaagttattcgaatgattggtgagaccacagaagctgttggtgctggagttggcggcggcagcagtggtaataagatgccaactcttgaggagtatggaactaatttaacaaaattagcagaggagggaaaattagatcctgttgttggaaggcagccacaaattgagcgtgtggtacaaattttaggcagacgaaccaagaacaatccctgcttgattggagagcctggtgttggaaaaactgcaattgctgaaggacttgctcagcgcatttctacaggcgatgtacctgaaacaatagaagggaaaaaggtcataacccttgacatgggacttcttgttgctggcacaaagtaccgtggagaattcgaagaaagattaaagaagctgatggaggaaataaagcaaagtgatgagataatactctttattgatgaagttcacactctgataggagcaggagcagcggaaggtgctatagatgctgctaatatcttgaagcctgcgttggccagaggtgaattacagtgcattggagccactacactagatgaatataggaagcacattgagaaagacccagcacttgaacggaggtttcaacctgtgaaagtgccagaaccaacagtagatgaaaccattgaaatcctcagaggactgagggaacgatatgagatccaccataaacttcgttacactgatgaagctctgattgcagctgcaaagctgtcatatcaatatatcagtgatcggtttctcccagataaggcaattgacttgattgatgaagcaggttcccgtgttaggctacagcatgcacaggtccccgaggaagcaagagagcttgacaaggagctcaaacaagtcacgaaacagaagaatgaagctgttcgaagccaggattttgagaaggctggggaattgagagaccgtgaaatggaattgaaggcccagataacagccctcattgacaagagcaaggaattgagcaaagcagaggaagagtctggagagacaggacctatggtcaatgaagaagatatccagcacatagtatcttcatggactggcatccctgtggagaaggtttccagcgatgaatctgataagcttcttaagatggaagagactttgcacaagcgtgtcattggccaagatgaggctgtggtagcaattagtcgctccatccgccgtgctcgtgtgggtctcaagaaccccaacaggccaattgcaagctttatttttgctggtcccaccggcgttgggaagtctgagcttgcaaaggctcttgcagcctattactttggctctgaggaggctatgatccggcttgatatgagtgaattcatggagagacacacggtatccaagctgattggttcacctccaggatatgtaggatacactgagggtggccagctgacagaggcagttcgacggcggccatacacagttgtgctctttgatgagattgagaaggcacaccctgatgtcttcaacatgatgcttcagattttggaagatgggagattgactgacagcaagggaaggacggtggacttcaagaacacactcctgatcatgacctcaaatgtagggagcagtgtcatcgagaagggtggaaggaagatcggatttgaccttgactctgatgagaaggacagtagctacagcaggatcaagagcctggtcatcgaggagatgaagcagtatttccgacctgagttcctcaaccgtctcgatgagatgatcgtgttcaggcagcttaccaagctcgaggtcaaggagatagcggacatcatgctccaggaggtctttgacaggctgaaggccaaggacatcaatcttcaagtgaccgagaagttcaaggagcgggtggtggacgaaggctacaaccctagctatggtgcacgcccgctgaggcgagccatcatgaggctgctggaggacagccttgctgagaagatgctcgcaggggaggtaaaggagggcgactctgccatagtagatgtggactcggaggggaaggttgttgtgctcaatggtcagggcggcataccggagctctcaactccggcgatcaccgtttagctcgtacataacaaatgacaaaattaatagcatagtttttgttcaaacacattatcatttatggttagaatatctgtgtatatgtagtggtatagtcaatggggaaatcgttcctgcctctaaattcctttttttcaagttaaggtgtttcttttgtcgcaagttaatctgcctggttattaagatattgtttacagagtgatgtgaaaagctcttgtctgtgttcaaggatacatatacagacgggtcaagtagcatgtaggcaatagttccaatataggcctcagcgttgtctttaaccgagcatccgaaaacacttgcacctaaataccgtcgcctgaaaatacaaaaaaa

SEQ ID NO: 97280 - DNA, 214 bp, Zea Mays
gatctagtgctagatgaggagaataccgagagtgacacaccattaccataaagcctcatggctcaaatcacttcaagggaaactttggctgagtggactaagaagaatgtgggggacactcacattggtaagcgaaaggtgtagttcgtgttaccaaaaagaagcaaagaaagaaagaagtggcaagcgatgatgagacctatactggtgatta

SEQ ID NO: 97281 - DNA, 1194 bp, Zea Mays
atgcagttgcatctggagtcggttctcttggtggcgctaggcggcagcacaactgatctgcaccacacctgctcgactctggaggatctctccttgggcgccttcagcacacaggaggaggaagcggaggcatacgatatcgcaacgatcaaggtccgtggcctcaacgccttcaccaaatttgacatgagttgctacgacatcaagagcatcctggatagcagcactctccccttcggcggcaccgccaagcgcctcaaggagaccgaggccgctgcgtccgcacgagatcataccggcgtgcacagggtgttggagcccctagaccgcagatggcatgtcttgggtctcgggtatgatgtagacatagatgatcgtctgattgagagtgctgctgttgtgcactataatggaaacatgaaaccctggctgaagctggctattcgccgttacaagtatatatgggagcgatttagctttaaagactttgttagcaaagataatgctactgggtcaatgaagggctattgcatcgatgtcttcactcaagcattggcattgcttccttatccagttacatacaggtttataccttttggcaatgatactgaaaaccctcattatagccaacttgtgcagatggttgccgacaatgattttgatgcagcaataggggatatcgtaattacaatgagccgaactaaagctgttgatttcacccagcccttcattgagtcagggttgtcttttcttgttgtgggtgtggttatttggattcttgagcatcgaataaatgatgatttccgcggctcgccgcgacaacaaataataactattgtttggttcagtttttcgactctgtttttgcacatacttgatacttctataagaggacttgatgacctgaaaaatagtgattatcctattggtttccaagttggttcttttgtcgaagaatacatgatcaaggaacggaacatttcacagtcgaggctaaaagctcttggttctcctgacgagtatgctgaaaacctcaagctaggtcccaagaaaggaggtgttatggctattgttgatgagcgcccctatgttgagctgtttttgtcaacttactgcaagattgctgttgctggctcagatttcaccagcggtggatggggctttttcaagctctgcaaggcgaggtctgtttag

SEQ ID NO: 97282 - DNA, 534 bp, Zea Mays
ccaaattcggcaacaatagttttagcttcgacattaacactgtccttctcgagaaaagatcctccttctcttgaacaactaatccagagagcttcataacttctgaaattggagctgtctcagtggcctcagtttctccaccttcatttgttagtctagcagtagacctaattctagtcatttcagttcttgagacgaagctaactttctattttttacgactgttcgaagaccacttaacaaatgcagagcacagacagcttcggcttcagtaaaaaactttagcagcacaacgatgcaatagcaatgaatgctatagtaatttcttaccaaccagtctgtttatatagtcttgcaggtgaagaaggcgaaccaccgcgctgcttatactggctgatcgctggaccagcgcaggccgtaactttgttattcgtttttttaataacaagtttagagaaagtgtttttcggaccttcggcattcagaagcctttgtgtgtttcgtggatcgagctcgttataaaaaaacaaccta

SEQ ID NO: 97283 - DNA, 531 bp, Zea Mays
tttcaacagcaaattcaggcattcaactacaatttagcgcctgtgcatgttcagcaattcagttttctggacacaggcatgcaacaacaaatgttcaacaacgcattatttgtccaaggtacaaacatcagtctcagtttcaactagcaaatttagcagcacatacaacaacaaatattcagtttcaactagtagttcaactagcaagtgttcagatacaaacagcaaatggtcccctgctctttcttccctgttcaatgcagctgagcagagctcactgtagcctttgctgttgataggagagctcaccgagctcatcgtagctgagcagagagcgtgccggagacaaggatgggtaggaggaggatccactcgcgctcgtcaagcgttgcagcccgtgcacgccggagtcagggaggagaaagacagaaacaccagagcagggatgggagagcaggccaccgctggaggagagggtagggagtgcgccgcaccggagaacaagcagttcgcactgctggagatccacct

SEQ ID NO: 97284 - DNA, 1096 bp, Zea Mays
atcaatccctcgcccacaaaggagagccagccaaaccttccacctcctccatttccagccccgtccccacaccagctcgcgtaacctcctccccatggctggaggcggcggcgcaggcgcgggctcgtcgtccggcggcggcggagggggcggcagggagggcgactgggactgcggcagctgcggcaaccgcaactacgccttccgctcgctttgcaaccgctgcaagcatccgcgcctcctcgtcgaccccaacaccccgcgcgactccaagtggctaccccgcgccggggactggatctgcaccggttgcagtaacaataattatgcatccagaaagaactgcaaaaagtgtggcttgcccaaggaggaagcagcaatgccagcattgcaaatggcagggatggctatgccagcttatgcaacttatattgcaagactacaaagccttgctgcttctgcttctgcctataacatgaactttgggatggctgccaattcacctttgcagcagcaactacttgcaaatgcaaactggccctatgggatggctggtagatatgggatgcaatcttctggttggccatttggcaacggcaacccaaatcagtttttaggtgttccaaaggattggcgtaatggagattggttctgcagctgtggatctcataactattcatctcgtactcagtgcaaagagtgtggtgcacctgtaccatcgagcattccctccacaacaatgaaagctacatctgatgcctcttccagtatttatgcaatgctgtacactgtgttaaacatctggcaagtggttcactggtggacgcatctccaggtccgagcgtaaaaatcttaagttttgagcataaaacccctcggttataagcgtaaataccgagccaatatgaggttcatatctatggtgggttgtattcacgatcctatttttatgttaattccgaaaaatatgggagtcacatccatggggtttatatttttatgcagatccaaaaattatggcagatttgtggtggtgtagtattgtatggttaagacttataagacttatgtatcgtgtggttgagagttgaaactt

SEQ ID NO: 97285 - DNA, 1114 bp, Zea Mays
atcaatccctcgcccacaaaggagagccagccaaaccttccacctcctccatttccagccccgtccccacaccagctcgcgtaacctcctccccatggctggaggcggcggcgcaggcgcgggctcgtcgtccggcggcggcggagggggcggcagggagggcgactgggactgcggcagctgcggcaaccgcaactacgccttccgctcgctttgcaaccgctgcaagcatccgcgcctcctcgtcgaccccaacaccccgcgcgactccaagtggctaccccgcgccggggactggatctgcaccgcagcaactacttgcaaatgcaaactggccctatgggatggctggtagatatgggatgcaatcttctggttggccatttggcaacggcaacccaaatcagtttttaggtgttccaaaggattggcgtaatggagattggttctgcagctgtggatctcataactattcatctcgtactcagtgcaaagagtgtggtgcacctgtaccatcgagcattccctccacaacaatgaaagctacatctgatgcctcttccactcacaggcgtcctggctacagcctcagctagttggggcaaaccatctagaaggtcaatttgaggacggtcttcttcctctagtgtagccgcttcttcatctgtgagttgagcacctggagcaaactgactgagacgggccctctcccttgatggactgggcgagagccgagcaagatgcacttgctctgcatgtgcaggctctacaaccttttcatctgttagttgttcacctggagcaaaagaaggactgagcgagagctgatcaagacgcacctgccatgtcttctctacagccctttctgactgcacaggcacctgctctgcatgtgcaggctctacaacctgtgccttgtctggtattgtggcacggttgtcacctgtgagttgtgcatctggagcacactggcattcaatgttccatcgtgaaacattgtctgtcacctgtgagttttgcataagtctaaactgatccattgttctagcaagaaaatcatcatcgcgagttttaaggaaacattcacgatccttcgcgtctttgacataatcag

SEQ ID NO: 97286 - DNA, 1531 bp, Zea Mays
atcaatccctcgcccacaaaggagagccagccaaaccttccacctcctccatttccagccccgtccccacaccagctcgcgtaacctcctccccatggctggaggcggcggcgcaggcgcgggctcgtcgtccggcggcggcggagggggcggcagggagggcgactgggactgcggcagctgcggcaaccgcaactacgccttccgctcgctttgcaaccgctgcaagcatccgcgcctcctcgtcgaccccaacaccccgcgcgactccaagtggctaccccgcgccggggactggatctgcaccggttgcagtaacaataattatgcatccagaaagaactgcaaaaagtgtggcttgcccaaggaggaagcagcaatgccagcattgcaaatggcagggatggctatgccagcttatgcaacttatattgcaagactacaaagccttgctgcttctgcttctgcctataacatgaactttgggatggctgccaattcacctttgcagcagcaactacttgcaaatgcaaactggccctatgggatggctggtagatatgggatgcaatcttctggttggccatttggcaacggcaacccaaatcagtttttaggtgttccaaaggattggcgtaatggagattggttctgcagctgtggatctcataactattcatctcgtactcagtgcaaagagtgtggtgcacctgtaccatcgagcattccctccacaacaatgaaagctacatctgatgcctcttccacattaggaactaagcggttggcttcagaggacctggccaatgactgggataataaaaggctaaatccaggaaatgacaattatccactttcaacaggagctgcaaataatttatttttgggtattgagcaaggagctggaagcagcaatggccagtctgcctttcccaagtttgacaatgggagctcagtggcattaccatctgggcagggaatgtctggtcttatgggaaaaggggcaaaatggcgtgacggggactggttgtgcaacaactgcaacaatcacaactatgcatctcgtgcgttttgcaacaggtgcaaaactcagaaagaatctgcagttcaccctggtgtgttatagcttgctgttggattattttgttccaggatatgttgctgcctgttctagctccttcctcaaggctgcggtttgagttttttcgattctgcagtgtttttgctgctctaaaatgtttgtctcgatatttcattagtgcttgttgaagttccccatttgtttatggtataagcgcttgaataaaatgtttctggaaagtaccggcctacaatctggattttggcaaaataattgaattagttgttgtacaatgaggcaaattgtcttacgttgtacttgatgaactctggagtattatcactcgtcgggttgaaaaggggaactatacaatgtaatttcagtacagattattattttttcctgagaactccagttgtgctgttatgcgagttttgcccattcagaata

SEQ ID NO: 97287 - DNA, 868 bp, Zea Mays
ctccctcacgcgcgcttctctccttccccttcttccttgctgcgctcgcctggccgcactccacctcgccccaggcgctcggccgcctatctccctgtgctcacccatggccatcgcgccttctcctggccgatgctcggcttcgagctcccatctcccatgcgcccatccgccacctcgcccttggtgctcgcccagcccaaccgcccctcctctctcctccctcgtctccatggctgcacgtggacctctctcctccccatcttctccgacggtcgcctccttgttgctctactggccggcgcccctctctcaatggcgcccagcccccagctcagatccctgcgcctgctcgcgtcgaccccggtcgccggagccgaactgcccttccatagcagactggcggcagagacctcgccaaattgcgcccctgctcgacgtcggtgatggccgtcgtggagcaccaatgtgagctcccagcgccctctcctccagtcttactcttgccgtggacctccttcgctctatctcatcatcaccgttctcgtcggatatcaaacctccgtatgccctagatgcgttgtcgccacgttcatgtgttgccatacgtgttttatgttcatgccggcaaaagaatcccaaaacagtgtggagaagcaagccccaggttgatgcccccaagtgctcggcgaaaggcctcaacaaggatcatcgccatttgtgcggagttctagttactatggagagattccaagagttgtagattgaggagaaagtgaagctcagttcaatgctcgccaggtgttcgatcgaaaactttattcggagaatatcaacgttctcgcaagctttgagtcggacttacttt

SEQ ID NO: 97288 - DNA, 168 bp, Zea Mays
aactgcaacaacatgggttcggaaaccctgagtacgaagtgtactttcgcaagtcttacccaactaaggaaaaatactctcaatgatatgctagatttgggaatcaaggtaaggtttagcaaaaatcaagcttactcatttgcagaaataagcatctaatagtggatc

SEQ ID NO: 97289 - DNA, 1325 bp, Zea Mays
gtctggaaccacatatatataaatagacctgtggtgtggtgctggtgccagcggccagccacgcgaccatgaacaccgagtacctcagggtgaagaagctccagcaggaggccgcccggtgcctgagcttgcacaagacaatggagctgcagccggagctgtcgctcggccctgtgtggccgggcttcgccgccggtgacctggccgccaagagctcctcgtccgagtctgacggaacctcccggaagaagaggaagcactacaccgccagctgggaggagcctcagcagccgcccgcgagcctggagctccagctcaacgacccactgcctctcgactgggagcagtgcctcgacctccaagtgagtacctttaatttctctcgaacggcagctatatctcaattctttattattccttctgcttctagttcaataaactacagtaatcatctaatgttttcatgtgcatataatgtgagaatttaatatgccgacacgtagtttacaaaagctattagtagtgacagaaagccttttgctagtggacagctattcctattccttgaagtgtcctgcattaaaatcggagccacgattcacgagctagatcatggtccaaaaacatgaatggatcatcgtgtacctgtactgccttttgatcctagctgtgttgtgttttttttatgcatgcagtctgggaggatgtattacctcaaccggaagacgctgaagaagagctgggtcagaccccaggtgcagagcgtgaacctggacctcaacatctccacggctgccgccatcgacaactgtgccgccaacggtgctgctgccgctgcttccgacgacgaggacgagccaaggaaacccgctggcactttgttctctggaggcagcatggtggccgtgccgtgcgccaactgccatctcctagtcatgctgtgcaagtcctccccgtcctgccccaactgcaagttcgtgcagcctctggcacctgctgtgccgcctgcggcggtggcccattggaggatcgatgccgccgtcaagccgctggagaccctgagccttctccattaggcacatgcacttcaccggcagcagattgtagaaaggaaatcgtagttacgtagtagtggtgcatgggttagtattactattacctgggtaatgcatgagcggtcgaatgaaaattggaaatgtgaaactaccgtgcatgcatggtgacatgacaaaatacaaaatggtgaagccagcctcaaattaaactgcataaatgcattgagcaatcagtcaatcagttagttaataaatactagtaatggcgac

SEQ ID NO: 97290 - DNA, 1176 bp, Zea Mays
gtgctggtgccagcggccagccacgcgaccatgaacaccgagtacctcagggtgaagaagctccagcaggaggccgcccggtgcctgagcttgcacaagacaatggagctgcagccggagctgtcgctcggccctgtgtggccgggcttcgccgccggtgacctggccgccaagagctcctcgtccgagtctgacggaacctcccggaagaagaggaagcactacaccgccagctgggaggagcctcagcagccgcccgcgagcctggagctccagctcaacgacccactgcctctcgactgggagcagtgcctcgacctccaatctgggaggatgtattacctcaaccggaagacgctgaagaagagctgggtcagaccccaggtgcagagcgtgaacctggacctcaacatctccacggctgccgccatcgacaactgtgccgccaacggtgctgctgccgctgcttccgacgacgaggacgagccaaggaaacccgctggcactttgttctctggaggcagcatggtggccgtgccgtgcgccaactgccatctcctagtcatgctgtgcaagtcctccccgtcctgccccaactgcaagttcgtgcagcctctggcacctgctgtgccgcctgcggcggtggcccattggaggatcgatgccgccgtcaagccgctggagaccctgagccttctccattaggcacatgcacttcaccggcagcagattgtagaaaggaaatcgtagttacgtagtagtggtgcatgggttagtattactattacctgggtaatgcatgagcggtcgaatgaaaattggaaatgtgaaactaccgtgcatgcatggtgacatgacaaaatacaaaatggtgaagccagcctcaaattaaactgcataaatgcattgagcaatcagtcaatcagttagttaataaatactagtaatggcgacaggtcaccggtgtggtagctagcgagagattgggtatagtacttgaagcagtgcaacagcaagcttcaatgaaactgaggcggcaatcagacagtgaatgtatcgtccctcctgcatgcctctcacgttcctgcccattgatgaagaaggccggtggttgccacacctcctcggctcttcacccctcagcgccaccagcccgcaaccataaaggcctttgac

SEQ ID NO: 97291 - DNA, 841 bp, Zea Mays
gccgcttccttatcttctgcaagcatcgtgtctcttctatctccctccgtccctcgtgacttccattccctgccgccatcacaagctgcgtcccctccagccgagtcctcgccgtggaacttcccagcttcctgcgtcgcgaccccctcagcttcttctccatgaccggcgcgccccaagtttttcccccgtgcggcagcttcccagttttctgcgctcgccgagcagcttccatggccggagctccctcatcccctcctctcggcgtcttctccctgctgtgctcgccggctccctgcacgcaaccgggccgcgcggctctctggagctcgcccctggctcggatttccttccccaaccgagatccctccgtgttcgtctctgctccggcgtccggtcaagctccccgtggtgccgtcgccctcaagctcgcgccctgctctctctgacgcgcgtctgctccagctcgcccagccgtcgagctcccttgcgcgcgcgtgctccctgcctgctccatcttctcgtgcgcgcgtcctgctcaccctccagctcgcttggtccctgcgcgtgtcgaacttctgctcggcgtccagcttctctttttccccgacccgcatgaccagccgagtctgactccgccgtgagctcgtccctggcgctcgacgtgctgtcgcccagctcgcggagctcccttgccgtggccgttgcttccctgcgcccagcctttactcagtctctgtgcgcgcgaggcgcgagctcgcccgtgtgctgctggtctaacttggatctcgcccatggcgtcgatctgtccgtcctgtcgtcgcttagctcgtacgcgccc

SEQ ID NO: 97292 - DNA, 828 bp, Zea Mays
acggcacgaccctcgctcatgttctcatcttcccactccttccatttgtcctcttcctctccctcccacgccaccgtcaacgagctccagagccccgcaccgcgccgcccgccagcaaccaccccctcctcacccagatgccgcggctgccgggatcgcagcctgcgccggagcggcgactcgccgtgctcctgtcccacttccacccgtgttgcgaacctccacgcaccatcgcctgcgtcgccagcgtggagtgcctccggaccgcagccgaggaggaggccgagatgcagttgagcctctccacgtcgccctgcgcaggaggtgagaaggggggatcctcgggtggcgggcactgcgtgttctgcaacatcgtcgcgggcaccgcgcaggccttcaagctctacgaggatgatatgtgcttgtgcatcctggatgctaaacctctaacaagcgggcattcccttatcattccaaaaagtcattatccatcagtgcaaacaacaccaccaactgtactagcagctatctgctctaaattgccactcctgggtactgcaatcatgaaggctactcaatgtgatgcattcaatgtgctaatcaacaatggagagaaggcagggcaagttatttttcatactcatgtgcacatcattccacgtagcaaagatgataacctgtggtcttcagagacctactcaaggagccatatttcacatggccaggaaactacgcatcttgttagcagcatcaaggaaataatctcttcttcccccgaagactacagtactgtaatgtcatccacgccaaaggaactctgaaacaaat

SEQ ID NO: 97293 - DNA, 1334 bp, Zea Mays
gcgattttctagagtgcgtacagtcgtcgccagtctccgggagcccaaagcaagtgcccccactgccccggcggctgccgaacctctgctccggcgactaggttcccgcctccccgactctgccccaagcgagcgcggcacgcgtgtcgccttggcttcctctcttctgcttcagtctcgcgccgccggtttctatcctgccgtcgcccggagctcatcgtgctgacctccagtgacgcgctgaagggatctgggaacttcgaggatgctttgctgtgctggccaccaggcgtcccttctcctcttcgctctgctctctgtctcctcccttctgctcgtcgacggatcccatcaggaccaggaattcggtgaagctgttggatccagaattcttcaaacaaatccagacgcacatgaggtgcattgctcaagggaaaggagccgtgcagcttgggaagctattgatgagtatttgatgcccttcgtggaaaaagaaaaatatgaactcccaagcaaatgtagacttcgtcctgataatgacatgtttcgggagcaagagcaacataagattcattttgatattaatgagtggcactgtggcttttgcaagaaagctttccgagcagagaagttcattgatcagcattttgaaaatcgccacaagaatcttgtggataatagtgaaggaagatgcatggcagatctatgcggcgcactacattgtgatctgatgatgcagttcaaaaaaccaaaaagtaaatgcaatgcagctgcagctacaaggaatcgtcatctttgtgagagccttgcagacagttgctttcctattaatcaaggtcttgctgccagccgtcttcatggtaagtggaatgtgagtgaatgtaatgatcattcactcatattttccttgtatgcctctttccaatgcagctagcattgtatatatttcagatgtagctggttttgtagatctttttctgatgtagtttgtcccgcagaatttttcttgcgccagttttgtgatgctcacacttgcagtaagggaacaaaacctttccccaaaggtggcagggtgagcaaatttctgccagtagatcttacagtttatgaatgcttaatttatttcaggttattcagctttgcattaaacaatgaagctacatcagatagatgccgcctttataagcagtagatagcatttctaatgagatggcatcatttggttccttttctggctagggttttagtttcttgataatgcactgcctttcattttagcatgcttcgggctgtaaaacctttttctttatcaatgaaattggtagtttcgttcc

SEQ ID NO: 97294 - DNA, 1495 bp, Zea Mays
gcgattttctagagtgcgtacagtcgtcgccagtctccgggagcccaaagcaagtgcccccactgccccggcggctgccgaacctctgctccggcgactaggttcccgcctccccgactctgccccaagcgagcgcggcacgcgtgtcgccttggcttcctctcttctgcttcagtctcgcgccgccggtttctatcctgccgtcgcccggagctcatcgtgctgacctccagtgacgcgctgaagggatctgggaacttcgaggatgctttgctgtgctggccaccaggcgtcccttctcctcttcgctctgctctctgtctcctcccttctgctcgtcgacggatcccatcaggaccaggaattcggtgaagctgttggatccagaattcttcaaacaaatccagacgcacatgaggtgcattgctcaagggaaaggagccgtgcagcttgggaagctattgatgagtatttgatgcccttcgtggaaaaagaaaaatatgaactcccaagcaaatgtagacttcgtcctgataatgacatgtttcgggagcaagagcaacataagattcattttgatattaatgagtggcactgtggcttttgcaagaaagctttccgagcagagaagttcattgatcagcattttgaaaatcgccacaagaatcttgtggataatagtgaaggaagatgcatggcagatctatgcggcgcactacattgtgatctgatgatgcagttcaaaaaaccaaaaagtaaatgcaatgcagctgcagctacaaggaatcgtcatctttagccttgcagacagttgctttcctattaatcaaggtcttgctgccagccgtcttcatgaatttttcttgcgccagttttgtgatgctcacacttgcagtaagggaacaaaacctttccccaaaggtggcaggaaacaaacaaacaggttatacctcgctctctccattttgacgctgatacttttgccgctgttctatctaattgtgttcctgcaccagagggaaatgaggaaaggtacccaagatctaaaacggttttcgaaaattgggcagaagaaaaagccatcctagtgtccaacagtcacaacgttctcgagctcatggagccaaggatgagctggataaggaacgtggtatgcagtgtgaaatgtttttatgggcagggaagaaatttccctcatttccaggacgggaacaatgtccgcaggtcgaggaatgctggcttcgaccttttcttttctttttctttcttttttgtttcgacatgtagatgcaaacttcgagaggcaagcatgtgtggtctttgtgagattacggcgatattctatatcgtcaaccataaccgaagtcctattgataatttaaggatttttgggaggcctcaggcttaaaaaccaatgtcagtgaatgtagtatgacttctatccaatgtaatgatcaatgtgttggtgaggcacaatctttattcccttgcaaca

SEQ ID NO: 97295 - DNA, 1512 bp, Zea Mays
tttctagagtgcgtacagtcgtcgccagtctccgggagcccaaagcaagtgcccccactgccccggcggctgccgaacctctgctccggcgactaggttcccgcctccccgactctgccccaagcgagcgcggcacgcgtgtcgccttggcttcctctcttctgcttcagtctcgcgccgccggtttctatcctgccgtcgcccggagctcatcgtgctgacctccagtgacgcgctgaagggatctgggaacttcgaggatgctttgctgtgctggccaccaggcgtcccttctcctcttcgctctgctctctgtctcctcccttctgctcgtcgacggatcccatcaggaccaggaattcggtgaagctgttggatccagaattcttcaaacaaatccagacgcacatgaggtgcattgctcaagggaaaggagccgtgcagcttgggaagctattgatgagtatttgatgcccttcgtggaaaaagaaaaatatgaactcccaagcaaatgtagacttcgtcctgataatgacatgtttcgggagcaagagcaacataagattcattttgatattaatgagtggcactgtggcttttgcaagaaagctttccgagcagagaagttcattgatcagcattttgaaaatcgccacaagaatcttgtggataatagtgaaggaagatgcatggcagatctatgcggcgcactacattgtgatctgatgatgcagttcaaaaaaccaaaaagtaaatgcaatgcagctgcagctacaaggaatcgtcatctttgtgagagccttgcagacagttgctttcctattaatcaaggtcttgctgccagccgtcttcatgaatttttcttgcgccagttttgtgatgctcacacttgcagtaagggaacaaaacctttccccaaaggtggcaggaaacaaacaaacaggttatacctcgctctctccattttgacgctgatacttttgccgctgttctatctaattgtgttcctgcaccagagggaaatgaggaaaggtacccaagatctaaaacggttttcgaaaattgggcagaagaaaaagccatcctagtgtccaacagtcacaacgttctcgagctcatggagccaaggatgagctggataaggaacgtggtatgcagtgtgaaatgtttttatgggcagggaagaaatttccctcatttccaggacgggaacaatgtccgcaggtcgaggaatgctggcttcgaccttttcttttctttttctttcttttttgtttcgacatgtagatgcaaacttcgagaggcaagcatgtgtggtctttgtgagattacggcgatattctatatcgtcaaccataaccgaagtcctattgataatttaaggatttttgggaggcctcaggcttaaaaaccaatgtcagtgaatgtagtatgacttctatccaatgtaatgatcaatgtgttggtgaggcacaatctttattcccttgcaacattgttggatttccttgc

SEQ ID NO: 97296 - DNA, 714 bp, Zea Mays
attacgatttcttgccctaaataggtggtcaaggctatcgacaaaattagaaggggttttttgtggaggggaagaaaggatgttagaggtgaccattgtgttgtggggtggaataaggtctctaaacccttaagtctgggaggtttggtaatacacaatcttgaaattcttggttgggctttgaacctgaggtggctgtggctcaagaaaactcagccagacagatcttgggctgagtttgatgtgcaagtccatcataatgttactgccatgttctcagcctcagtatgctccatagtgggggatggtgctggaacactgttttggactgaccgctggttgcatggccaatgtgtctcaaaaattgccccttccctgttaaatagagtttcaaatcgtttgagaaaaaggaaaacagttcagcaagctctcagggataacagttgggttggtgacatctctggcagtttaccggcagaagtgattgtcgaattcttaataatttgggatttaacttagaatattcatttgcaacctggagtacctgatgctttccgttggcttccaggtgcttcaggggagtattctgctaaaatagcctaccaacgtttcttggctggttctgtggaatttgaggtaggtgaaaggatatggaagagttgggcgccccctaagtgcaaattcttcatttggcttgcttcccttaataggtgc

SEQ ID NO: 97297 - DNA, 833 bp, Zea Mays
gttactaagacatcgatggcatcctcatggaggatgagcatatttcagttgttttccaagtaattgcaaatggtgttggcctgctagatcctggtgctgaaagtaactatggagtccttgcccttcgagccccccttgaaaagtacggcctcgacgaagagaaggcgtgcaacgagctcctgagcttttccgattacagtggctctccacagttaaaatttagcaaaatggatgaggatgagttgattctgtggttgaagcatgttcaacaagttgaactatctaatcctaatgttgagatccacttgcttgaagtattttaccacaagatttataagatcatggtgttgttttgcagggacgtgtgcttgccacgatggcgccgcaatggtttgccctgtcccacgagagaggcgagggctttaggtttccctgaccctcctgaaaggttgccatgcacttcgaagtatctaaaaagatacgatgaaaacaaaaactgcatcactcactcaagcaatattgatgatacaaacattgcagatgaaggttataatttagagccagcaacaaatggttatcccatgacccatgtccacgatcttgactcttcatccgcagacgaaaatggtcctccaacatcaacagggcaggatatagtagttttgagtgactcaaatgatgatgttctcatggtgttgtctcccggtgctgtgaactgtggctcgatgcataacaacactggaaatctgtttccactcaccattgtattcacgtcgcccgtcgctaggactctaagtccattggaggctcgcaatttgtgttctgtggcatag

SEQ ID NO: 97298 - DNA, 1953 bp, Zea Mays
gtattcactactcaagccgctcaaaactctagctagctagcagggggggaaatggctccacttctcgccgcagccatgaaccacgctgcccatccagtccttagaagccatctaggacccaacaatgagagtttctcacgacaccacctatcttcttcaccgcaaagcagtaagcgaaggtttaaccttagctttacgccacgatctgcaagagtaggcaatcaaaatggagtccaattgttgagcccttcggaaatccctcgaagggactggttcccctccgacttcatctttggtgccgccacttcagcgtaccaaattgaaggtgcttggaacgaagatggaaagggggaaagcaattgggatcacttctgccacaattttccggaaaggataatggacgggagcaatgcagacattggagcgaattcgtaccatatgtacaaaacggatgtcagattgctgaaggaaatgggcatggacgcatataggttctctatctcttggcctagaatactgcctaagggaacggtcgaaggaggtattaaccaggatggcatcgattactacaaaaggctcatcaacttgttgctagagaatggcatagagccatatgtaacaattttccactgggatgtccctcaagcactagaagagaagtacggcggattcttagataagactcataagaggattgtaaatgattacaaaaacttcgctaaggtgtgcttcgacaactttggtgacaaggtgaagaattggttgacctttaatgagccccagacatttacttcattttcctatggaaccggggtctttgccccaggacgatgctcaccgggactagactgtgccatcccaactgggaattcactcgtcgaaccttacattgctggccacaacattcttctagcccacgctgaggctgttgatctttacaacaagtattacaagggcgagaacggccgcataggtcttgcatttgatgtaatgggtcgtgtgccatacggaacatcatttctagatgaacaggccaaagaaaggtccatggacattaacctaggatggttcttggagcctgtggttcgtggtgactaccccttctcaatgagatcgttagcgagggaacgactacccttcttcagtgacaaacagcaagagaagcttgtgggatcctataacatgttgggaataaactactacacctcaatattctccaaacatatcgacatctcaccaaaatactcgcctgttctcaacactgacgacgcctacgctagtcaagaaacgtatgggcctgacgggaaacccattggtcctcctatgggaaatccgtggatctacttatacccagaaggcctaaaggatatccttatgatcatgaagaacaaatatggaaacccacctatctacatcactgagaacggaatcggggatgttgatacaaaggagaaacctctacccatggaggctgccttaaatgactacaaaaggctagattacatccagcgccacatctcaactctcaaggagtcaatagacttgggagcaaatgtgcatggctacttcgcttggtctctgctggataactttgaatggtacgccggctacaccgaacgttatggcattgtctacgtcgaccgcaaaaataactacacgcgctacatgaaggagtcagccaagtggttaaaagagttcaatactgcgaagaagcctagcaagaagattattacgccagcttaaaaacatgggacctcgtgatgtgggtacggtgccacccatgaaataaaaacctagtgtgtggtttgaaacctaaatttttctttttcttttttgcaccatgagagaggtagtggagtcatattctccagcaccgtggctaataatgtattgttgcagtacaatctagcattgtcgtcatgcaataaataaagtgactggtttccctatttc

SEQ ID NO: 97299 - DNA, 1611 bp, Zea Mays
tttttttaatgctttttcgttctttcatgtgcatgccaatagaaaggataatggacgggagcaatgcagacattggagcgaattcgtaccatatgtacaaaacggatgtcagattgctgaaggaaatgggcatggacgcatataggttctctatctcttggcctagaatactgcctaagggaacggtcgaaggaggtattaaccaggatggcatcgattactacaaaaggctcatcaacttgttgctagagaatggcatagagccatatgtaacaattttccactgggatgtccctcaagcactagaagagaagtacggcggattcttagataagactcataagaggattgtaaatgattacaaaaacttcgctaaggtgtgcttcgacaactttggtgacaaggtgaagaattggttgacctttaatgagccccagacatttacttcattttcctatggaaccggggtctttgccccaggacgatgctcaccgggactagactgtgccatcccaactgggaattcactcgtcgaaccttacattgctggccacaacattcttctagcccacgctgaggctgttgatctttacaacaagtattacaagggcgagaacggccgcataggtcttgcatttgatgtaatgggtcgtgtgccatacggaacatcatttctagatgaacaggccaaagaaaggtccatggacattaacctaggatggttcttggagcctgtggttcgtggtgactaccccttctcaatgagatcgttagcgagggaacgactacccttcttcagtgacaaacagcaagagaagcttgtgggatcctataacatgttgggaataaactactacacctcaatattctccaaacatatcgacatctcaccaaaatactcgcctgttctcaacactgacgacgcctacgctagtcaagaaacgtatgggcctgacgggaaacccattggtcctcctatgggaaatccgtggatctacttatacccagaaggcctaaaggatatccttatgatcatgaagaacaaatatggaaacccacctatctacatcactgagaacggaatcggggatgttgatacaaaggagaaacctctacccatggaggctgccttaaatgactacaaaaggctagattacatccagcgccacatctcaactctcaaggagtcaatagacttgggagcaaatgtgcatggctacttcgcttggtctctgctggataactttgaatggtacgccggctacaccgaacgttatggcattgtctacgtcgaccgcaaaaataactacacgcgctacatgaaggagtcagccaagtggttaaaagagttcaatactgcgaagaagcctagcaagaagattattacgccagcttaaaaacatgggacctcgtgatgtgggtacggtgccacccatgaaataaaaacctagtgtgtggtttgaaacctaaatttttctttttcttttttgcaccatgagagaggtagtggagtcatattctccagcaccgtggctaataatgtattgttgcagtacaatctagcattgtcgtcatgcaataaataaagtgactggtttccctatttcaatt

SEQ ID NO: 97300 - DNA, 254 bp, Zea Mays
ttaagattcactgcacacttgatatgataatggttttgaaacttccacacattgtttgtggtatcaacgtgaagattcacctacagtgtataacccaaactctatcccccaaacagttattaagcagcaatgcctcaacatttgacgaagcacctgtaaggctgcaactgttaatatctgccgttaaacagttcaacagtccaagaatctgaagatcatacagctagttattgaagccatgaagctcattttct

SEQ ID NO: 97301 - DNA, 616 bp, Zea Mays
cctgcttacacaaagatggttagctgtggcattgccaccatggcataggagatgcagcgagtgcgctacttcaccttcgtcatgctcatcagaatggtgcaggagaagataccccgtaacaccaccttcctgatgcccagcgacaggctgctgtcacgtccatttctgagccaggtgctggagttcctatccaggcattccatcactgtgcccctcgtgttcaactacctcatcaggcttcccaatggaaccatagtccccagttcccacccaccacttgggtgacacgatcaccgtaaccaacatcaagcgtcaaaagttctacttcaccggcatcgagctcacaagtcctgatctctaccacttgggggagttattcaggtgccatggaataaaaggaatcataaagcaaacagcaacacagagtaaaagcggcaacatgcactcgctatgccgctccaacttctgcggcaccagagaagacattgaccaaaaaccaatcattggcacatcttctctaccacctcccaacacaggttcttccacgatccctgcttaagaacctgcagcagaaagccctcaaagttcagacactttgtcaaaaactggattggca

SEQ ID NO: 97302 - DNA, 288 bp, Zea Mays
agcgcgaggttatgaggatctgaagaatcaccctggtaactggaatctcaagtgccaggagaagaataggtggttcaagaggagccacacaatgaggagttcgattcgatctaggtggcgtctcccagttaactttctagcgccaaggatggagtttagatccttttatatttatcttttattttgtaagacttccactatataataaatactctaattttattgtgacatttatctctatacactctgttattatatatgttgtcttctttggcgcatgtatgagat

SEQ ID NO: 97303 - DNA, 95 bp, Zea Mays
ctgccaattttaggccttacatcaagggcacaacttgcattagacttgagattctaggtaccaggatgatcttcaaattctcgtgacctcactgc

SEQ ID NO: 97304 - DNA, 2840 bp, Zea Mays
gcctcgtgcttgccctccggcagatctataaccttctcgacctcgtctcgcacgcatccggccaattagccagcgttgcgttggcccctgcctctcgttccgatccgcacaccactgattgacccaggtcccagacacacgtccactatctaggtagacatcggcagcttcacaagacaccgaagaagcaacaagtaccgtgtcagtcagccgctaggtagctaatgaccaaaattctcctcctcctgctgctcctcgcattgccgctgccggcagccctggcgctcaccgccgagggcctggcgctgctgacgttcaaggcggcggcgaccgacgacccgcactcggcgctctcgcggtggtccgagtccgaccaggatccgtgccggtggccgggtgtcatctgcgccaacgcctcgtcctcggcgccgtccgcggccccgcgcgtcgtcggcttggccgtggcgggcaagaacatctccgggtacatcccctcggagctggggtcgctgctcttcctccgccgcctcaacctccatggcaaccggctgtcgggcgtcatccccgccgcgctatccaacgcctcgtcgctccactctctctacctctacgggaaccgcctcacgggcggccttcccgtcgcgctctgcgacctcccgcacctccagaacctggacgtctccgggaacgcgctctcgggcgagctgccgctggacctccgtggctgccgcagcctgcagcggctcgtgctgtcccggaacgccttcacgggtgagctccccgcgggagtgtggcccgagatgcccaacctacagcagctcgacctctcctccaacgccttcaacggctccataccgcccgacctcggcgagctccccaggctcgccggcacgcttaacctctcccacaaccacttctctggcgtcgtgccgcccgagctgggccgcctcgctgccaccgtgacgctcgacctccgcttcaacaacctctccggggccatcccacagacgggctccctcgccagccagggccccaccgcgttcctcaacaaccccggcctctgcggctacccgctccaggtcccctgccgcgccgtcccgccgcccacggagtcgccgacgccgccggccacgacgaccccgctgccctccaccgcgtcctccgaccgacaccagcccatcaggacgggcctgatcgcgctcatctccgtcgcggacgccgccggggtggccctggtcggcgtcatcctagtgtacatgtactggaaggtcaaggaccggaaggggcaccgcgacggcggcggcgacgacagcagcaagagcgggctctgccgctgcatgctgtggcagcacggtggcagtgacagctcggacgcgtcctcgggcgacggcgacggcgaaggcaagtacagcggcggcgagggggagcttgtggcgatggaccgcgggttccgcgtggagctggacgagctgttgcggtcctcggcctacgtgctgggcaagggaggcaaggggatcgtgtacaaggtggtggtggcgaacgggaccacgcccgtggccgtgcggcggctgggcggcggcggcggcggcggcgcggaccgctgcaaggagttcgcggcggaggcgcgcgccgtggggcgggtgcgccatcccaacgtggtgcgcctgcgcgcctactactggtccgccgacgagaagctcgtcgtcaccgacttcgttggcaacggcaacctcaccaccgcgctgcgcggacggcctggtcaaactgtcctgtcgtggtcagcacggctgaagatcgccaagggcgcggcgcgcgggctggcgtatctccacgagtccagcccgcggcggttcgtccacggcgaggtgaagccatcgaacatcctcctcgacgccgacttcaccgcacacgtcgccgacttcggccttgcccgcctgctggccgtggccggctgcgcccccgacgggccgccctccacgggtggtgccgggctcctcggcggcgccatcccgtacgtcaagccaccggcgccgggtacgggtccggaccgtttcggcgccggcggcgggtaccgcgcgccggaagcgcgtgcgcccggtgcaaagccgacgcagaagtgggacgtgttctcgttcggtgtggtgctgctggagttgctgacgggccgaggcccggccgccgaccacgcgtcgccgtcgacgtcggcgtcgttctcggcgcccgtgtccgggtcgacggcgacggaccggtccgggagcggggagcacgggggtggcgcggtgccggaggtggtgcggtgggttcgccgtggcttcgaggaggacgttcgccccctggcggagatggtggacccggcgctgctacgaggccccgcgctgcccaagaaggaggtggtggcggcgttccacgtcgcgctccagtgcacggagagcgacccggagctccggccacggatgaaggccgttgccgacagcctcgaaaagatcggctaatgagtcacaaggtcatgctagcgtacacaacgccatgcatgctcatccaaggtcattgttatttttattaccttttccgtctcctccccgattttctctctcttgtaattcagtcttttttttaatttccttgctgtgctctcttgcaattggtcgtttgtaattgttggctattcttttgggtgcaattcatgttttccgtaattgatggctattacaaatggtacatagagaggtatgtaggagaaagggtatttccagcttaaattttcaggcctgttttagtacactggttttcaaaaccacaatttgtaatatcgcataactatagtatattttatattagtt

SEQ ID NO: 97305 - DNA, 1609 bp, Zea Mays
ccagtaggtaaacctctccgtagtcctactcttgtccgacccgcgcggccgccgccagcccgcgccctcggagcccccttccgcttctcctctccgggaatggcgtcggcgcgaggaccttgcgctatcaggtgtgcaatggcaactggaaaagagcagggtgcaatttccactgccagtagcggtgatcaaaccaagggcggtttgcgtggaaaattaaacaaagttgttttagcttatagtggtggtttggatacatccgttattgttccatggctcagggagaactatggttgtgaagtcgtttgtttcactgctgatgttggccagggtgccattgaattggaagggttggagaagaaggcaaaagccagtggtgcatgtcagcttgttgtgaaggacctcaaagaagaatttgttagtgaatatatatacccctgcctgcgtgcaggtgcagtttatgaaagaaagtatctgcttgggacttcgatggctaggcctgttattgctaaggcaatggttgatgttgccaaggaagttggtgcggatgcagttgcccatggttgcactggaaaaggcaatgatcaggttcgctttgagcttacattctatgctttaaatcctgaacttaaagtggtggcaccttggagggagtgggatatcacaggacgtgaagatgctattgaatatgcaaagaaacataatgtacctgttccagtttcaaagaaatcaatatacagccgagaccgaaacttgtggcaccttagccatgagggtgacatcctggaggacccagcaaatgagccaaaggaagatatgtatatgatgtcgattgctccagaaaatgcgccctcgaaacctgagtatttggagattggtatcattgctggtgttcctgtttcaatcaatggccgagacctctcaccagcatccctcctcgcggagctcaatgaaatcggtggaaagcatgggattgggcgtatcgacatggtggaaaacaggctggtcggcatgaagtcacgtggggtctatgagacccccggtggcaccatcatggcagccgcggtacgcgagttggagtccctgaccctggacagggagaccatgcagtggaaggacatcattgccctcaagtacgccgagctggtctatgctggccgctggtttgacccgctccggcagtcctttgatgccttcatggagaaggttaccgcgacgaccactggttcagtgaccctgaagctgtacaagggttccgtgaacgtcgcgtcccggaagagcccctacagcctgtacagggaagatatctcctcgtttgagaacggggagatctacaaccaagctgacgccgaggggttcatcaggctgtacggcctaccgacacgggtccgggcgatgctggagaagggtatctgagtagttgcctgcttgatttagaaataaaaacatctgtttcccagtgattgcagacagatgggtgtttggtggggagttcaccatgctgttttaccatccgtttacattgtccaaaccaaaatattatcattgctacatcagctgcttttctcattggtttatattgagcagaccattctggtcgattatcgtc

SEQ ID NO: 97306 - DNA, 1838 bp, Zea Mays
ccagtaggtaaacctctccgtagtcctactcttgtccgacccgcgcggccgccgccagcccgcgccctcggagcccccttccgcttctcctctccgggaatggcgtcggcgcgaggaccttgcggaattagtgtccgttctgacttcagttcagcctgccttattcacaaggctggagccccatcgaattctgtttctggcgtgatggctgttcaggttcaccgccaccgtaacaaggtccgcaatggccaagctatcaggtgtgcaatggcaactggaaaagagcagggtgcaatttccactgccagtagcggtgatcaaaccaagggcggtttgcgtggaaaattaaacaaagttgttttagcttatagtggtggtttggatacatccgttattgttccatggctcagggagaactatggttgtgaagtcgtttgtttcactgctgatgttggccagggtgccattgaattggaagggttggagaagaaggcaaaagccagtggtgcatgtcagcttgttgtgaaggacctcaaagaagaatttgttagtgaatatatatacccctgcctgcgtgcaggtgcagtttatgaaagaaagtatctgcttgggacttcgatggctaggcctgttattgctaaggcaatggttgatgttgccaaggaagttggtgcggatgcagttgcccatggttgcactggaaaaggcaatgatcaggttcgctttgagcttacattctatgctttaaatcctgaacttaaagtggtggcaccttggagggagtgggatatcacaggacgtgaagatgctattgaatatgcaaagaaacataatgtacctgttccagtttcaaagaaatcaatatacagccgagaccgaaacttgtggcaccttagccatgagggtgacatcctggaggacccagcaaatgagccaaaggaagatatgtatatgatgtcgattgctccagaaaatgcgccctcgaaacctgagtatttggagattggtatcattgctggtgttcctgtttcaatcaatggccgagacctctcaccagcatccctcctcgcggagctcaatgaaatcggtggaaagcatgggattgggcgtatcgacatggtggaaaacaggctggtcggcatgaagtcacgtggggtctatgagacccccggtggcaccatcatggcagccgcggtacgcgagttggagtccctgaccctggacagggagaccatgcagtggaaggacatcattgccctcaagtacgccgagctggtctatgctggccgctggtttgacccgctccggcagtcctttgatgccttcatggagaaggttaccgcgacgaccactggttcagtgaccctgaagctgtacaagggttccgtgaacgtcgcgtcccggaagagcccctacagcctgtacagggaagatatctcctcgtttgagaacggggagatctacaaccaagctgacgccgaggggttcatcaggctgtacggcctaccgacacgggtccgggcgatgctggagaagggtatctgagtagttgcctgcttgatttagaaataaaaacatctgtttcccagtgattgcagacagatgggtgtttggtggggagttcaccatgctgttttaccatccgtttacattgtccaaaccaaaatattatcattgctacatcagctgcttttctcattggtttatattgagcagaccattctggtcgattatcgtcatctattgatctgcgataacgttggagcgatgtctatctatgactttagataccttgacgattcgaactgatacaccgttcatgccattacacaaatttc

SEQ ID NO: 97307 - DNA, 1912 bp, Zea Mays
cagtaggtaaacctctccgtagtcctactcttgtccgacccgcgcggccgccgccagcccgcgccctcggagcccccttccgcttctcctctccgggaatggcgtcggcgcgaggaccttgcggaattagtgtccgttctgacttcagttcagcctgccttattcacaaggctggagccccatcgaattctgtttctggcgtgatggctgttcaggttcaccgccaccgtaacaaggtccgcaatggccaagctatcaggtgtgcaatggcaactggaaaagagcagggtgcaatttccactgccagtagcggtgatcaaaccaagggcggtttgcgtggaaaattaaacaaagttgttttagcttatagtggtggtttggatacatccgttattgttccatggctcagggagaactatggttgtgaagtcgtttgtttcactgctgatgttggccagggtgccattgaattggaagggttggagaagaaggcaaaagccagtggtgcatgtcagcttgttgtgaaggacctcaaagaagaatttgttagtgaatatatatacccctgcctgcgtgcaggtgcagtttatgaaagaaagtatctgcttgggacttcgatggctaggcctgttattgctaaggcaatggttgatgttgccaaggaagttggtgcggatgcagttgcccatggttgcactggaaaaggcaatgatcaggttcgctttgagcttacattctatgctttaaatcctgaacttaaagtggtggcaccttggagggagtgggatatcacaggacgtgaagatgctattgaatatgcaaagaaacataatgtacctgttccagtttcaaagaaatcaatatacagccgagaccgaaacttgtggcaccttagccatgagaatcttagttaccagaactttacaagatggttacgttccaacttttaagccaatatatgcaaaatgccacattagtgttctgaattaatgtcctgcacttgtcgacacctttaaccaaacaacatgacgcccatctttgatgcgagatgaagtgaatcattctctacattgcagggtgacatcctggaggacccagcaaatgagccaaaggaagatatgtatatgatgtcgattgctccagaaaatgcgccctcgaaacctgagtatttggagattggtatcattgctggtgttcctgtttcaatcaatggccgagacctctcaccagcatccctcctcgcggagctcaatgaaatcggtggaaagcatgggattgggcgtatcgacatggtggaaaacaggctggtcggcatgaagtcacgtggggtctatgagacccccggtggcaccatcatggcagccgcggtacgcgagttggagtccctgaccctggacagggagaccatgcagtggaaggacatcattgccctcaagtacgccgagctggtctatgctggccgctggtttgacccgctccggcagtcctttgatgccttcatggagaaggttaccgcgacgaccactggttcagtgaccctgaagctgtacaagggttccgtgaacgtcgcgtcccggaagagcccctacagcctgtacagggaagatatctcctcgtttgagaacggggagatctacaaccaagctgacgccgaggggttcatcaggctgtacggcctaccgacacgggtccgggcgatgctggagaagggtatctgagtagttgcctgcttgatttagaaataaaaacatctgtttcccagtgattgcagacagatgggtgtttggtggggagttcaccatgctgttttaccatccgtttacattgtccaaaccaaaatattatcattgctacatcagctgcttttctcattggtttatattgagcagaccattctggtcgattatcgtca

SEQ ID NO: 97308 - DNA, 1784 bp, Zea Mays
aagccgcggctcgcctgcttgcccgcttcactctgttctaacctgtgcacgactttccgtcgcgtcgctattggagtagcgaccaaacccaatccgccttgccgcgatggacgcggcgtgtcactccaatcccgtcgaggcgaccagggattcgtcttcttctgatttatgaattagtgtccgttctgacttcagttcagcctgccttattcacaaggctggagccccatcgaattctgtttctggcgtgatggctgttcaggttcaccgccaccgtaacaaggtccgcaatggccaagctatcaggtgtgcaatggcaactggaaaagagcagggtgcaatttccactgccagtagcggtgatcaaaccaagggcggtttgcgtggaaaattaaacaaagttgttttagcttatagtggtggtttggatacatccgttattgttccatggctcagggagaactatggttgtgaagtcgtttgtttcactgctgatgttggccagggtgccattgaattggaagggttggagaagaaggcaaaagccagtggtgcatgtcagcttgttgtgaaggacctcaaagaagaatttgttagtgaatatatatacccctgcctgcgtgcaggtgcagtttatgaaagaaagtatctgcttgggacttcgatggctaggcctgttattgctaaggcaatggttgatgttgccaaggaagttggtgcggatgcagttgcccatggttgcactggaaaaggcaatgatcaggttcgctttgagcttacattctatgctttaaatcctgaacttaaagtggtggcaccttggagggagtgggatatcacaggacgtgaagatgctattgaatatgcaaagaaacataatgtacctgttccagtttcaaagaaatcaatatacagccgagaccgaaacttgtggcaccttagccatgagggtgacatcctggaggacccagcaaatgagccaaaggaagatatgtatatgatgtcgattgctccagaaaatgcgccctcgaaacctgagtatttggagattggtatcattgctggtgttcctgtttcaatcaatggccgagacctctcaccagcatccctcctcgcggagctcaatgaaatcggtggaaagcatgggattgggcgtatcgacatggtggaaaacaggctggtcggcatgaagtcacgtggggtctatgagacccccggtggcaccatcatggcagccgcggtacgcgagttggagtccctgaccctggacagggagaccatgcagtggaaggacatcattgccctcaagtacgccgagctggtctatgctggccgctggtttgacccgctccggcagtcctttgatgccttcatggagaaggttaccgcgacgaccactggttcagtgaccctgaagctgtacaagggttccgtgaacgtcgcgtcccggaagagcccctacagcctgtacagggaagatatctcctcgtttgagaacggggagatctacaaccaagctgacgccgaggggttcatcaggctgtacggcctaccgacacgggtccgggcgatgctggagaagggtatctgagtagttgcctgcttgatttagaaataaaaacatctgtttcccagtgattgcagacagatgggtgtttggtggggagttcaccatgctgttttaccatccgtttacattgtccaaaccaaaatattatcattgctacatcagctgcttttctcattggtttatattgagcagaccattctggtcgattatcgtc

SEQ ID NO: 97309 - DNA, 1315 bp, Zea Mays
caaaaacaactcacacacccaatttttaaaaatccgcgaagaaaagaccaagcaaaccgcccggacccagccgatcgagggagagtcagaactcggaaccacttgctgcaggctgcagctgcaagcatctgcacctgcattctgcaagcctcgtctggagctcttcccgttgcattggcggcggagatggcggcgaatctggaggacgtgccgtcgctggatctgatgcacgagttgctccgccgcatgaagtgcagctccaagcccgacaagcgcctcatcgtcatcggcccacctggctctggaaagggaacccagtctcccattattaaggatgaatattgcttgtgccatttagccactggtgatatgctgagggctgctgtggcggccaagacacctctaggtatcaaggcaaaagaagctatggataagggagagcttgtttcagatgacatggttgtggggattattgatgaagctatgaagaaaccttcatgccagaaaggtttcattcttgatggctttcctagaactgtcactcaagcacagaagctcgatgaaatgttggcaaagcaaggtgctaatgttgacaaggtcctgaacttcgcaattgatgatgctatattggaagaacggattactggtcgttggatccattcggccagtggtaggacttaccattcaaaatttgcacctccaaagtctccgggagttgatgatgtaactggagagccattgattcaacgaagagatgacacagctgagatcttgaagtcaaggcttgaagccttccacagacaaactgaacctgtgattgagtattactccaagagaggcttagtggtgaacctgcccgcagagaaaccaccaaaggaagtgactgctgaggttttgaaagccctctcttgatgaagtgtccactcttcagtttcagcatgacatcgaccaaaaatcccattgccccagtttcttcaaaatttatacttaggccaacaacatggggtttttattttcggtatgctttttgtgtgaattcaccattttatcacagctttgacagagctcgggaactgtctggataatctatgttttgaatgagagaagtttttcagtaacaatactgatatgattacaacaattcacctttggaaaattttcttggcaaactttgttccatttcttacatcaatgctatgttacttctggctatggtattcatgaagatacctaaggtattctgttcgctcatccccatgctctgttgagcggagatactgatgtgctgcaatgtcaaataaacgtttggtgttgt

SEQ ID NO: 97310 - DNA, 810 bp, Zea Mays
atgccagccgccaggaaccgcttggttctctcacaggggagccggagttacaagagcgcgaaggtggcagcgaagaggctagaagaggcagcgctctcctgcaaaggggacgaacaggtgcagctgctgcgccggtggctcgtcgcgctcaaggagacccagcacgcgaccatggtggtccgggagccgcaacttggggacaatccggaccagactgtgcccctgctgccagctatagccagttatccttttaccacattgctaccgaaccttggtgtggtctcattagattttcatgctacaatggtagttgttgaccttcctggcttactggacggcgctcatcgtggttatggtttgggtcatgagttcctaaggcatagtgagcgatgctctgtattggtgcatgtcgttgatggttctgcacaacaaccagaatatgagtttgaggcagttcgcttggagctggagttatttagcccatctttggttgacaaaccgtatgttgtggtgtacaataagatggaccttccagaggcatctgatagatggaatgcatttagggaaaagctatagtctgaaggcatcgaacctttctacattagtgaataaacaggcagggcacacaggacgtcattcatgctgcttacaagcttctgcagaaatagaggcaaaggatgaaggaaactgaaggatggagtgggccagaaaatctgaaccacgtgtctgaggcaataaaaaaggaaagacgtgcacccatgaatgagtttgaggttttccatgataagggtacaaatagatggactgttg

SEQ ID NO: 97311 - DNA, 327 bp, Zea Mays
atggcggtggccatacattccgtcgagcaattactccagctctggcaacccatcccgccatgggtacttgttggtgtggtggcagccgggcacgacgagcaccgtgcgacagacgaagttctccgatgccatgagcacgatgcccgcgcctggcgaccagctcctgctccatcagcgcgcacaatcgggtcggctactgccagcgattggttgcccaggagcagatcgacgatggagacaccagcgggtcacaccgagcaccatcactaccccttcccctcggtcttctctctctcaaatatctcccatgcgatggcgctggcatga

SEQ ID NO: 97312 - DNA, 741 bp, Zea Mays
atggagaagagccgggtgctggtggtgggcggcaccgggtacatcggtcggcggctcgtgcgggcgagcctggcgcaagggcacccgacgctggtcctgctacgaccggagatcggcctggacatcgacaagctccagatgttgctctccttcaaggcccagggcgcgcgggtggtggaggcgtcgctggaggaccacgcggcctcctcgccgccgttgaatcgtagattttctggagacagagacatgaagttgataatatacttctcagtttgtccggggaaagaaaatcttgtcaactatgagcatgaaatgtttgttagatcgcaggtgaactcagagaggaaaatgcctcgcaaagttgtatctggacccgactacgatgatgactatgatgagtatgatgatgagtatgatgaaaccagatatggcaataatactcctgttatgacagggaaaggtgcaagggatgcatcaggactttgcatttttcatggcggtggccagaggtgccagaagcctggttgcaacaaaggtgctgagagtcgaacggctttctgcaaagctcatggaggagggagacgctgtcagaagctaggctgtaccaaaagcgccgaagggaagacagagttctgtattgctcatggtggtgggcgccggtgcgggattgaggaatgcccaagagcgacaagggggaagtctggattctgcattactgaaactttgcagtggatcttgtga

SEQ ID NO: 97313 - DNA, 132 bp, Zea Mays
atgctcatggatagggctgatacatcaggttttgtcagtggtggtatacattacatgaacatccatgtgtatattcattttgtgtatactatgtgcttcctcagtggtgaagttataaagctggagttctga

SEQ ID NO: 97314 - DNA, 94 bp, Zea Mays
gtcactctatacttcatgaggtgatgcatcataagtttattccatcaattttggtggaatcaactcactcctcatctatatactaattattagc

SEQ ID NO: 97315 - DNA, 243 bp, Zea Mays
atggctggaggtcgaacacagccagcaaagttgacaaccaacgaagtacgggtgacggcaaagtcccgaggtgacgaacaggggcaagtgtctgagcgtgcgatggagggcgcacgaccagagcgttgtgtcggtgtgcaccaggaagctgatgccgagtgcacagtgaaaaaggggacggtggccttcaccgaggtgggtggagctcagtgcctgcagaatggtgacgcgacgaggctgtag

SEQ ID NO: 97316 - DNA, 105 bp, Zea Mays
gcgatgccaatgcttatgatgccatgctcaagttttagttatagtaacaccaggggtgttacaggtggaggggataattcagctgaagtgggaaaaattaattag

SEQ ID NO: 97317 - DNA, 537 bp, Zea Mays
atggatgatcctgatcttgatcggttgtttgctttgcgtggttgcagaaggaaggtcctgatcggcgtcgcggccgtgatgctggtcctcgtgcatgttggcttcgcgttctcgttgaccgggaagaagtcgcttgtgtccaccgtgataggagacacctgcgtggcgatagatgagtgggtggcccagccacaggggcagagccacaccgcgctggacgacatcctcctttgggctgacgcagcggtgacggtggaggcgctgtggtggagcaaggtcaactaccagctcgtcaccaagctcaaccagctgctcatcggggcaggatgcggccggcggcgcgggcgcgtcggggtaggggtgcggcggccgagcgtcggggcgagccagggagcagccggcgggtcgggcgagttggggcggggtgcggccggcgaggtgcggcgtccgggtggcagggccggggtggccggcggcccacagggcgggcgcgttcgagagggagcggagaggttgaatgacgggatggaaaggtga

SEQ ID NO: 97318 - DNA, 362 bp, Zea Mays
taaaaaatcttcatgcttccatcaggctcctgtaattccagatccctgaaaaacaagatagacagctactaaacttcagacagctactaaacttcagatagctgtaagaaaacaatatgtccacacagatgtaactctagctcagatagttgtattttacagaaatatgaccaaggcgagacgatatgtccaaataaaagaaatcaatctgactcacaagtgagaaattagatagtccttcaatgcttataggctatcatcttggttgggtaaatccagtccccatgtccagacgtgagattctcgagccaaaccaccgaacgtgaccctccagcagctacctagaattagacaataaaaaa

SEQ ID NO: 97319 - DNA, 255 bp, Zea Mays
atgcacagtgacaaccaaagcagcgaaaggctagaggaggcggcctgggtcgacaagtggggacgtgaggagagcataccgtggatgcgcggcggcaaggcgacaacatttctaggggctagcaggcaggccctggcagtgacgaactggtggagacagggggcacgaccaaccgttgtcgttgccatacaagtcatagaacacagaataggaggagccactgttgccgttgccggatggggtcagacgacctaa

SEQ ID NO: 97320 - DNA, 1124 bp, Zea Mays
caggaagcctccactccttctccctcttctctctcttctctcctccccttgctcttctctggccgccgccacttgcccggacttcctgcagccgagcgcccctgcagctccctgcaccttcatcctgcgcgctccagtcgaccgcgcactgggaccagcgcagtgcccagccgagcagcgcgacgcccggtggcgttcatgtgcttctcggtacggtgaaacctttattgtcgttcctaccacactttcctcatttcttgagtaagcggacctttgcccccaatagtttttgtgattctcagtgcttggatttcagcgggctgattgcaaatttgttcccctaggactttggccgttggatggtgtactctgcgggatccgcaacctcctactgagctcccgcacagaggggcaggcatggtatggcaatcttaccctgctaagttccaattccaagtggtacctcctacagtggcggaggcgttttgttgttacctgtcactgcttcagccgttgactgcctattgctttcgttattagtgaggctttcgcaggaagtgcaggcagccggccgtcgacaccaagcaggccttgcgcttatggcagccgtggtgctcggtcttatcaccagtggtgtcgttagatgccaaatgcagtttgctctgcatggggattttgctttctggtgtctgtcccgttggaaatgggtagttcctgagtgacgaacagacttcccatggcagctattctgttgaggatgtgcgaaaggtgcactgcagagtctgagaagtgagagaaaaaaatgacaagtgctgtttaccgctcacccatttttaaccaatgccacggtgatacaattatctgtgctaaagggacaattgtttcaactaaaccaagcaccacagttggaggccagatccttggaaggcaatattgtgaaattattgtaacttgtgtgctaaaacgagatacaattttgcctcgccctggagtgatgtcgctggtggtgcttttgtgactgatcatctctggagcttttgtgaatgatctagatctagctatctatctgtaaatgatctagttgtgaatgatattataattgtgatgcttttgtgaatatataa

SEQ ID NO: 97321 - DNA, 990 bp, Zea Mays
caggaagcctccactccttctccctcttctctctcttctctcctccccttgctcttctctggccgccgccacttgcccggacttcctgcagccgagcgcccctgcagctccctgcaccttcatcctgcgcgctccagtcgaccgcgcactgggaccagcgcagtgcccagccgagcagcgcgacgcccggtggcgttcatgtgcttctcggactttggccgttggatggtgtactctgcgggatccgcaacctcctactgagctcccgcacagaggggcaggcatggtatggcaatcttaccctgctaagttccaattccaagtggtacctcctacagtggcggaggcgttttgttgttacctgtcactgcttcagccgttgactgcctattgctttcgttattagtgaggctttcgcaggaagtgcaggcagccggccgtcgacaccaagcaggccttgcgcttatggcagccgtggtgctcggtcttatcaccagtggtgtcgttagatgccaaatgcagtttgctctgcatggggattttgctttctggtgtctgtcccgttggaaatgggtagttcctgagtgacgaacagacttcccatggcagctattctgttgaggatgtgcgaaaggtgcactgcagagtctgagaagtgagagaaaaaaatgacaagtgctgtttaccgctcacccatttttaaccaatgccacggtgatacaattatctgtgctaaagggacaattgtttcaactaaaccaagcaccacagttggaggccagatccttggaaggcaatattgtgaaattattgtaacttgtgtgctaaaacgagatacaattttgcctcgccctggagtgatgtcgctggtggtgcttttgtgactgatcatctctggagcttttgtgaatgatctagatctagctatctatctgtaaatgatctagttgtgaatgatattataattgtgatgcttttgtgaatatataa

SEQ ID NO: 97322 - DNA, 921 bp, Zea Mays
caggaagcctccactccttctccctcttctctctcttctctcctccccttgctcttctctggccgccgccacttgcccggacttcctgcagccgagcgcccctgcagctccctgcaccttcatcctgcgcgctccagtcgaccgcgcactgggaccagcgcagtgcccagccgagcagcgcgacgcccggtggcgttcatgtgcttctcggtacggtgaaacctttattgtcgttcctaccacactttcctcatttcttgagactttggccgttggatggtgtactctgcgggatccgcaacctcctactgagctcccgcacagaggggcaggcatgtgaggctttcgcaggaagtgcaggcagccggccgtcgacaccaagcaggccttgcgcttatggcagccgtggtgctcggtcttatcaccagtggtgtcgttagatgccaaatgcagtttgctctgcatggggattttgctttctggtgtctgtcccgttggaaatgggtagttcctgagtgacgaacagacttcccatggcagctattctgttgaggatgtgcgaaaggtgcactgcagagtctgagaagtgagagaaaaaaatgacaagtgctgtttaccgctcacccatttttaaccaatgccacggtgatacaattatctgtgctaaagggacaattgtttcaactaaaccaagcaccacagttggaggccagatccttggaaggcaatattgtgaaattattgtaacttgtgtgctaaaacgagatacaattttgcctcgccctggagtgatgtcgctggtggtgcttttgtgactgatcatctctggagcttttgtgaatgatctagatctagctatctatctgtaaatgatctagttgtgaatgatattataattgtgatgcttttgtgaatatataa

SEQ ID NO: 97323 - DNA, 870 bp, Zea Mays
caggaagcctccactccttctccctcttctctctcttctctcctccccttgctcttctctggccgccgccacttgcccggacttcctgcagccgagcgcccctgcagctccctgcaccttcatcctgcgcgctccagtcgaccgcgcactgggaccagcgcagtgcccagccgagcagcgcgacgcccggtggcgttcatgtgcttctcggactttggccgttggatggtgtactctgcgggatccgcaacctcctactgagctcccgcacagaggggcaggcatgtgaggctttcgcaggaagtgcaggcagccggccgtcgacaccaagcaggccttgcgcttatggcagccgtggtgctcggtcttatcaccagtggtgtcgttagatgccaaatgcagtttgctctgcatggggattttgctttctggtgtctgtcccgttggaaatgggtagttcctgagtgacgaacagacttcccatggcagctattctgttgaggatgtgcgaaaggtgcactgcagagtctgagaagtgagagaaaaaaatgacaagtgctgtttaccgctcacccatttttaaccaatgccacggtgatacaattatctgtgctaaagggacaattgtttcaactaaaccaagcaccacagttggaggccagatccttggaaggcaatattgtgaaattattgtaacttgtgtgctaaaacgagatacaattttgcctcgccctggagtgatgtcgctggtggtgcttttgtgactgatcatctctggagcttttgtgaatgatctagatctagctatctatctgtaaatgatctagttgtgaatgatattataattgtgatgcttttgtgaatatataa

SEQ ID NO: 97324 - DNA, 1525 bp, Zea Mays
gtcttcctcctctgccgcagctcgcttcctctctgtttgccatgcgcccagccgcccttcctcttcctctcgacgccctgcttctctcccgcctcgcggccgtggagcttccctgctggcgcgcccccgctccctatttgccccatctcgcggcgtcccatctcccacgctcagccgcacctctgcttctctgctcggcgccctgtctctctctctctccctcgcggcttcccttctcccgagtttcccctgccatggcacgcctgctccctagctcgccgctcgcctagcccagccacccctcctctcttctccctcgcggtacctctctgttggcggacgttttcccagccgtggatctccttgtgtgccgcgctcgtgcgtgtcccagcttttccctttcctggcgctcgtgccctgctactgcatcggctctagctcgttcctatggagccggtcgccccttcctgctcgcctaagccaagctcccatggcgccgttcttccctgagctccctcacgtcgcgcccctggctcggatctcttccctgcgctcaccgtggcttcctgctgcagctcgccccagctcggatccgctgcgagctcatcggaccgcgtccctggatcgccccagcttccatggctgctcgcgaattccctctgttggccgcgtagacctcctagccgcgggcggctctggcccaggctgccgtcgcgccctcccctgcaagctgccacgtcctggtggctggtgttcacttacgtcgtctcgaccttcaccaggtgcgcgtgccggccatcggccttgccatggcgcttcgcttcccccagcagcgctctcctcctctactccaaccatagccgcgcccctcagctcgcctgcacgtttctctgctcgccggcgcgcccttcctgctgcctcactcggtcttcgtctctgtcgcgccgatctgcgctcgtccgtggccgtcgaacacgcccagctccttactcgccacggccttggtcgtcgcatcgctgtgtgcagcggtggcgtggcgggtattggtcgcgggcatggtcggggcgacgcaagatctgggcacgccgtcatttcattatgcctagcgtcgtgccttttatgccagtcatcgatttcttattcaccacaacaccgtcatcccctgccgtgccctggatgtcgtgctcgttgtggtcggctctggtggtcggcatcgtcgaccgtcaattccgtcaatagccacgttcattcgttattgttcagtactccgcgagaaagaaatctagggaaatctgggtgttgagcaccaatttgagcgcggacggtccggccctgaggccggacggtccgcgcgtgcgcagaacagattagggttccgagttttgtgctacggttgttagctaaaatcatgggataagctcggaaattagtttgtaaagggtccagcccccctcctctataaatagagaggtatacggccgatttgtaatcaacaatcgaatcaatacaacttctattcgcattt

SEQ ID NO: 97325 - DNA, 506 bp, Zea Mays
ataggaaggagaccagcaacagccgtgctctcttcttgctcaacctccccagcgcgctcacctcgtggacgcccaaattgttggtttcctggtgccggagtcctcttcgctagactgcagcgagcgccgttatccaagctcatcgcgttggcacgtccttgctgtccccgcgccagcgtcccctcctgcttgttcggttgtcgagctcctccatcgatctctacctcgtcgtacagaacgtcagacgccgcgccttcatctctgatctcgcccgccctcgatgtcgcgctcggagccatctcgctcgcccagccgggtgtgcagcagcagtctcgcgccgctgccgtcgggtctcccagtgtgcgcagccccaccaccacgttggctcgtcgttgatcgccctcgccgttgtgagtcgccgagccatgctcgcttgcgagcaccgcacgccggagcaagctacgtcttcagcctcgcctcgcctcgccgtgcgtcatcgtgaaggt

SEQ ID NO: 97326 - DNA, 83 bp, Zea Mays
tccctctacttacaccttgcactgtcatggcctcatggggcacaatagatgattccagggagggagggtacccgcgttactgt

SEQ ID NO: 97327 - DNA, 1085 bp, Zea Mays
tcctgtctgttgagttctagtcgagtcacccccacagcatagatgaacatatttgttattgatttgagctactgatggcttattcacctaagcaatctttcttgtgagtgtagagtttgagaatacttagctcattaattcttgtcacttttttcggacaggattcaaagaaaccattacttcaccaccatggttcttgattcattgtcatctccgcacaggaggtcccaaaacatattcttcgtgtcatcatcaaaaaagcctcagtcatctcgtgatgacagttggtctgcactggttgagcggcaccggttcctcctgacaacacttcttgtgcttgccttcctatgcagtatctatctgtactttgcagtgaccttgggggcatcagatgcgtgcagtggtttgacaggaggggcacagaagatcgagtgccaggcaagatcagtgctgcaacatggaaagttgaaattccgctgacttcggagtctcattgatgaagaccaaattattgagtttatttgcactctggtcacaggtcttattcttcataccatgaatctgtatattattggtggtggctggtttgtattcatgctgatgttattgggccacaacatttattgtactggtagagataaatctaatagtgatagcgttgagtttgtggaaagtggaaactggtataagggtaggtctatattgttcttttaacaatcatggtgcctataattcgtccaggagaccttggtattgtctcccgtgtgacatgtgacacagtcagattgatactgtgctacctgagcaccctttgatctttaagtactgattaatttcgttagtgttcatcttaatttattaacaatcagctgttcactgagaagtttgtcaattttagtgagtcattgatgtaaatacgacaacctggaacatgattgtttgtagttgtgttatcgtttccagcttgtttttgttttgtgttttggccggtagatcagagtggttggaacatattagtagacatctggtttcatcatgtaacataattcaatgaagtagtaaatgagttatatcctttcagagaa

SEQ ID NO: 97328 - DNA, 136 bp, Zea Mays
gtttacgcttatcaatttaggtttgaggttttgcttagaggtaaacatagtggattaagacttggattgccccttaaaggttctagtaggtactcaaggggtttgctgggttggttagggtaacattaatttccac

SEQ ID NO: 97329 - DNA, 399 bp, Zea Mays
atgacttggaagatgaacattgtatcagtgaccatagtttctacactatccctgtccggtgctattccaactgaaccattgacatggaatttaatcaaagtttggttgcctgtgaatataatctttgttggaatgctgatcacaagcatgtttagtttgaagtacattaatgttgccatgctgactatattgaagaatgtcgccaatgtcctgactgcttctgaggaaacttattttttcaagaagcagcatgatactcaagtttgggttgctcttatgttgatgagcccctcggagagaactgaaaaggaggattgccagctaccatccaacccgaaagaggtggaggcgctgagaaaaggatacagcttgcaaccctttgatagtgttcacatttga

SEQ ID NO: 97330 - DNA, 99 bp, Zea Mays
caaagatgtcagcacaatgagttgaaccttgacctaaaggctaaagccttagaaacttcacataatccaggatctcatctagcatagctaccctatttg

SEQ ID NO: 97331 - DNA, 3148 bp, Zea Mays
atgccgagcgaccattttttgggaggtcgacactatgaccacgacaccgatctcctgccacgtagatgccagctcgacataccggagcaagatttcggcgccatttatattggcgtcgagacgtgtaatctcggcgtcaataataatggtgatgatatcttcttctcggcgctcaggaggaccactcaatccaccttcacttcaccgggcgggatctggtcgcaatcggatccacaccgccgccgcggccgcctcctcgggtggagtcccgggctcgacgagacggaggccagggtagacgacggaggcgacgaggacgacgaggctgaggaggggaagcccatgccggccgccggggcccgccgctccactcgcgtcttcatgcccaaggcggctaagccgccgcaatcccaggagcacgtcgatcccgccacccgggtcctccgctccggcaagcgcctcgccgccgaccggatccgctgggacgccaaggaggcggcagccttccacgtcgacatcaatcacggccacgaccagcagcaccaaaaggaagattaccccaaaccgggattgccagctctgacaaagtccttcgggctcgtgtacagaaggaaacgccgtcgccgccggaggcaccccgccgatgaggtcgtcgccgaggacgaggacggcagcaggaggtttgggatagtatacaccaggaggaagggcaagcgatcgaaggtcagccctctcctggtcccgcaagagccagaggtcccctgtgacatcgccgccgccataccatgctcctcctcccgggagtttgcgtcaagaactggtttcttggatgcccatttctcggccctggtagatgatgccgtcacttactctggggctcagatgctcgtcatccttgtcgatacgtcttgttctgggagctctcaccggctcactggccttcttgtacccatgctgcggtggatgcgccgcagttggcagcgggggaagttccggaaccttgcgacattcatcttctcttcgggtatagctgctgcgtttgcatcccacggggtgcactttgtcaagctccagtgccagagcgcttctgcattgttacacaggcctcttgcgcattgtgggtggtgtgtgcttcatggttccaagaaatctgaaccgctgctctcagtcgatttctcagcacttccttcatacttttcgagcttgcattatgctgtagctcttgattcgatgtatctgtcagctatgattcagcacagcaggctgctggttgagggatctgaagaaatctatcctcgctctcctttatatttggaatctggggctcagagcagtggttttgccgctacggccgcgggtaacaatgaaccttgcagagttgttccgaactacatgcccctcgaacaagttgctggactagtggcacatggtctgaggttgaagaagcatcaaaggcggagaactatgagacatccccgaaatcggcggcgacttattatagctagattacctgacaatggaattgggatgaagcacagtacaacttccatgcaaacagaagaaaatgtgcgatcaagtaggcaaggacctcctgtggagcctgtctatcctaaagcagcattagaaatttctcttgatttgcttgaaaacatggatgaaagtgatgtttcgactcccatcggatcagctaggagaaagagatcttctttgaagagccctgttgagagaatgaatgaaaaggtggccttggctgaggtgagacagaacatagattctgttcaaagcaaagcgaatcttctaaatcttcaagctgataggtgctggagggaagaaggtgctgaagttatgctagaactatcagataccaataagtggtgtatagttgtgaagatacaaggtattactaggtattcacttaaaccttcagatgttaggtcatatgtcattaatcgtcattctcaagcctacatgtgggcagttgatgatgcatggaaacttgagttcactgataagtgggactggctgttattcaaagagctgcatgttgtgggccgtgagcgtaattcccaggggaagacaatcccaattcctggggtacatgaagtttctgatggcatggaagggattgttacagatcctttctcacgccctgtgccagactatattaggatggtggatgatgaagttggacgagctatctcaagagattctatttatgacatggactcagaggatgaacaatggctcattcagttgaatcctgcagattcagattcaaacagctctcaaaggaatcatctctcttacgaagactttgagaggataataagcatatttgaaaaggatgcctacaacaatgcccaaggaaaaaatgatttgagtgagtttttttatagatatcctgctttaggaaaggatgataacgtgcatgctgtgtataaatattggacaagtaagaggtccaagagagctgcaccattgcttagggtatttcagggtgcacccataaggcgagggcatttatcacaaaagtctgccatgaagcgaaagagatctttcaagagacaaaaaagccaagctggtcgtggaaagcctgaagctttattgcaatacaatgctgaagaggacgcagctttgcacagagttgcccaagctgaacgtgcggcaaaacaggctgtagaaagagctattcgactgcgcaacagagcccagtctctcatgacaaacgcagagctcgcagcatacaaatccgtcatggctctcaggattgccgaggctgctaggatatctgactcgtcccgagatattgtttgtactatcctcgactaaagaaaaatatgggttgttcattgatttgtgtggagagcatggaaaatactcttcatcgcccatgatattggcttttcgacaagctgtggggttatatccccccccttctgttaactcactttgtcaagtcaattttgaggcgaatgcttgaactgaaaactgtaatttcttgtataaattgaagtagttagctagattttgtatcttatgggagctaatgttctgtagaaatgatgaaagttttttttttaaaaaatgcatgggctgaacggaaatcaagtatttgtttgcatcccattgtcttcagcgatatatgttg

SEQ ID NO: 97332 - DNA, 366 bp, Zea Mays
tggcttccttattaaattatcttactattggatctatatgttggtatgttttagtggaaaagattttctgtaaaaattcatatttagaaactggtttagaaaataaatgaacttgcttctctccatagttttatttatacaaatccaaaaatgatgaaacttgttttgttagttagatgttgtcatactccatctaagaaaaatataaaacttatatgttgttcactgttttcttggtgtgttaattaaaacaagttaaatagagaaaagatgattgttttgcttgttgtttttggatctgtagctctagtgctccaaatgggttgaaatttttacagtagactcttggtgtgcttcttggtgact

SEQ ID NO: 97333 - DNA, 966 bp, Zea Mays
gcagtctctaacatatcttctgtccctaaggagatttatgatgatttatctcagaaggatgtggaaagcctgagtgggaggacactatctagtgccaatactacagctattggtcccgcttctgcaggaggcgcaaaagccaactctagttggaagctaaagtctgttgttactcttgcattgacattgctaacaagttctcaggcaatattaattgtgtggtcaaaaagagctggaaaatatgaatatagtgtcacaacagctaatttttcggtggaggctttaaaatgccttctatcactagctgctctttttaggacgtggaactgccatggtgtcactgatgataatagattaaccacatcttttgatgaagttggtgtatatccgattcctgctgttctttacatggtaaagaacttattgcagtactatatctttgtctacgtggatgcaccagcttatcaaatcttgaagaacctaaatatcatcagcacaggtgttttgtaccgcatcattttgaagaaaaatttcccccctgtcccttttaggctaagtgaaattcagtgggcagcatttgttcttctatgtgctggttgcacaacagctcaacttaatccttcgtctgaccatgtgcttcaaactcctattcaaggttggatgatggcaattgtgatggctcttttgagtggttttgctggggtgtatacagaagctatcattaaaaaacggccatcaagaaacatcaacgtgcagaacttttggctatacatatttggggtgatcttcaatctagttgcaatttgtgttcaggattatgatgcagtcatgaataaaggctttttccatgggtattcattcatcacagttttgatgattctgaaccacgcactgagtggaattgctgtttcaatggtgatgaaatatgctgataacatagtcaaggcatgtggcactagcatgtaa

SEQ ID NO: 97334 - DNA, 360 bp, Zea Mays
atgtccgctactgcgcctccatcgcccaagggcgccaccgcccaggacaaggtggttgctaccgccgtcgaccttgttgacttgtccgcctcggccaccctcacccgcgttcaacaagatgagctacccgccaagccacggaaacgaccagtgctgtcgccctggaacaccagagggcctacgatgcggatgttgcctgcctcgccgcggccgaggaggaggctcgtgccgcggccgaggagggggtcagtcagtgggcttcgccagggttctatcaccccatggccagcctaccctcttgggtcagtcgttggcctctgcgttcagcacggagacgctgcagcaacccccgtccactga

SEQ ID NO: 97335 - DNA, 780 bp, Zea Mays
attcaacatggcactcactgcggcgaccagattagcaaccctattcatctgatatctacaaacagagaaaaggtgtgatttcaacgtatggccatctgcatcatgtggaatttgtggaaggaacaaaaccacagaattttttacaagaaattatccacacccacccaggtagcaggcctaactaatgaagatctggagcaatacagagggctcaaatacatatgcagagttagcgcaccactcaatgtccctttgggctatcagaccgtgtaattacctccgagaccgagaagcattcttgtatagaaaacttcctttcctacttttaattgaaaggcacagctcctgtcattgcgttcaaaatacttacaaacaacgacagatacagtacagatagattgtacgaaccctaggtaaagacaatgccgcaggaactttgggtgatagttccggaaagggagagattcttcctagatcgaagaggcagccgaccgcgacctaaatctgaggagcgcattgaatctgataaagttctctaagggttagaggcttctgcaatcgctattctagacacgggttttacctgatccttcaccctcctgtactccatagccacctcaccgctccgccttggaatcgcttaatcgagtggcggctcgactttgagagacgaggaggagctgccgctcgctgcgtgttgggagactggtgagtgggccccggcggtcgatgacacgagcacgggaaccgaggagcgtggagcaggacggtagtgagccg

SEQ ID NO: 97336 - DNA, 456 bp, Zea Mays
caggcccggggcatcgagctcataacgtcggagaacttcgtttgccgcgcggtgctcgtcgtgcttggctgccacctcaccaagaagtactctgagggcccccgggtgctcgctactacggcgggaatcagcacatcaatgccatcgtgcggctctgccatgtgcgcgcccgcaacattgcaacagaaaagagaggagagagaattggtgtgcgcggggtaggatctgggtctcgacgtggctttctcggcgagcagttgttgcgggtcgtgcagagaaggcacggttcgagcaaaggctcatcaggttctgcccagcatcaccaggtcgtaccgtggacatctctgtcctcatctttgtcggtagataggtactttaactcgagttcgttcttacttccgctttaatttcaacccggttgcttttggattaatttgctagggggcggcgacacgg

SEQ ID NO: 97337 - DNA, 702 bp, Zea Mays
atggataaaatcagcaaactaaatcaacaatggaagacaagtgacctgctctacacactttcacaaggaccagaccatcgggctcgtgttttcaacagatggttcatcaatggatttctttttcgtacagaaaaaatagagcagaacctatgcacacaaaatagtggtgttgttgtgaaaggagatgaaagcttcggtaatattgactggtatggtgtgattaaaaaaattattgcactagattttcctcaaggaaaggaagttgtcctctttcagtgcaactggttccatgttcctaccgccaagaacaaaggaagaggctaccaaagggatcagtatggaattgttgatattgataaaactcggttgtgctatttagatgagccttatattcttagttcacaagctgagcaggtattttatgtcaatggtacaaagaaaaaagattggtgcactgttgtaagattgaaaccccgaaatctgttcgccatgccaaaatctgaaaaatcagaaattgatcttgattcaatagatgtgggattggaaggcatgagtgttttaagcagtgatgaagtattggtgaagtggagaaggtctgacatggaaggtgtaaccagtgatgcttgtgtcattgagaaagcgcttgatgaatttatagaagaaacgtatgatattgggttagaagatgaggaggatgaataa

SEQ ID NO: 97338 - DNA, 2311 bp, Zea Mays
ctcgtatcctcccgtcgccgcctcgccttcccctgcgctaccaccgccgctatctgaaccccagcgcctatccggtgagccggaggggaccgccgaggatgttttactcgcacacgatcctcgcgcggaagagcccgctgggcaccgtgtggatcgccgcccacctcgagcgcaagatcaagaagccgcagatcgatggcatcgacatccccacctacgcagaaagtataatgttccctgaagttccaattgctctaagattatcagggcatcttcttctaggtctagttcgcatttattcatggaaggtgcaatatctgtttcaagattgtaatcgaatgctaactacaatgagaacttcattcgcttctgtccaagtcgatcttccaattgatgcagactgtgctccatttgagtccattacactaccatcaacactaaatcttgacgccttgaacttggatgacgcaatttctctgatggatacgccagataatcatcagaagactcttgatcagattaccttgcctgaaggagaatatgtgatgatagaacttgatgaggatgccagagtagagcaatcaggtcctgctccatcattacacatgggacctacagcaatcgaggatgagacgtcccctccatttcatgatggttttggagctaataacgatcctaatgaagaagctcccatagatcgtcccataggcaattcaccagtgaattccaacatagcaaatctgacagatggagcactagatccacctgaaaaaatgcgtgaagctccacatgagtttcctcacctgaaattaacagagtccatccttggaaatgatgaccccatggatttggaccatgattcttcaccttttgtgcaaaacaaggctatcacccctccagttattgatgaaacaacttctgctggtcgacaagtacctgggagatccatttccaatttacgtgcaccaaacacctttgatgcttttgcagatgatgcacccctaaattttgacattcagttacctgaatttcggcttgagccatctccacgtccagtacaagagaacaaggataatagaagaccaaaagcacaagttagcaatagaaataggaagagagggatgaaatttgattacaaaattgtgctctccaatgactgtatgagaaagcaaattgatggtgctgaactagatgagttgatctgcaagaggagaaaattaccccagacagcccttgatgtgtggagattcagcagaactaacagacagggcagcttcttgcttgaacctctgctgcatgggacgtgcagtgatcttcaagaaacctatgagagaaacttcccttgtgtcagtggccttgatgctgagtgtagcaatgtggctggtgtagcaaatgatgatccggatgcatcacttgaacggcagctaagcccaaatgttcctagaactgcggagctgtcttaccatgagctcaccccaacgtctccaggaaatgcagaggcacagcctgaaccacctctgccaaccctaaagtcaccaggagctgcaggtgcagtgccagacgatgatatgttgcctgagttgccccggttctcaccaatagatgtgccatcttcaataagaggaaatgatactccttacaaaactcctggcggaactccatcttggctcggaggatctgctgtttctgaaataccatcatctgatgggaactattcattacctggacaaagtactcgtgactctgataacatgtcattcctttttccaatcaatgaagatgatgaacacccagagatccctggtctcatgagtacacctggaggggtatctagtgtagctactggaactaccggattaggaagcatgtcggctaggacaagggctgttgcacttttctttaaggatcatgcgtcttcaccctcagatgatcagcctggaaaattcagtttgaacaaaattttggaagggaaaacaaggaaacaggctgcaaggatgttctttgagacaacggacctcttgtccatctgcaaaaagatagaatccccaaaggctacctgaatattgtttccgggtgatcctggagaaggggtcaaatgggcgtaaacttctgttaaatgtcggctagggactaagttagcttagtgaatatcagtgcgaatactagtgtgacatcttatacatgtttatgtctattacttttccttttcgtccattaagaaggttttcatgatattctgtaatatgacctgtttggtcgctgcctagcttgccacattttacctaacttttctgcttaatgttagttcttt

SEQ ID NO: 97339 - DNA, 2649 bp, Zea Mays
ctcgtatcctcccgtcgccgcctcgccttcccctgcgctaccaccgccgctatctgaaccccagcgcctatccggtgagccggaggggaccgccgaggatgttttactcgcacacgatcctcgcgcggaagagcccgctgggcaccgtgtggatcgccgcccacctcgagcgcaagatcaagaagccgcagatcgatggcatcgacatccccacctacgcaggtccgtcggctccgccctcgcttgcccaaaggcgcgttttttcttctctctgtcgtccgccggtagaaaaaactggatctttttctcctcccattcttttttttttggcgagggatttttggaagcatctggtggagggttaaaggtgcggtgttccctgtggcgcattcggtgcaaatgtgatggaatcatgcgacagaagaaagtataatgttccctgaagttccaattgctctaagattatcagggcatcttcttctaggtctagttcgcatttattcatggaaggtgcaatatctgtttcaagattgtaatcgaatgctaactacaatgagaacttcattcgcttctgtccaagtcgatcttccaattgatgcagactgtgctccatttgagtccattacactaccatcaacactaaatcttgacgccttgaacttggatgacgcaatttctctgatggatacgccagataatcatcagaagactcttgatcagattaccttgcctgaaggagaatatgtgatgatagaacttgatgaggatgccagagtagagcaatcaggtcctgctccatcattacacatgggacctacagcaatcgaggatgagacgtcccctccatttcatgatggttttggagctaataacgatcctaatgaagaagctcccatagatcgtcccataggcaattcaccagtgaattccaacatagcaaatctgacagatggagcactagatccacctgaaaaaatgcgtgaagctccacatgagtttcctcacctgaaattaacagagtccatccttggaaatgatgaccccatggatttggaccatgattcttcaccttttgtgcaaaacaaggctatcacccctccagttattgatgaaacaacttctgctggtcgacaagtacctgggagatccatttccaatttacgtgcaccaaacacctttgatgcttttgcagatgatgcacccctaaattttgacattcagttacctgaatttcggcttgagccatctccacgtccagtacaagagaacaaggataatagaagaccaaaagcacaagttagcaatagaaataggaagagagggatgaaatttgattacaaaattgtgctctccaatgactgtatgagaaagcaaattgatggtgctgaactagatgagttgatctgcaagaggagaaaattaccccagacagcccttgatgtgtggagattcagcagaactaacagacagggcagcttcttgcttgaacctctgctgcatgggacgtgcagtgatcttcaagaaacctatgagagaaacttcccttgtgtcagtggccttgatgctgagtgtagcaatgtggctggtgtagcaaatgatgatccggatgcatcacttgaacggcagctaagcccaaatgttcctagaactgcggagctgtcttaccatgagctcaccccaacgtctccaggaaatgcagaggcacagcctgaaccacctctgccaaccctaaagtcaccaggagctgcaggtgcagtgccagacgatgatatgttgcctgagttgccccggttctcaccaatagatgtgccatcttcaataagaggaaatgatactccttacaaaactcctggcggaactccatcttggctcggaggatctgctgtttctgaaataccatcatctgatgggaactattcattacctggacaaagtactcgtgactctgataacatgtcattcctttttccaatcaatgaagatgatgaacacccagagatccctggtctcatgagtacacctggaggggtatctagtgtagctactggaactaccggattaggaagcatgtcggctaggacaagggctgttgcacttttctttaaggatcatgcgtcttcaccctcagatgatcagcctggaaaattcagtttgaacaaaattttggaagggaaaacaaggaaacaggctgcaaggatgttctttgagacaacggttctgaagagttataattacattgatgtgcaacaagaggatccatatggagccattgaaattttagttaaacccttgctgtcagctgccaaactgacataagttacttggaatcatctgcaggacctcttgtccatctgcaaaaagatagaatccccaaaggctacctgaatattgtttccgggtgatcctggagaaggggtcaaatgggcgtaaacttctgttaaatgtcggctagggactaagttagcttagtgaatatcagtgcgaatactagtgtgacatcttatacatgtttatgtctattacttttccttttcgtccattaagaaggttttcatgatattctgtaatatgacctgtttggtcgctgcctagcttgccacattttacctaacttttctgcttaatgttagttctttaattcgaacgact

SEQ ID NO: 97340 - DNA, 859 bp, Zea Mays
ggtcgacagtcagtagcgcgatcctatttggaaattagtgcgcacaagaccactgaggaggactggggaggtacggccgagcacagtaatgcagagtctcgtgacggtgatgagctcggcaaggcacaaggaccggcgacggcatccgcgaccaagcacagggaagccggtgagctgtggaccgggagcggcgtcacgggatgagcaggaagacaacaacgtgagcgcaccgagcagggagaaaaccaggatgcaaacgaccgcacgggcgggctttcaccggcgatgtccgatcgcaggaggaagaggaaaaacaggaagctgggcgcgcgagctggtgacgaggaagagacaccaggcctaggcggcgcacgacggtttggggtcagactcggcgagttggagatgaacgatgcgtggctgggcgtcaatggctggatccgagcgcgagtgaggagctcgaccagcgaactgtagatggcgtaggatctcggtgccctgaccgagcgacgcgagcagctgagccaccatggcgtccgcgaccggagcgagctgggggaacgacgcgaggactgaagacgagctcatgcgtcgagcggggtccgacgatggagagcacaaatggagaggaaaggcaggagcttggcgcgtccttggagatgagagcaggggcgcgacggacagccggggcgagcacacccccgacggctgggcaaaagctgtgagggagataggagatgggagatttgcaagcacgagcttggagggacacggtggagcagggaattggggaagatgcagcccggcgaggatgaagaagaggagcacgatctggagcggctcgatgtgctctgcgtag

SEQ ID NO: 97341 - DNA, 257 bp, Zea Mays
ctatctcgtccaactcgcgaccgagagaagagagggcaagggagaagattgccgccgctaccgagctggtggttggtcaccgctgggacctcggctggctgctcgtgtgtgcgctggggtggagtcgtcagcgttcgcttcatctattgacggtgtgcggtccctgggccatcgcgattgctcgccgtcgtgccatctccgccgtggactgcatctcgccgtagccggggcctcttcgccaccaaatccggtaagtt

SEQ ID NO: 97342 - DNA, 841 bp, Zea Mays
ctctatgacgaggaatataatgagcttgtagacatctatgcttttgggatgtgtttactggagcttgttacatttgagtacccatattgtgaatgttcaaatgcagcacagatatatagaaaagtatctgatggtgaaaagccaggttcactggctaagattggtgatcctgaagtaaaattatttatagagaaatgcattgctaaagtcactgaaagactttcggcaaatgaactcttaatggatccttttctcctagatgttagtgatgaaaaaatattctatccagtgcatccaaatattaatacaacagatactggttgtccaaaaccaagctctagtttcagatatgacggagtagcatcatctgccggtcgccatgatcgctcaggtagcatgtcagattcacatccttctgataactatgtacgagacactgtggatccacatgctgcaattggtcgaagtatcacagtctcacacttattctctatccatttctttgtaccaatgcataggtcatgcccaaaacatccacttcccctttgatattgaagcggacactttaatcagtgttgcaatggcgatggttgtgcagctcgatctcacagatcaagatgtaacgacgattgcagaaatgatagatgctgaaatacgttcgcatattcctgattgggcagcagaggagtcaattgacaaccaaggggatgaagctgcttactctgagacccatagttcagaaggtgatgagggaacttctgaactgcgtgatgagatcggttgccgctacacccacatcggcgacatgcactggatcttcgcccgccatcagcgctcgtga

SEQ ID NO: 97343 - DNA, 379 bp, Zea Mays
tagggtgttctcgacaaagaaagcttgtaccttaaaacaggaggatacaagaagctggagtgattgtctgaaggcttttgaactgcttgaagcattagtgtagctttggtgcttttgtgactgatcaactctggagcatctagagtgatgtagttgtgggcttttgaacaatagctggagtgatatgaaacattagtgatgtagttgtgggcttttgaactgcttcaagctggagtgatgtcaatgtggtgcttttgtgattgatcacctctggagtttttgtgaatgatctagctagctatttgtaaatgatctagttgtgaatgatattataaatgtgatgcttttgtgaatatataattgtggtgcttttgtgttt

SEQ ID NO: 97344 - DNA, 763 bp, Zea Mays
agagattcagagctgatgaactgcttctggtgtcctgtacatctcaagatgaaaaaaagcaccaccgtcctcgccatctccatcttggtcctctcccttgcctcccagttctcatggtgtgcagaagcagctgagggaagcgccggaatttccacagagcctgatctccaggtgcaagaacaagtgcacggcgatatgaaaaaccgcctggaaatgcagggtcgcaaccggaagcttggccatgaggtgaccacagtggagttgaagcatcacaggaggattaccagtgggcacaagggtggcagcgcgggtggaggcgccggcgccggtgccgcgggcgcaggcacgggtgggcataacgtgggcggcgggggcgccgtgacgaggccgcacagctccaagaacggcgcggcggcgctcccagtgccggtgtcgtccgtcctgacgctggccttggcctgcggagttgttctgtcagtcatgagctactgatgagatgaaactctcgtcttcccggagccgatcggtatctccgagccgattttacgggtattggtgcgatagtttctcgatttgttcgttgtaacttgtatatcatatcatcatgcagtggtgaaaaccggacggatgctgacggatgtagctgtcattatatatctatcgtaatgtatttctcgcgaatacagaatcaatacagttatttaaaattggaacacatgataagaccggttaataattcaagcggatatataaagaatatttg

SEQ ID NO: 97345 - DNA, 974 bp, Zea Mays
ttggaaggtggtggtgccggtgcatccgctgatcagccactgggtctcagtactccgcgatcgctccaccccttcccacgccttcaggagtgcaatgggggagctagggagattgctaatctatgaggcaacacgagattggttgccgacagtaacacggcagatccagtcacctgtgggcactgaggttgttgaatctgtcagtgagatggagccaataatgattgtacctattcttagagcagggcttgcacttgcagatctcgcaacatcaattttgccttcaactagaactttccatttaggtatggcccgggatgagacaacactgatggcctctgtttacttaaataagctacctgatagattcccgaaaggatgtaaaatcctcattgtggatcctatgctagcaactggtggaacagtcactgcagcagttgatctggttatggaacgtggagctgaaatcagtcagataaaaattatatcagctgttgctgcccctcctgccctcaagaagctcaatcaaagattcccaaggatttgtgtgtatacaggagccatggatcaaattgtaaacgagaaaggtttcataatcccaggccttggggatgctggagatcgcagctatggaacatgactccggcccttcggtgatggccatcgttaggaatttcagcaaaacccagatttagttgatgcctgcttattttcgtagatgagatttgtggttccactgaacacaaatctgtagttttgagggtctggacataatattttgacaatgtgatgtcaaatttcgcccttctattgtggcgatgtcctgataatggttatgagcttcatggagtgtttattttgagaagtgggatagcctgcaatcaccgtagctctaaacataacctatttgccttagctctgaacataacctatttgcttggtttcaagaatgatgggagtgctttgtttgaaaa

SEQ ID NO: 97346 - DNA, 459 bp, Zea Mays
cctatatttttgatagaatgtttcatcatgttctttttgtattattgtcagcgacatttgttcttgcctttggagagggatcatgtctaggctcacaacggggctcatgttgctcggcctcgtcgagctggagatcctcaaatgtagcagcaaaagcatctcaggagaccattaatagtatgaagagatcgatcgaagaaaataacctccttcatcaactattaagcttcaatcgaggccaagtgcctccatcttaagtctaactaaccactatagggcctacaaccttatggctgttatagtagcttgttacagtagctctagatttgaagttatatgattatttcaattatgcttaatgtataatactttgagttgaagttataggatttgatttggattttaagttaaagaatttgcagatatatgttttgaagttatataattctctcatggatg

SEQ ID NO: 97347 - DNA, 1385 bp, Zea Mays
caacttcgtgtccgaagtctcactcgtgccaaagtaagagggacaaagaaaattgtgctcatggaggcctcctcaagattggagcttcaacaagcgcacactgagctttggaacctcacctttagctaccttaagtccatggcacttgagtgtgttgttcaactaaacatacccaatgttattcacaactttggtggcaatgccactctacccagtattctctctgccatccaagttcctgaacataggaagccctaccttccacgcctcatgaggtttcttgtcgtatcaggtatcctttcatttgattctcccaccttaggggaggagggtacttaccacctcaccccattatcacgccttcttgtggatgacacccacattaatggctatgggagcctcggtccatttgtgctctcccaaaccacaaagtaccatgtctcatcggccacgtacttgtctgagtggttcaagggtgaagatggtgcggggcctatggctgcagagatgccattcaagatggctcatggcacaggcccatggggtgcccttgggcatgatcaacaattcaatagggtctttaatgctgggttgggatctaatagtcgacttgtgctagactttgttgtggccgaatatggtgatgtgtttgatggcgtaagctcactgcttgatgttggaggaggggatggtagcacagcgaggacaattagaaaagctttcccacatatcaagtgctcggtgttggatctcccaaatgttatcattgacatacaaccaggtgatggcatggttgactatattgcgggtgatatgtttagctcaatcccaccaactgatgctattatgctcaagtatgtgctgcatgactggaacgatgatgattgtgtcaagatcctacaacaatgcaaaaaggctatatgttcctgcaaaccagccggaggaaaagttttaatcatagatgtagtcgttggatctccattgaaagagatgttcgaagcgcaagtcacatctgatttgttgatgatggtgatagctgggggtaaggagcgtgataagaaagagtggcacaagatattcgtggagtccggattcaaggactacaagataagtccagttctggggtacctctcaatcatcgagctctactcgtagaaaattaaaaaaagtgttattagctggtgagaaacatgtctcgaacaagagggcgctgtgatccatttgccttggtggctttttgccaaataataagtgtccagctgtatggtcatatattcgagaaaataagagcatctccaaggtcattcacgcataaccatatttatgagctagctgtaattgcttttataaattattaccacatttatcaattcattcatgcataa

SEQ ID NO: 97348 - DNA, 105 bp, Zea Mays
ctggtttagggtgtatcttcgtcgtagatcaactgccctcgctagccgctatcccatccaccattacccagatcacaagtcgatccacccattaatcgacttgcc

SEQ ID NO: 97349 - DNA, 303 bp, Zea Mays
atgggtggagccgagcgggagcacggagaagacgctgagaggagggagatgaaggagctctggccatggagatgggcggctgagctgggagggaggctgcgcgcggaccgaacactggtgaattcctgcgcgtggggaaacggcaagcgcgatggccagggagttcggtcggacgagcgcagggaccgaacaccggccatgggagggatctcgggcgccgagcagggggcttcagggtgcggcgcagaggacttcgcgcgcgcagaggagctcagaactggagggcgcgtggctggagattga

SEQ ID NO: 97350 - DNA, 150 bp, Zea Mays
aaaccggcggtgggcatggtagggagaactggagggagcaggggatgggcgccgccatgggagctcggcgggaagggtattccggccatgggtggagccaagcgggagcacggagaagacgccgagaggagggagatgaaggagctccgg

SEQ ID NO: 97351 - DNA, 489 bp, Zea Mays
atggaccaagcgcgcaaggaagacgtcgacgtttggacggatgctccgggcacaggctcctgctgcacggacgtcaatggcggggacgcaatggcgaggcgagggcgccgcttggcgcggcaaccgtcgggctgggtgctggttggagcagcgggcaacgggagcatgcagttggagaagctacgcgcaggaatgaggaaggagcaggggtgccgagcgggtagggccttgagcagccgcgcgtctgcgcgacgtgctgctggggcgaggcaatgtgggggcatgggctggggagcacgtgcgtgctgggcgagcgcgcttgcgcgccgtacaggcatggcggcgacgctggacagcagctgggagcgtgctagggttggggcgctgggctgcgcgatgggggtgctactgggccgcgggcaggccaaggagggaggggggaacagggatgggccgcgcgatgggggtgctgctgggccacggggctga

SEQ ID NO: 97352 - DNA, 876 bp, Zea Mays
atggccgagataacctcacctcaagcccccaagaaaaggggcgcaggagacgaggagaggatacgggaggatgaaccgatgaggaaaggcggagcaggcgaggagataggaccgaggaaggagacgacaagaaataaaggcggaaggcgaggaggatggggtggacgaggtgggggacgtttcttgcgcctgcctgccctgctgatgctcgccctcgctttctctctcctgccgcgggcggcgtgtgaaggggagagctcctctgacccatgggtgaagtgggcgaggcgaggtttcagcatcatcgccatcatcgagggactaagaaaaattgccagacgcaggacatcggttctcttctacgtggagctacagggagtacttgaagagcaggccaccctgggtggcaaagaagggggcaaacacgagggactccacggccatgagcttgatgaggatgttgagggacgggccggaggtgtccttcagggggtcaccgatggtgtcaccgatcacagcggccttgtggcagtcagaccccttggggccaagggtcctcgcgtgctccagatgctccagatgctgccgccgaatcaaggacaagcagggaagaagaagcagggacaaggctccagatcaaggacaaggctccagatgctgccgccgcaccgagccaaggccgccgccgactccaggctcatcgtgtcgtgggcgccgcaggccgccgtgctgcggcacccagccgtgggcgcgttcgtcacgcactccggctggggtccgtcgtcgagggcatgggccggcggcgtgcccatggcctgccgcccgttctttggcgaccagctaatgaatgcgcgtgcggtgctgttgcaaggatga

SEQ ID NO: 97353 - DNA, 1162 bp, Zea Mays
cgtgtacacgtcccatcttgccgccttcaaaacctattgagcgggaagcaaggccgccaaaaccaaatcagcaaatcccccatccctatccagcggcttctggctcctccgccaggtcttgccgtccagcggcctcaccgccctcgagatttgctcggcacggtcgccttgtttgccgcctgcagcgttctcccactcggctacgggctacgcctgacgccaccgttaacggcgacatccgaacgggccccgacacccatctcgcgctcagaaaagggataagcagttgtgatcctgtcctcttggtcggatgcggggttactatgacatcgatgacatcctcatggaggatgagcctatttcagttgttttccaagtaactgcaaatggtgttggcctgctagatcctggtgctgaaaataactgtgtagagaagggtgccaaggtggaccttccattttggcttgcgcatgggctgctgtctctggaacaagctgtctcaataaacccgcctccatgcttcacacagaaaactcggaaggagatacaagctgatgcgtcctgtgtggatttgagggctcgttgcccatacttctatgagctaggatgcaagattgttcctttggtgagtgacaagagcattggcctgttcttgcgatatgcattcaccagtaggtacaaagaggttctaagcaagtcccacagttcttccatgatgacagtgcccaagtttgttccacgccttacaaaagaagaaactcgagtgtttgaatctgccagagaatcgatggctggtttcaagaaatggcgagtaggtggggtgagactacaaaaggcttccattcttggccggaagaggaagacaaagctgcctgatggaccacctacttcttgaatgagttttaaagtctccatggaaaagagtggttgatggttgaggtgatgtgcgatgttttgatttgctagctctctgagcaaagagaaaagttaatggcaaatctggatgtactatatgatctgctgtacattgtgcacttttgtatagtcggacgacagcactgatcggtccatccattgcaaggaaaatgaacacccgaaccatgatatcatgttcccattttcatattgctaaaaagtatctcttaaacttgtttttagtaaa

SEQ ID NO: 97354 - DNA, 645 bp, Zea Mays
gcgcaagcctcctggccgcgggcggctctagcccaggccaccttcgcgcccggggttatggcgcgcgtccctacgcctagctaggcgcctagcctttgtctccgtcgcgccgatccgcgctcgccaaggtcacccgccatcgcccagctcagcggcttcccctgctacaaagttcgtcgtctgtccgtacgtcgcctgctgcttatatcctagccaggtcaaccttgtcatggtgctggagctctcgtggatccggcatgtcgtctacttgcagctccggcaggccgcgtcgtcacactgtttactcctttgatgccgtcaagctacatcgctgcatcggctcgatggcaaggctcgcctgacaccatgttgtccctgttgccacgttcctcgttgtgttcggttccggttgcgccgtcggatgcacacctccggagctcgccggtgtcatgttctagtcagcatcatgtcctgcgcgacacgctctagtgtcgtttgtcgcgtattgcacgtcctcaccatctccaactttcaacgttcactgttgtccgctacgcgcaaccatgcgacaaccacgccatccacgacatatgttcgcgccaaaaatccgagaaaattagacataaaaggaaacaaatcagcatg

SEQ ID NO: 97355 - DNA, 408 bp, Zea Mays
atggctgggcgctgcggcgtcgagcagatccctgcgcgctcacgcccttggagtagggggctggacaaccatgggagagagggcagagctgctgcgttccagggatccaagcgccagggggtgagctcgggcttgagctatggagcagggagggcgctgcttgggggctcggctgggggagtttggctgtgggatttttctgggcgccatggctgccagcggccgagagcagagagctcgccgggagaaacacagcaggggcgcgcaccggccatggggacctcctgctcagcaaatcccgcgcacgagcagagagggtcacggcgctctgcagaggaagaagcaccggcgttggggaggagcggtgccacggaggagagcagaggcatcgtggatccaggcgtctag

SEQ ID NO: 97356 - DNA, 102 bp, Zea Mays
acgagcaaaggggaggcgcggtccagcagagaagataaaaccagagagcggacctgtacgatgagggagaaggctccatcggcttctattgggataaggaag

SEQ ID NO: 97357 - DNA, 2228 bp, Zea Mays
cggcaataccggccatccccattccccaaaccccaatcacttcctcgcacgcatacaccacgctgcctcgcgtcgccgccgcctccgtccactgccatgccttcccgccttctccagcagcccctccctccagctgctccaccgccgcctcccttgcttgcccatagtcaacaccgccgccacgccctcctcaccgccaccatcgcttccgcagtggccgcagtagctttgttgctcttgctcgttgtcctcctccggcggcggaggctccggatccccacactcccgtgctccccgctgttggactccggtcgcccgctccggcgttactcccgccgcacgcttcgccgcgccacgggcgggttccacccgtcccgcctcctcggcagtggcgccgcctcgcccgtctacctcgccaccttccccgacgcctcgctcgccgctgtgaagacgtgcgcgtcggcgcacgagctccacctcctcgcgtcgctccctgaatcccctcgcctcgtttccctccatggctactcgcccggcccgggctccggcggcggcgctgccgagcgcccgctcctccttgtcttcgagtacatgccacagggatcccttcagggcgcgctattcggaggcggcgacgccgctgcccgcgatggccagttcctggactggcagaagcggctcgccatcatccgtgacgtggcgcgcgcgctcgcctttctccacgttgagtgccagccgcccgtcgtgcacggcgacctcaagcccagcaacgtcctcctcgacgctaacttccgcgccaaggtcgccgatttcggcctcgcgcgcttcaagactcccgatgcaatcgccgcgtctggtgctgccggggacgatttcatgagccaagaactcggcgaagccggcgaccacctctccaccaccgcctccgctgccggcggggccaaaacggacacaaaggatgattctggcccggctggtgcgtgggggaaggagtggtggtggaagcaggatggtagcggtgagcttgactcgagggattacgtcgccgagtggattggcagccaaatctgcccggagaggaacccggattgggtcaacgagaacgaagacgccgccaacgaacgtaagaactctccctcgggtacgcacgaaaacgctgtgtcagcctcgccgcccgaggacaagaacaacaccgactgcaatggcaatgtggacgtcgccaggaaggaggggaccaagatgagggagtggtggaaagaggagttctttgaagagatgagcaagaagggaggaagcttcgagaagcggcgctccggcggcaaaccgtggatccgttcgatcagcatgaacacgggccacggcgacaccaacggcggcgagagcaattctgtggacctgagcttccggagaagccggaagcggagccggcggcgcggccggtcagtgggcagcgacgtccacagcggatgcggcggggacttcctcagccgggagcttagcagcacgacgagcatgcgcggcacggtgtgctacgttgcgccggagtgcggcggcgggccttttgagcacggcagcgatctgctggagaaagccgacgtgtacagcttcggcgttctcgtgctagtgatcttgtccggtcggcggccgctgcacatcctgtcgtcgccgatgaagctggagaaggcgaacctagtgagctggtgccggcagctggcgcgagccgggaacgtgctcgagctcatggatgagcggctggccggcggctacgacaaggaccaggccaccaagtgcgtgcagctcgcgctgctctgcctgcagcggcagccggagctccggccggacagcaaggacatcgtcaagatcctcgacggcgacatggaacttccgccggcgccggtggagttctcaccgtcgccccgcctgcggcctttcccgcggtcttcgcgccggccagcacagcctgatgccgccgagtgatgatggtacctctgctccttgcggatctgctgtttcgttcgtgattgatgtgtgtgaattgacaaaacccatggtgccgtgtagattgttttgttttgtgtacataggagcaattcagcttccgccatctaacacttgaatacattccatgccaattcaaaaattaacgaagcatcttgcagaaaacaaacgtagtcaatcctgaagagcactcattctgtaacaacaaattcttgtattcttcgtttttt

SEQ ID NO: 97358 - DNA, 777 bp, Zea Mays
atgccctgcacccgccctctccagccaagccctgcacctgccctagcccccaccatcaacggccacggcaccggcgacattgcaggggctgaggtaggggtcatttttgctgttgttgtcgtgcgtggctgccgctgggtgaccctcctgcgacgacgacgacagagacacgcagttgctgccccactgctacaggtcctcgagctaccgggggaggaaggtaatactggtgttgctgtcatgctttatgagcccagatataagcacaatgtcagcagactagaaagggagtctagggttaaatttgagcatatctctgtgccacaacccactgatgtagcacaatctgctggcagtgaagctgcagatgccattgcgagtgtgtcagacattgttattcctatcttcaggcagcaagtagagcagttgctaagctcttccagtctgtctgcagctgacttgcttgccaaagcacttgcgaaggtagttttggaactaacagaaatatgtgtcttagggttacacggacataaagaaaagatcattgttatcttccttggaggattacagtacactacatcttcaaactggcagaccgatgtggtcacctggtttgacgtcgacaacgtggtcatggtgaccggcgggaggagcaccaggcgtgtaggagtgatcaagaactggagtgatcaagaactgggagaagcacaagggcatcttcgaggaaaacatagaatggaattcaaatttggtggtcgcaaaagtgtggtgacttga

SEQ ID NO: 97359 - DNA, 360 bp, Zea Mays
atgagacagctgtggcaccatatgaacacgcagaggcgagctcacgatgtgagggagaactgggatgatgaggcatcagggagccgcgtccacgagcttgacgagaagacatgctactgtggtagggcccgattggatgagggaggtcagcagcgatgcatgtctgacgaccgagaggagctcagagggcgagacctacaggaatcaagtgcgataggcggagaagcagctgacgcgcgcgagcatcagggagccggcagaggtatcgctggccggaccaaggcggactcgctagtgctcaggacgcgcgagggacaggacggaggtcagggatggagacgcatggaagctagaagataa

SEQ ID NO: 97360 - DNA, 2476 bp, Zea Mays
gcgcaacgcagcggaaaagcgccatctcattcttcttcctccatcttgtctctacttgccccgcgccggggagccgcgagcgtcgcgccactcccatcgcctgcccacaactccggcatggagccgtcggcgtgggccgtcgccttcgccgcactctgcatcgtcgcgctcgcgccgccggcctcagggttctacctccccggcgtcgcgcccaatgacttcgagaagaaagatccacttcctgtgaaagtcaacaagctgacctcaatcaagacacaacttccctactcctactattctctcccattctgcaagccggataccatagttgacagtgcagaaaatctcggtgaagttcttcgtggagatcgcattgaaaactctccctatacgtttgaaatgagggagcctcagatgtgtcaagtagtctgcaagatatctgttggggagaaagaagcaaagcttctcaaggagaagattgaagatgaataccgtgttaacatgattcttgacaacctacctttagtcgttcctattcaaagagtggatcaagaaggtgcatatttctatcaacatggattccatgttggggccaaaggaaaatattcagggagcaaagatgaaaaatacttcatccacaaccatctatcttttacggtgaaatatcacagggatgagcaaagggatgtttccaggattgtggcctttgaagtgaaaccatacagcgttaagcatgaatatgaagggcaatggaatgataagaagacccgcctgacaacgtgtgaccctcatgctcaacgtatcattacttcgtccgagtctcctcaggaggtcgaagttggcaaggatatcatatttacttacgatgtggatttcaaggagagcgacatcaagtgggcatctcggtgggacagctatctattgatgacagatgatcagatccactggttctctattgtgaattctctcatgattgttctcttcctttctggaatggttgcaatgatcatgcttcgtaccctttaccgggatatctctaagtataaccaacttgagactcaggaagaggcccaggaggagactggatggaagcttgttcacggcgatgttttcaggcctccgtcaaactcagactggctctgtgtttatgttggcaccggtgtgcaattctttggcatgctgcttgtcactatggtatttgcggttcttggcttcctttctccatcgaacaggggtggactgatgacagccatgctcctgctctgggtgttcatggggttgcttgctggctactcttcttcacgtctttacaaactgttcaagggctcagaatggaagaacatcgccttgaggacagccttcactttccctggcagtgtgtttgctatttttttcttcttgaatgctcttatctgggggcaaaagtcctcaggtgctgttccattcaccaccatgtttgctcttgtcctcctttggttcggtatttcagtacctttggtttttgttggaagcttccttggcttcaagaaacctaccattgaagatccagtgaagacaaacaagataccaaggcagatccctgagcaggcctggtacatgaacccaatcttctcgattctaatcggagggatccttccatttggtgctgtcttcatcgaactcttctttatccttacttccatctggctgcaccagttctactacatctttgggttcctcttccttgtgttcctgattctcatcgtgacatgtgctgagatctcgattgtcctatgttacttccagctctgcagcgaagattacctgtggtggtggaggtcgtacttgacttctggttcctctgcactctacctcttcttgtatgcaaccttctacttcttcacaaagcttgagatcaccaagtttgtctcagctgttatgtacttcggttacatgctcattgcctcgtacgccttcttcgccttgaccggcacaatcggattctatgcttgcttcctgttcacaaggctgatttactcatcggtcaagatcgagtaaggtgaagtgcactcttgcctatttctttgttgccacgaagaaagaagtattctatggatagtgaattctacaggactgctgagtttagctgcaagtgggctcgttttgagttttcaaagctggtagttatgatgaagatgcgattcattaccgtatgattccggtattatagctagctcagtatgtttctgtttttcttttgtttttttttgttttcgggctgtgcccgaccgtgaggatatatgcttatcaagagcttgacgctgaaagaattgtatacgggtgctgagtaatctatctcttgttcctctcagaatttatgtacttgttgatgtgcactgtgacgtacatgatatacatttatagctaccggctcggcggctcctgtttcttttgtacctgagtccagataaatggattcttatacatgtttttctaa

SEQ ID NO: 97361 - DNA, 1059 bp, Zea Mays
cacagcgtggatgtggtgatccttatgttcctgctggtgctaaactcctccccagtctccagagtaatatgttccagagctatacacactgtcttccttggtctggtgaccgcaccccatagattctcttacctcaccatggccaagtcatctggagcagttgtgcatctggggccatgccaccgtggtctggcgctacggacagcctccacgccggccgagcgactcacgctttctccggccgtcttcacgcgagcaccaaagtcttgaaccaagacctcccgcttcctgttgcccacgtcgccggtcagcctgctcggccactcatccagcagagctggaaggcatcttcattttctcccattcgcttcaagccatggcctttaactactaccgaagcacttggtgtgggtctgctgcagctaataagaacaatgaagaaattgaagcatgtgctgttttggttgcaacattgaggaagaagcggcgttggggagggtctgttgttggccataagatgaaaaatcgcgaccgtattggtggcgacattcaactgaataatgactactttattgagaggtcgttgttcaaccctgagcaattccgcagaaggttccgtatgcaacaatcccttttcttggagattgaagataaattggcagctgcaaataagttctttagacaaaaaagaaatgcagctggtgtgtttgggattctccagtagacaaaagtgtactatggcttttgcggatgttggcttatggaggtccagcaaattttctagatgaaggtctgcgtatgggagaaagcacagtccttcaaactatcaaggagtttgctaaaacagtccttcaaacatttttctgcttagcttgtttcttccctcctctagatggcagtagtgattcctcagacgtcaaatgaaattgggaagaccctagctgatgtatccccttcatccatgttgtactgcacacacacaacagcagtagtaatttgtaacatatgcaacatcagggtagcaaggttaatttgctaatattcttccaatcctacctc

SEQ ID NO: 97362 - DNA, 104 bp, Zea Mays
ccatctaactgattatcatggtagaaggatctagaacctcttctctgcaacaaggtaaggcccgatgcatttgcccctttcttgtatttttaaaagacttttat

SEQ ID NO: 97363 - DNA, 461 bp, Zea Mays
gcctccgtgttgcgcccatggattcggctgtgtgtttcctcccaggtcggcctccacttcaagccgcgtccgcgacgtgcccgtcgaaccccagcaaaagcctgaaccagggtctcatcattgctttcgtgaagttcaagctggatatataattttggaagtagatttggtgctgaagccgaacccagcatccctcttattcttcgtcgtcaatccacaccgcgtccacgacgtgcctgtcgatcccgacgatctatctgccagttgcgcgccacttgtgatgagctccaaagtcctttgtcgtgctcgaccttggaagcctccaactcgtcaacatcccttgtgtcgtcgaaaaatctagagattttggataaagcaacaaatcccgcgtgatgctcaccatgtgctcggcgtagtggcagaaccgggaatcgtagctgtgctcgtggccttcaagacgg

SEQ ID NO: 97364 - DNA, 1201 bp, Zea Mays
cccatctcccacctctccttccttaccggaagagaaaaaaagatgaaaaccaaacgaacatacacagatacaagcacagcagcaacgatatccaaagctagcagctcatcagataggcaaacaccaagaagctaagctagcgcgccatgcagacgccgaccatgtcgacgtccatggccaccacggcgccagcgaagccccccgcgccgccgcggcaatgctgcaggtacctcctcctcccctccaccggccaccgccggagcgtggcggcatggtctgccaaaaagaagaacccgtggctggacccgttcgacgatgggcccgacgaggagttcgattaccagggcatgttctccggcgggaagcaggaggaagacccgcggccgcccgaggaccctgagaacccgtacgggttcctgaggttcccgcagggctacaacccggagctggacagcctcgcctccaaggtccgcggcgacgtgcggcgcgcgtgctgcgtcgtgtcgggcggcgtgtacgaaaacgtgcttttcttccccgtcgtgcagatgctcaaggaccggtaccccggcgtgctggtggacgtggtggcgtcggccaggggcaagcaggtgtacgagatgtgcaagaacgtcaggtacgctaacgtctatgaccccgacgacgactggccggagcccgccgaatacacgcacatgctcggcgtcctaaagaataggtactatgatctgatcatctccacgaggctggcggggatcgggcacgcgctcttccttttcatgtcgtcggcgcgcgacaaggtcggctacgtttaccccaacgtcaacagcgtcggcgcgggcctcttcctcaacgagatgttcaaggcgccgactaacaacctcgccgacggcgggtaccacatgtgagagccctccatttgcacaacgatttgcttgctagtttttcaattgcgttgcgtgcgagtatgcaactgtgccaggtataaagacatgctggagtggatcggccggccggcgaagaacgttccccagcagccgacacagccgctgcgggtgtccatctccaagaagctacgggcgtacgtggaggacaagtatagccgcgccggcgtggagaagggcaagtacgtcgtcatccacggcatcgcctctgactccgtcgccaacatgaagtccagaggcgacgacgactgccttct

SEQ ID NO: 97365 - DNA, 1747 bp, Zea Mays
cccatctcccacctctccttccttaccggaagagaaaaaaagatgaaaaccaaacgaacatacacagatacaagcacagcagcaacgatatccaaagctagcagctcatcagataggcaaacaccaagaagctaagctagcgcgccatgcagacgccgaccatgtcgacgtccatggccaccacggcgccagcgaagccccccgcgccgccgcggcaatgctgcaggtacctcctcctcccctccaccggccaccgccggagcgtggcggcatggtctgccaaaaagaagaacccgtggctggacccgttcgacgatgggcccgacgaggagttcgattaccagggcatgttctccggcgggaagcaggaggaagacccgcggccgcccgaggaccctgagaacccgtacgggttcctgaggttcccgcagggctacaacccggagctggacagcctcgcctccaaggtccgcggcgacgtgcggcgcgcgtgctgcgtcgtgtcgggcggcgtgtacgaaaacgtgcttttcttccccgtcgtgcagatgctcaaggaccggtaccccggcgtgctggtggacgtggtggcgtcggccaggggcaagcaggtgtacgagatgtgcaagaacgtcaggtacgctaacgtctatgaccccgacgacgactggccggagcccgccgaatacacgcacatgctcggcgtcctaaagaataggtactatgatctgatcatctccacgaggctggcggggatcgggcacgcgctcttccttttcatgtcgtcggcgcgcgacaaggtcggctacgtttaccccaacgtcaacagcgtcggcgcgggcctcttcctcaacgagatgttcaaggcgccgactaacaacctcgccgacggcgggtaccacatgtataaagacatgctggagtggatcggccggccggcgaagaacgttccccagcagccgacacagccgctgcgggtgtccatctccaagaagctacgggcgtacgtggaggacaagtatagccgcgccggcgtggagaagggcaagtacgtcgtcatccacggcatcgcctctgactccgtcgccaacatgaagtccagaggcgacgacgactgccttcttcccctcgggcactgggctcagatagccaaggaaatcagctccggcgacagggggctcaagcctctgttcgtgatccctcatgagaagcacagagatgaaatcgaggaggaggtgggggacgacacaagcatcctgttcatcaccaccccaggccagctcacctgcctcatcaacgactctgccggcgtcgtcgcgaccaataccgctgccgtgcagctcgccaacgcccgcgacaagccatgtgtggcgttgttctcgtcggcagagaaggcaaggctgttcctgccatacgtggagggcaagagcagctgcaccgtcatatcttcggcgacggggaacctgatcgacatcgacctcaacgcggtgaagaatgtggtgaaggacttggagcccgctcccagcttcgcattggcacagaagtagcagctgcgttccaacatcacccccattgctttgtacatagttcaaacagcagcaacgctagagagaatggtgcagtattacaaactacaaacagcacacatgccgtgtattccgatgttataaataacatctcatatcagctatgcaacgaataaaacttagaacaagaaaccaaaaacaagataacataaatgaattaa

SEQ ID NO: 97366 - DNA, 420 bp, Zea Mays
atggcgcggctggagattcgacgagcaggagccaggcgcagaggcgagttcggggagcagcgcgccgtccaccagcgccgctgtcacggcgacgaggcacgcgagcaacaacactgcggctctccacgacatcgtcacggacctgtgcgcacctggagcttcgataatcacggaagcagggaagctcgcgggcgagcagatggacaggggcgcgactgggtacgccatggattgggcgcctggcgagcggacaaagggaggaagcgagggcgcttgggggaggaaagagagaagcaagggagagaaggacccgagccattggcgttcgcgagcttgagaggagatggggcgccggcgagccagggagccggacgcggcacaaggagcgctcggccggggagcgcgctgaaggagagatag

SEQ ID NO: 97367 - DNA, 191 bp, Zea Mays
tttttttcatttttttagactaaagcgaaatgcagatattttgatgttataaaatcagtgtctaaaagatgtataaaagggtcgaacaaaataagatcgccaataatatttggaccggatttaatttggtgaatactttggagtgagataaattttcacccgttatttatatccaaagttttggatcgggg

SEQ ID NO: 97368 - DNA, 393 bp, Zea Mays
acctggcatggcaacgcaagtgggcaagagcttcttgagcatggtttcgcgttcctccaggaactgctccggggtgagcaggccggcgaggccgaactcctcaaacaagatgcgcgtggactcggccgtggtcttgcccatcatcttggccttcacggaccagtcgaacaccttgccgaacctcatcaggatcttctcctgtaccgttgtgtagaacccctccataccgaggaggaggccgtccatgtcgaagatgacatgcgagatggcggcccttgtttgcggcggcggcgcgggcatcgcgtcagcatctccggcgtcggcggacggcattgactgacgcgaaagagatctatttggtgtggggatctcgtctgatgattggtttcgttc

SEQ ID NO: 97369 - DNA, 246 bp, Zea Mays
atgccgctagcccaacaagtgggcgatcccgatgccgacatatgggatgccgcctccggactttgcactgccaatgccaatgctggcgcctccacctccgccttcgtcacaattccctacgggatttcagacaccactcgcttcagttgccgcacctggagatgggtctggtcaagacgacgcatcacattcttgggtgaacaaccttttcaacacgcagagtccagccggaggaagtggctataa

SEQ ID NO: 97370 - DNA, 174 bp, Zea Mays
atggctctgcggctagccggcacgaggggaggcctggccaccggggaccgctgctcggtaacgcggccaaacgcaggaggatcggccatggccaccaggggcgaccacgcgcaggggccagatgcttgggcgcgcgtgcaagccgacacgctagcgcgctgccgcgctggctga

SEQ ID NO: 97371 - DNA, 180 bp, Zea Mays
gagatggagtctcactctgttgcccaggctggagtgcaatggtgcaatctcggctcactacaatctccactacccgggttcaagcgattctcgggcctcagcctccagagtagctgggattataggcatgagctaccatgcccagctaatttttgtatttttagtagagatggggtttca

SEQ ID NO: 97372 - DNA, 162 bp, Zea Mays
cccacatggatctccaaatcctaacacatattttgcaggatccatgagccatcatcagaagaacacaaattatgtgcagacaataaataaagtattaacacacccaaaatatgtacaatcattagcacaacaaaaaactaacacccaaaacaacagaggaac

SEQ ID NO: 97373 - DNA, 143 bp, Zea Mays
ctgagtttgtggatgttgaaatggtcttgaagatatccagggtaaagctccatctcatgcttcacctgatcaatctaatcaaggcattttttagtagaaacagaagttatgagaagaaactggaaactgttggcataaagata

SEQ ID NO: 97374 - DNA, 739 bp, Zea Mays
cagcgcagcgagatggagcacgacgctggaggagcagagggagaagacgccgaccagggagaagcgtgcggccatggacgaactgcaggccgcggcagggcgggcacgaggccggccagggagagcaagggagggagatggacttggcgagctggaagccaagcgccggcgagctggaggccgggagggcgctcggccggcgaggttggccggcggcacggcactggggactggcgtgggaggatgcgcacgcagggactccacggcgcgcagatgccagggcgtgcggctagggaagaagatggagcagaggacgctggcttggaggagcaggggggtgcacgacggccatgggaagctggggcgcgcgcttaaggagggagaggaaggagccgagcaccatgggaaccaaggcggggttgcggccggcgagctggagatggccggcggcgcgagcagggaaggagcagaggccgagctcggcgcacggcatagcgagttcgaagcggtgccgagcagggggagccgccatgggcgagatccgtgcttgaggggcgcggcaaacctgaagccgagcaggcaggggcggacgcgccaggagcaagggagcaggtgccagggacgcaacagcagggagatgggcaccgcggctggagaagataggaggagcggctgggcactagagagccgagcaggtgatgtgctgcacgaggaagaagaatgcgtagccagaagataa

SEQ ID NO: 97375 - DNA, 81 bp, Zea Mays
gtggggcaaactaagaacgtgggtaccgacgttcttattttagttaaattcatgggtttgacgaagaacgtgggtacccac

SEQ ID NO: 97376 - DNA, 1909 bp, Zea Mays
atggtcgtggagttcgggcggcatggggtgcagctgatcctgagcctagcgaacagcctcagcctggcgaacaacctggaggcgtacggtggcaagacacagtacgtgcggtgggcgtgggaagagggcgtcggcatgtcggcctccaacgattccttcttctacgatccagccatccgcgactacttcaaagtctacctcaagagtcagcttgcttggaagcgacttgtagcactgggttctcgtgcaccaaaagcatctccaatttttagtaaggttgcttgtgccattggcttggctgtgagtaggtctaatatagctccttaccttgtcgcttttattgcgggagagatcaatatatttggcattgttgttcactccaagtatactgatggccccatttgcagagactcttggcatactttggagcttgcaggtcctgtgtttatcaaatggggccaatgggctgcaacacaccctgatctatttccaagtgacctttgtacggaattgtcaaagctgcacacaaaagcaccagctcacaattttacctatactaagaaaactgttgagaaagcttttggtcgaaagctatcagacatttttgaagaggaccctgttgcatctggaagtgttgctcaagtgcatcgggctgttctacaattccggtatcctaatcggcagacaaagcgtgtaactgttgcagtaaaatttgctgtcttcatgatgtctgaagttgaccttgcaagggaagctgctcatctgagccggtttatctacaacttccgaaggtggaaggatgtatctttcccaagacctctctatccacatgttcatcctgctattttagttgagacttacgagcatggggagagtgtttcacgctatgttgatgaccttgaaggacatgatcgaattaaaagtgctctggcccatactggtactcacgcgctcttgaaaatgctactgatggagagggtttgtgagaacacggtgtctgttgagctcaagcaaactaagccgaacaacttcatcccgttcatccggtcaagggagtggtctgatattggaggtcgcgattacatggaagatgcccatgtgtgcatctctgatctggcgaagaattttggctctaactcagcggatgatgaagtcatctccttctacggggaagaggaactgaaaaggggtgagctggaggctgacaaagacaaaatgatgagagagtatagagctcaactggatgctgaaagacctcaaaagctagcaaacggaagaaatcactcaaggtcaaactcaaaatcatcatcttccaagaaagagaggaaggataaggacgcaaagaaaagaagtaaaaataggagaaagcacaaaagttcatcagagtcaagttccagctcatcttcagaatcttcaagcagcgacgatgaggataggggttcaaggaagtcaagatcacagtcgagatcaaagagaacaaggaaggaaaagaagagcctgtcaaggtccaagcgcagaggcggtgaaagcgaggaggaaggcccagttgagcgagccgtttaccatggtgttctcaatatgatgctcagctgttaagagggtctggtcaagttgtgtggcttccaaaaactttgtaagcaactggattccagctctcatcaagtgactcctccccctcacgttgactttgcggacagatgtctcaattctaatggtggagctatgaacaacaattcgatgtcctgatcgagagcgatggagttaatgtttgaacttgtgtgtttgaacttgtgaactaaaaatgtgaactatggatgtgaacttgtgtgaatttgtgaacttatgtatttggacttatgtgaatttgtgaacttatatatttggacttgtgtgaatttgtgatatgaac

SEQ ID NO: 97377 - DNA, 831 bp, Zea Mays
atgaccaccacgccatcgttctcctctccaccaattcccatccaccaagtcatcaccatcaagcccacaaaaacaaactatctcctttggcgtgcacaactcctgccatattttcgcagttcgaagcttctcgggttcctcgatggatccaatgccgctcctctcaagaccaagccgattatcacgtcggtcggcacgacgaatgcccccaatcccaactacgagcgctggtatgaccaagagcaatagctgctcggcggtttgctttcgtccatgactcctgaggttctccaggatgtctcggatgccacatctgctaaggcggtgtgggattccctccaaaagaagtatgcctcctcctccaaggcgcgggtcattcagatccgccaagaactcgccacgacacgcaagcacgacctctccgctgctgatttgtactacaagatcacgggtcgcggcggtggacggcgtggtcgcgggcgcggtggtgcacctggaggcacgtactctcacagtgcaactcgtggctgggctggcgcgccatctcgtggtggcacatgttcaccgcgtggtggtggccgtggtcggggcaatcgaccccaatgtcaaatctgcaaaaaattcagccatactaccatcaactattggcatcgtatggacaagaactatcaagatgatccttcaaccatggcccttgctgctacctcttcatccaaggttgatccaaactggtacaacgaaactggtgcgacggatcacatcacaagtgatctagatcgtcttgcgcttcacgagcaataccatggcggcgactccgttcaagtcggcaat

SEQ ID NO: 97378 - DNA, 210 bp, Zea Mays
atggccatgggaagggatcctcgcgccatgggagaaaagaagagagggatggctccacagcagcgcaccaaggagagcccgagcagagggggagagatggcgtgggggaagagaagggagagggcaagggctgccatttatagagccaagctctggacatgtcagctagctgtagcaggtggcgggtgctacagtgacatctttgggtga

SEQ ID NO: 97379 - DNA, 168 bp, Zea Mays
atggggagaggaggagatgggggcgagctgcaggtggaggagagcgcggctgtgagggagagcgcttgggaggtggagcttgggcgagctccatgcccgggagctaagggcgagtgcaagccggcaaggagagagagcgatgtgagggagtttggcttcttcacgtag

SEQ ID NO: 97380 - DNA, 1182 bp, Zea Mays
atggatgggaatcggatcgctgagattgaggatggttcaaatgatgatgacatggtggaagctccatttgtgggtggtgatgttggtagcaatgaacagatggcagaggattgtgttgttcatgcctctgttgctagtgatgagcatgagcttgacattgcccagcaagttagtctaggaaagaaaaagaaatccatggatgtgaatgaacaacgtgttgtgaaacaacgtaaactagcaccaaaagtgaagaagccaactagtacctctaccaacaagttaatggcatctgcattcaaggtcacatcaagcaagggcaaacttatggttttaatgcaaaatacggctacagctgtacaacctgtaagtgctagcgctagtgctagcgcaggcgcaaattcaagtgtaagggcaagcacaagtgcaagtgcaagcatacctgtaggtgtccaagcaagtgtcgaagacaatgaaaaagaagatggaaagattgggaaaaggctcacttcatgggtttggcaacatttcacaagagatgctatttactatacggatgcttttgaccgtcttgctaaaaaagataaggatagatttggtcatatggctccttcaagtgatgattggttgaatgcaataaatatcagcaagtgtttgaaaaagttctatgatgtcacattacttttttctggcacttcatatcctactgcaaatcatttctttcgcaaattttctgagattaagatggctattgcaagatggtgcgagagtagtgatatcataatttgttccatggcattctctatgagaacgaagtttgataaatattgggacatgaacaatatggctttagcagtgggagcatttcttgatcctagatacaaacacaaaatggtggagctatacatgtctaagatgtatgatagcgagagggttgagttagagaagttgtctttcatgaatatcatcaatgagttatttgctttttattcatcaaacatcaatgcaaaaacaacgaatatggcttctacctccaaggagagtgaatttgttccaaacaaaactaattctttgatggatgatgaggatgaagatgaggttgatcttgatgagttatatgcagcagcaaataatgtgaagaaagcttcagaattggatgtgtatatgagtgagggtttgttgaag

SEQ ID NO: 97381 - DNA, 315 bp, Zea Mays
atggaggagaggggttggtctgcccttcttgaggaggaagaaaggcgccgctgggcttctctggctggtgtgctgctggaaagaggcgtcagggaaggggaggaaaggctgctgctcttgggtgccgagctgaagaaagggaaagtgcagggggctcgaccatggggaggtgctgcgagggggagggacgttcaatccatgcatgggagatgtaggggcgcgctggagaggggatggagcagaggggagaagggaggtcggccatggggaggagaagggcgccgagcacatgggctctggacgccatggccgtag

SEQ ID NO: 97382 - DNA, 531 bp, Zea Mays
ggtattctagggacttaggaaacgatcctaagaaccagaaactctaacagggcgagctgcagcacggaccagaggcacatgacggcttgggtcagactggtggagctcgcatggatttctattagaccagggtgagctcggatggaggccagggcagcaccggagagggagctcggcgagctcaaccaccagggggtgcgacgaccaagaagacgagcaacatcggccagctatggccggacccggagaagatgagggaggccgaggcgagcttgagcagggagagagcgctcgggcgccatgggcgaggatctccagtcaggggcacgaagaagcggcgcttgagggaggagaccggaggggaggcgaccagcgtgaaggccaccagagggactcgcgcgcgcgggagctccgcggcgccggagctggagcaggaacgcaccggggaagagcagcagcagggagagcgcagtccaagcgccagccatggatggacgtcgagggatgagcgtcgtgagggttgagggagag

SEQ ID NO: 97383 - DNA, 384 bp, Zea Mays
atgggcgacatggagctgcttgacgactggatggtgaagggcacgacgggccagggagacacgccagggcgctgcgacaaggtggagaagggtcgtgctgggagggatccagtggagtctgagtgcggcttggcgagggagaagatgcgctggccatcgataaaccccggcgaggatctcacctgcggggaaaaacacagggcacgcacgcgtcaggcgactagaggaagaagggcgcgagcgagctggaccatggtgttgagggcggccatgggaaggaactcggcatggggcagcagccgagcgctagagttgagaccatggcggcgatggtcgagtgggagagggcgctcgacacagtggagatggggcagtgtgcactag

SEQ ID NO: 97384 - DNA, 174 bp, Zea Mays
atggggatatcctacacatccaatggggccttggggacgccccccatggccaacacagccacttccatcaccagcggactactcaactactgcttgtacatcttgcgtttgatcaagctcgtagtggacatacttgcaagtctggatattgtacaacatattacagcgtgctaa

SEQ ID NO: 97385 - DNA, 877 bp, Zea Mays
ccgacgaccagcagacagttgcggcacaccgactggatcaggagcatgatagtccttttgatccgattcgtggagggctcggcgcctcggtcggatctgacccagggggcgccgccggtccgtccggttgcagccgcgtctgagtttttaagaggattgctgaacgacgaaggacacagaggggttcgtcgacaggctgccgtggtcagccatagaaagcatgctcctctcctctccacagcttgcagtagttgctgctcatgccactcgtctcgaagaagacagctccaacacttgttgcgtgactgctaacagtagactcgcacatagagacaaggagagatcatccatccattatccatgaacaaccttaaggatgtaatacaggctagcaatctccgcctccctgaatccgctgctgccttttgttcaatcccactcgtgcctacctctggttatgatgtaattaatataatttattagttagtgctttagctaataccaagtgattgactctctagccgcctggaccgcctcaactccggcatcgtcgtgccctgtttagtctatcgctccaacttttcctcacttaatgtacatggatggatgagtctgccctgccttgcatccctcccaaatgcgttgttttttctttaaacaaaaagggcacacttcagtgtaaatttcagttcttgctgtctatctagactcatttttttgtttcaggaacttctgctaaaagttttgtgatctatccagggctccaggccattttgctgcaactttgtaggctatcacataaacaggcttttataaagctagatcggtagttcatgtgttctatttctagggaaatgaatatttcaaatagaacaag

SEQ ID NO: 97386 - DNA, 448 bp, Zea Mays
tccgctcttcctcacttcgtgtacatggatggatgggtctgccctaccgtgcatcccacccgaatgtgttgttttttccttgaacaaaaagggcgcacttttgttataaatttcacttcttgctatctatttagactccatttttgtttcaggaacttattctaaaagtttttgtgatttgtacaatatgaagcgctcaagctacttgtacaacgaaccaatgcctgatgctacattagaataggagcagatttggaatttaccatattaaaggaggccgaggatgattgactgaagtctgaatctggatgatctatatattaaatcatactcacgctgaattactgcacgaaaagaacttgggaagcttaaggaggatttatattttgtatagtttttctttactttatgaatattgatatgtattgtacaccaattatatgtatag

SEQ ID NO: 97387 - DNA, 111 bp, Zea Mays
tttttttttatgttcggttaagcccactaggattctagcctataggtttggaatttttttggctagagaaggtactggattggagccaggaccggaagggcctggaaacaa

SEQ ID NO: 97388 - DNA, 240 bp, Zea Mays
atgacgcaagcgagagacgagatgctgctgagcggcggtggcgcaagcgggagacgaggttccctttctgatttcccgtcggcagacgacgtggggcagaagaccaaggcgatcgtgaccaccagcatgaggaaggtgaaagatggaacatctcaggggttccaatggatcaaggacaagtgccagcggaacggtggcgggaagaagcagcaggactccgaggcccctaggtattgctga

SEQ ID NO: 97389 - DNA, 824 bp, Zea Mays
acgtggtgcaggcttctccagccgctcctccactttctcccctcagcgctcggtgcccagggctccagtgccgcggcgcccctgcttggaggtccctggtgccgcgcccctctctgctcgcatctccctggtgctccagtttgggagctcggccgctttttcctctctgctgcttgctgattccctttcccccaagctccctgccatggccgccatctcccatggaagctgcgcccagccgagctccctctccgacggtcgtcctcgcctcaagttccctcggcgctgtccctgctcgcctgcgcacctttccccggcgggagctcgcgctctgcggagcccggtccttccctaccacgtgccgagccctttgccgtgccaagctcctaaccatggcgctactgctcccagccgcgagctcgctgagctctgccctcttccatggcgcccaacccgctgcttcgcgaccccagtcctctcccatggcggcgcgcccatcctctgctccctcttcccggatctcgcgcgcccctgattcctacttctgctccagcgcgcgcgttcttccctgtcgcgtctggccgtcgtcaagctccatggtgtctggccccgcttggatctcgtccgtgccgtgcagctccctctgccgatttcgctgtgcgccgaggtcgcgtgcagctcgtccagctcataagggtgaatcacagtttgagattgaaaaaggagcttagaaggtgtagataatgaagccctagattgacgtttgccgttgtcgtttgtgcgaacatcgaatcaaattgtgatgcggtaagctaattcattat

SEQ ID NO: 97390 - DNA, 3418 bp, Zea Mays
atgagagcggatctcagcaccatccagcagacgctcacgccggaggcggcggcggcgctggcgcgtgccatcgacgaggctgcgcggaggaggcatggccagaccacgccgctccacgtcgccgccgcgctgctcgccgcgccggccggtctgctgcgccaggcgtgcgctcgcgcggccgccgccggtgccgggcctggcgccgctggtagcgccggcggtgcgcacccgctgcagtgccgcgcactcgagctctgcttctccgtcgccctcgacaggctgccggccgcggcctcggcggcggcggcggcggcgtcgcatgcgtcggggccgccggtatcgaacgcgctcgtcgcggcgctcaaacgcgcgcaggcgcagcagcgccggggatgccccgaggccgcgcagcagccgctgctcgccgttaaagtcgagctcgagcagctcgtcctctccatcctcgatgacccgtcagtcagccgcgtcatgcgcgaggcctccttctcctcttcagccgtcaagaccaccatcgagcagtcgctcgcgtcgccttctccgccgccctccgccgtctccaccccgaccgtcgccgcgactacgaccttggccccgtccccttctccgctctcacgactcggctcagccaacgcctacatgaaccctcgcctcgcagccgccgcaggcggtggcggggacgacgcgcgcaaggtgctcgacgtcatgctcaagccggcgcgccgcaacccggtgctcgtgggcgacgccgggccagacgcggtgctgaaggaggcggtacgcaggatcccgatggctggctctccttccctcgccggtgcgaaggtcttgccgctcgagagcgacctcgccaagctcgccggtgacaaagccgccttggcggcgaggatcggggacctgggcccggtgatccagaggctcctcgtggaccacggtgccgtggttcttgatcttggagatctcaagtggctggtggacgggccggcggcagcagcgtcagaggggggcaaggcggtggtgtcggagatggcgcggctgctgaggcagttcggaagcggcaaggtctgggccgtcggtacagccgcttgcgccacctacctccgatgcaaggtctaccacccaaccatggaggccgagtgggacctccaggcggtttctatcgcccgcagcgcgccgctcgccggcgcagctctcaggcctgggagcactggaattctgggcaactcagtggggatgttatcgcatactctccggcctatgccggtgacaccaacagcactccgatggccgccaggggcagggagtgacaatcctctgatggctaagccggtcatgtgcctgctttgcaagggtagctatgaccgtgagcttgccaagcttgcagctgagcagaaggaaaacccagcatcacgcgctgaggctgctaagcctggtttgccacactggatgcagcccagcagtgatcaaccacagaccaaggagcaagagttgaaacggaaggaggctgccgaagagcttgagaagaaatggcgtgaaacttgcgcccgtacccacggtaaccgtgctggggcgccagctctctccttgggattggctgccttagttccacgcccgccagttgagccaaagatacaacattccaggggtggtgttcccacccttcagatgaacaccaattgggagaagcctgagggtacccctacgtctgagcttcgtaagagtccgctaggcagcccagtgaagactgaccttgcgctaggtcccatggatcctggtgctactgtagagaatgaccagaaggaaaattacacagaagggcttacttctatgcaaaaggctaagatagctggaatctctgatatcgagtctttcaaaaggctcctcaaggtgctcacacagaaggtcagctggcaatcagatgctgcctcagcaattgctgctgttgtaatacaatgcagaactggcagtgggaagagacgtaacattgggacaaggggcgacatatggctcctgtttgttggtcctgaccaggcaggcaagaggaagatggtgaatgcattgtctgagctgatggtaaatgctcaaccagtggttgtaaactttggtggtgactctcgtttgagcaaggatggtaatggactcaatccgggtttttgggggaaaacctcacttgaccgggtcactgaggcagttcggcaaaatccatgttcagttatcattcttgagggcattgatcaagtggacgctgttgtgcggggaaagatcaagcgggcaatggagactggtcgcctggtagactctcggggccgtgaggtcagccttggcaatgtcatctttgttctcaccacaaattggctacctgaggaactcaggagaccaaagtttgaaacattgctccaagatgaaggaaggatgttggaggtagcaagctctaattggcagctagagctttctattgaggacaagcaggttaagcaccgagcggattggctatgtgatgatgctcgtccagcaaaggtagccaaagaactgtccggtgggcaaggtctatcacttgacctcaatttagcagttggggcattggatgacaccgacggctcacggaattccagtgatctctctgtggaacaagagcatgaaaaagggcaccttgcagtcaagtgttcaacaccagcccctgactatgatctgttgaatctcgttgatgatgccattgtgtttcggccagttgacttcgcaccgtttaggaagactgtcacagattgcatatcagcgaaattcgactcagtcatcggtagctgtaactcattcagaatcgatgaagacgctgttgatcggatggctggcagcatctggctcactgacgagaagcttgaagactgggccgagaaagtgctcatgccgagcatcgaacggttgtggtgcaacgtgaaacactacagtggccgtgctgttgtccgtattgcagcagtcacagacaaggcattgccaaggttggggtgggcgcgagaaggactaccagcaacggtgccgatcgccattgatggcatgtagagaaggaattgggagtgggggggagtacattcttttgtatggtagttatgtaaatattgggggagaatctggggggaggttactatatgaagcacataggcatggaggttatagattttataacaaaaaaaaatcgatgtatagttttgataatatatgtagctatggtccttgaaactaaaaaaaggtttctcttttgcactcgctaatgttgcaagggggtgtggaggaagtaaataatgatgtagcgccctcaatcaaagtcgactcctatcagaccagttgtgatgcataaagtattgagcttgcatcaagtggcaaagatttgacatgtgaatacatgatt

SEQ ID NO: 97391 - DNA, 436 bp, Zea Mays
ggacaagaaaggaagaaagttgtccccgcagcctatttcaccattgccgccggaagctcggaccaaagccgagcctggctgttcgtcctctgagcgattggggagaggactgcgtctaacaaagactttagcgcgggatcgaccatccgatgtgagatctccctctccactggtgaatatcatggacgccggtattcgccgtgacccaaggccagtacctcggcgggacccgcgcgctatcgtcgtccggtcgcctccacggccttgtcgctggagtcccgttgagagcctctgcttcaccactgtggcttggtgtgaaggataccccttcgcggctgcagcttttctaaagagcccctgcccttttgtcatatcaacctgcagtccataggatatgtaatataattacagacaagtcctgtaaacttataaatag

SEQ ID NO: 97392 - DNA, 318 bp, Zea Mays
atggccagcgcgcacgacgatcttgtgacctactccgccaagatggacctcatcctcgcgcaactcgccaccatcaatgcccgtttggattcccacgatgctcgtctagccaagctcgagcaggcgtgggtcagcccctctgcttctaccgcgagctacttgggcgcgagtgagggcggcctgggcgcgggtggaggcggccgggtcaaggacgatgggctgcaacccgacacacccaaggaggaggtggaggcggcgttctacgttgtggtggtcgtgccactgctgcagcccgctttcgtactcgtggaggtctag

SEQ ID NO: 97393 - DNA, 516 bp, Zea Mays
atgacctccaccactacgcaatcggggttgcggccacgatcgcggtcatggtccgacgtcgcattgtctatgtcgtcatcattctcatcctcgtcctcgtcgccgacgcccttggagcgggagccaccccgctccccaaccccaccggctgcaccgctagtgggggcgctcatcgaatcgctctcgtttcgcggatgcggttttggccgtgctgccacgtccgcatttgagaaggaggatctcaaggcgcgagccgcatttccgcagcgcctccgtactgccgtgcatgccgcgatgcgcgctagggatcctactgcaggggcattcgcgcttgttgatcgtgacaatgatggagaggggcatggcacgggcaatccatggttcgacagcgcagtgcacgacgacgcgcccgagtcaccgctcgttgctttcgtcaacccgcgcagtggcggccgcctcggccctgtccttaagacccgcctccaggagctcatcggcgaagaccaggtcaaataa

SEQ ID NO: 97394 - DNA, 861 bp, Zea Mays
tacgccaaggcaaccgtgattccctgaactgtccctctacctctctaagcttgccaagaactgccacacagcctcgcacctctgacgatctgagcttactgaagccatgaggccggcaccaagtgtttccaggcccacgtcaacgtcgacgatttcgccggcagcgccaccaccggcagccgcgaagctggcgtcctcgccgtggcactcaacggtgccctacctgttcggagggctagccgccatgctgggcctcatcacgctggcgctcctcatccttgcctgctcgtaccggaagctcaacaactacctcagcaccggcgacgcttcctcttccccctccagacccgaagccacggatggcaacggcttcaagtcgccggcggccactgccccggcctctccagcgaccttcgccgacctcgttgccgtcgtcatggccggggaaaaaatccccacattcttggccgcgccgatcgtccgacgaacgcacggtaacgacagcgctgccacagccaccggagaagggtctccggagacggaggaggagctggagagccgcggcaaggcaggggagcgggagtgccgtgtgatcgccgacgccgaacgggaacgccatctgagtcacgtgtgaagtgaaccactaatggacgaaagagaaagcttcagggcggtttctgctcgaactcttcatccaaattttgtttggttattaataatttgtagctcgtgtcaggataaaaaattgcgattcgtgaccgaaaaatcttttagctcagtgctagactgttgttatacttcagttatttatgttcctggagctgtttgtggcaataatagcacaacttcatctgcgtttca

SEQ ID NO: 97395 - DNA, 2343 bp, Zea Mays
ccctccctacctatctttgtaccctgcacgcatcttctgtcctaagcaacaaccccatttttgtagtgccgccatggcagggcagctctctctctcatggtggtggtcgcccacgggccagtcagcgaccgtgctaatggaatggccatcactgcctccaactaactaaccaccttttcagtgcaggccactgcgtgcgccactgccatacctatcagcatgcatgcagagcttccacccgtcacctacaaatccctgtcgctgtcctcgccatcgccgtcgctcgtcgtcgttgtcatcgccaagggtgtcggtgtggctgtgtcggccacggccagctagagctgtgacctgggagtgggagggttggtgcctataggatcgtcatggacaccatcgaggagtgcggcgacggaggccgccacctgctgctgggcctcggcaccaggatactcgtcggcgtgccggacaactcccgcggctgctccgagctgctgtcgtgggcgatcggcgccgtcgccaagcccagcgactccgtcgtcgccgtgcacgtcctcggagggagggggaggaagcggaggctgcagaaggccaacgccttcgtcatctacatgctcggcgaattcgtcaaagcttgtgaggccaagcagattaatttggaggccaaggtgatatgcagctcaaacattgggagagccctgacccaagaagctgcactgactgatgggaacatcctcattgttgggaggtcaagaaatgcgtaccataggagccatttcgagattgcaaactactgcttcatgcatgctccaaaaaactgctcggtgatcgctgttggaaggcaaggcgtagcacagagtagtactcggttgagacctcggtcatttgatgatagcaccatctcctcaagctcaacatggagcaggagattcccgccgcttcagaagctgctcagaacaaactcgacacggaagctggctcagtccgacgacaagagctcgccgagagcagttctggacggcccagagggagagggaggggagaaccaagagtgctacagcacgtctagccatgaggtgagccggcgcggccacaacggcctgtggaggcggctgtcagacatgaagctctggctcccgttcctgaggaacatcggcgatgacagcaccaggggcagcgacgtcggttcggccttcgctgaagatcacaagcctgcctggaggtgcttcagcttccaggagatttcagtggccactaatgacttccacccagacaacatggctggaagaggaggctatgcagaagtatacaagggcaccctagctgacggccatcttgtagccgtgaagaggctagcaaaaggcaccccgagcgagcagaaggaaaaggagttcctggcagagctagggatccaggggcatgtatgccatccaaacacatcctaccttcttggatgctgcgtggagaatgggctgtacctgatattcgagttctgcacgaatggcaccctagcatcggcactgcatgggaagggtgggagaacccttgaatggcctctgaggtacaagatcgcggtgggcgttgcgaggggcctgcagtacctgcacatgttctgcaggcaccggatcatccaccgcgacatcaaggcgtccaatgtgcttctcggccatgacttcgaacctcagatttcggacttcggattggccaagtggctcccaaagcagtggactcaccattctgtcgtacccatagaaggcacattcgggtacttagcaccagaatacttcatgcacggcattgtcgacgaaaagacggacatcttcgcctttggcgtgctgctgctggagatcgtcaccggaaggagacccattgactgctccaagcaaagccttctacaatgggcaaagccactgctggaagctgggcaggtgactgagcttgcagacccaagcctcggggacgactacgacaaagatcagctgaacaggatggtcgcggtcgcgtcccgctgcatcatgcgaccggcgatgtggcggccttcgatggccgaggttctgcatttcctgtctactactgatgagtgtctgaacgagcccgagaaatggaacattcccgacgacgaggtggacgacatggatgattgtacactgttctctgaatccttttccatgtaattgtagcctcatttttttcccatttccttttagtgtgtgctatgttggcatgccgttcttggcatggggatggaggcattgagctatgttttctggtctttttgtagtcttagaagactggtatttaatcatgtgttatatatataacggggattttgggatgtattca

SEQ ID NO: 97396 - DNA, 730 bp, Zea Mays
agctgtgctcgcggttgagcggccaagggagctccattgattagagatacttgatcagagatgtatggtttacaggtggtgacaaggatgttggttttgactatggtaatggtaagtggtattctttccgtttggaaagggtactttgggttaataacttgggttaatgctaaaacctggctttctactagtaataataacctgacaaactaaaagcaactgcttgacttaactccacataaagctagtccactacagccaaacgggacatttgctgagtacgttgatgtgtactcacccttgctttcacaaaacaccatgttgcctttggtgcaatctatgctcaggtaaagaagaaggcgtcgaggtggatctccaggagttccaggacgttgatgagtttgaggagtaggctagcgacctcccccagtcagctgcctgtggtgggttgtttacgttggctacgtttcgattctgtgtactttgatgtatattatgtaaatggctctagtctgtaatattattacttactctttattgtaattcgaagcattgtgctatgatgagtcatttatgtaatcgctgtgtacgtgaatttctgatcttggcacgtacatggttcgcattcggtttaccttctaaaaccgggtgtgacattaaatcaccttgaacactgagctcttccattggtagttgttcctcagggacacggagacacttcttgagttga

SEQ ID NO: 97397 - DNA, 1603 bp, Zea Mays
ccttactcagcatggaacaggttctctgtcctcataactccaaccaaacaacggcagctagcgagctcccgcggtcccgccgccgccccctggtcctccaaaaaacggctgaaccctaaaccctccctagctcccgccgcctcgcttaaccgcgcccatggccgccgccgctcgcgccgccctcccgcggccccacctctctcttttttcgtcctcccaccgcagcccccatctgtccctcacgccctcctccgcccctcgcctgcgcagcggcgctgccacctcccctgcgctgcagcagcaccaccaggtcaccacgcgcctgggcgacgtgatcgaggcgcagcagttcgaccgggacgcgctgaacgagatcttcgaggtggcgcgggagatggaggccgtggagaggggttcccacggcgcccccagccgcgtcctcgaggggtacctcatggccacgcttttctacgagccctccacgcgcacgcgcctctccttcgaggctgctatgcggaggctcggcggggaggtcgtcaccaccgagaatgcgcgcgagttctcttccgccgccaagggggagacactcgaagataccataagaaccgttgagggttattccgatattattgtactgagacattttgaaagtggagctgcaaggaaagcagcagatactgcaaatattcctgttattaatgcaggtgatggaccagggcaacatccaacccaggctttgttggatgtgtacacaataaagagagaaattggcacactagatggaattaaacttggtttggttggtgaccttgctaatgggaggacagttcgttctctggcttacttgattgctaagtaccagaacattaagatatactttgtatctcctgatgttgttaaaatgaaggatgatatcaagaactacttaaattccaaaggtgttgaatgggaagaaagttcagatttgttggaggtggcatccaagtgtgatgttatttatcaaacacgtattcaaaaagaaagatttggtgagaggattgacctttatgaagctgctcgtggcaagtacatcgtggataaaaaggtcttagatgtgctgccaaaacatgctgtcatcatgcatccccttccaaggcttgatgagatcacagtagaagttgatagtgatcaaagagctgcatattttaggcaggctaagaatggcctctacataaggatggcattgctcaaacttctgcttgttggtcactgacatttcggctagtgctttagcttgtgctgcgtcaagggattagaaggtattattcttaatataatgatcgaggctgtcttacccacgcaggtcgagtttttagaaacatgtactaataatcagcagcttgtgtcaaaattcaatgttcgctgttgcaggtaataaaagtctgcatccatgcgaatgtgcagcgatgtttggcagagtttggtgttctcatgtgctgtgagaacatggaacataattaattttgcctgcacaaaaatcatttgcccgattcagttgtgatgatgctctaatacatttttagcaagcgtgagccgtacatatttagtattggcagtaaaaaaa

SEQ ID NO: 97398 - DNA, 1424 bp, Zea Mays
cccgcggtcccgccgccgccccctggtcctccaaaaaacggctgaaccctaaaccctccctagctcccgccgcctcgcttaaccgcgcccatggccgccgccgctcgcgccgccctcccgcggccccacctctctcttttttcgtcctcccaccgcagcccccatctgtccctcacgccctcctccgcccctcgcctgcgcagcggcgctgccacctcccctgcgctgcagcagcaccaccaggtcaccacgcgcctgggcgacgtgatcgaggcgcagcagttcgaccgggacgcgctgaacgagatcttcgaggtggcgcgggagatggaggccgtggagaggggttcccacggcgcccccagccgcgtcctcgaggggtacctcatggccacgcttttctacgagccctccacgcgcacgcgcctctccttcgaggctgctatgcggaggctcggcggggaggtcgtcaccaccgagaatgcgcgcgagttctcttccgccgccaagggggagacactcgaagataccataagaaccgttgagggttattccgatattattgtactgagacattttgaaagtggagctgcaaggaaagcagcagatactgcaaatattcctgttattaatgcaggtgatggaccagggcaacatccaacccaggctttgttggatgtgtacacaataaagagagaaattggcacactagatggaattaaacttggtttggttggtgaccttgctaatgggaggacagttcgttctctggcttacttgattgctaagtaccagaacattaagatatactttgtatctcctgatgttgttaaaatgaaggatgatatcaagaactacttaaattccaaaggtgttgaatgggaagaaagttcagatttgttggaggtggcatccaagtgtgatgttatttatcaaacacgtattcaaaaagaaagatttggtgagaggattgacctttatgaagctgctcgtggcaagtacatcgtggataaaaaggtcttagatgtgctgccaaaacatgctgtcatcatgcatccccttccaaggcttgatgagatcacagtagaagttgatagtgatcaaagagctgcatattttaggcaggctaagaatggcctctacataaggatggcattgctcaaacttctgcttgttggtcactgacatttcggctagtgctttagcttgtgctgcgtcaagggattagaaggtaataaaagtctgcatccatgcgaatgtgcagcgatgtttggcagagtttggtgttctcatgtgctgtgagaacatggaacataattaattttgcctgcacaaaaatcatttgcccgattcagttgtgatgatgctctaatacatttttagcaagcgtgagccgtacatatttagtattggcagtaaaaaaa

SEQ ID NO: 97399 - DNA, 96 bp, Zea Mays
tgcatgctggatctttatttgtggtgcacccaaattttatttttgaaccctgaatcaaatttgaatttgaaacaaatttggagaatggaaattagg

SEQ ID NO: 97400 - DNA, 769 bp, Zea Mays
ggagagagagaatcgatccgagtgatgtatacaattgttggctgcacttgtgttgttgtttgaggcgcctaggggtcccttttatagccccaaatggcctaggagcccgttagagcttcatttggaagctcccagccttccctggttgcgggtgcaccggactgtccggtggcgcaccggacagtgaacagtaacggatctgtttgacagtttccttctctggaacagctagccgttggtgcaccggacagggtactattcactgtcctgtgcaccggacaggtcactattcactgtcctgtgcaccggacacagctactattcactgtcctgtgcaccggacgctgcgactattcactgtcctgtgcaccggacgctgcgactattcactgtcctgtgcaccggacagagttactattcactgtcctgtgcaccggacagctactattcactgtcctgtgcaccagccaacagcacactaagtgctttttcctccgttctttctccgtttgacttcaacttttgggaggattttcctgagacttaaacaaacacatttagagtataatccaattgatttagtcctagaaacttacatctttcttgttcttctcctagcttttctatttctcctctagcagagctcagaatggtactttctctacagaaagagttagagagcaaaccaatgcaccaaacttgtagtaagaggtgtatgcaaaatggtgccctcaaaccttacatacttaacctttatcatcgttttacc

SEQ ID NO: 97401 - DNA, 680 bp, Zea Mays
attttgattcacatttgtgtttgttttagggcatacaagatgacgatggtgcaatgcaagtgtttggtgcttttggttgatagaagctgctggatgcttttggtatttttgaaagatgcaagtcgtgcttctggttgatacttagaagttggtggttcaaaactgaaaaacctgtcaggctgtcacttgcttttggtattgttatgcttatatatgatgttatgcacttatgcagttcagcatgtttgctgcctgcctgcttgctgctcagctgcagcctggaggctggtgcttatctgagagtactaagttatctgatgtgatctgtaaaacttactcagttcttgtcaaacttaatctgttaacaggtttcttgtcaaactgctgggcgcctgaacactgctgtgcaccgtacgtcaggctgtcctcatgcatctgttaacagatcttttgtcctctgctgcttagactgctttatgaaatttgaaatgtgatgagacttatgccttatggtgactggtgatagcttattagattagagtatcatacttttggtcatggtcttatggaatatggaatgtgatgggatcattggaccgcatggtatgggtcatggatgtgtaaataaattataatttcattatttcatctctcgtctattaagtattaacagtttatta

SEQ ID NO: 97402 - DNA, 553 bp, Zea Mays
attttgattcacatttgtgtttgttttagggcatacaagatgacgatggtatgaagactatctcatttccaaaaagctttgtgcagagcaactagtgcaatgcaagtgtttggtgcttttggttgatagaagctgctggatgcttttggtatttttgaaagatgcaagtcgtgcttctggttgatacttagaagttggtggttcaaaactgaaaaacctgtcaggctgtcacttgcttttggtttcttgtcaaactgctgggcgcctgaacactgctgtgcaccgtacgtcaggctgtcctcatgcatctgttaacagatcttttgtcctctgctgcttagactgctttatgaaatttgaaatgtgatgagacttatgccttatggtgactggtgatagcttattagattagagtatcatacttttggtcatggtcttatggaatatggaatgtgatgggatcattggaccgcatggtatgggtcatggatgtgtaaataaattataatttcattatttcatctctcgtctattaagtattaacagtttatta

SEQ ID NO: 97403 - DNA, 713 bp, Zea Mays
caatttattagttgtatttaatactttaattatggctagtaagaatgtaagctgcttatgtacatttgttttcttgttcaggtgcaatgcaagtgtttggtgcttttggttgatagaagctgctggatgcttttggtatttttgaaagatgcaagtcgtgcttctggttgatacttagaagttggtggttcaaaactgaaaaacctgtcaggctgtcacttgcttttggtattgttatgcttatatatgatgttatgcacttatgcagttcagcatgtttgctgcctgcctgcttgctgctcagctgcagcctggaggctggtgcttatctgagagtactaagttatctgatgtgatctgtaaaacttactcagttcttgtcaaacttaatctgttaacaggtttcttgtcaaactgctgggcgcctgaacactgctgtgcaccgtacgtcaggctgtcctcatgcatctgttaacagatcttttgtcctctgctgcttagactgctttatgaaatttgaaatgtgatgagacttatgccttatggtgactggtgatagcttattagattagagtatcatacttttggtcatggtcttatggaatatggaatgtgatgggatcattggaccgcatggtatgggtcatggatgtgtaaataaattataatttcattatttcatctctcgtctattaagtattaacagtttatta

SEQ ID NO: 97404 - DNA, 1688 bp, Zea Mays
ccagctgacgctgagtcgtctttctcggcagcaggacccgccgccgcctcctctccatctctctctctctctctctcgccatatcgattccattggggacgcaagcaccgccccagacccagagcttctcttctcaaaagatgcaggagcaggacgtggacgatggcggcggcaggacgacccagcagcaggagaagtcgatcgacgactggctccctatcaactcctccaggaaggccaagtggtggtactccgccttccacaatgtcaccgccatggtcggcgccggcgtgctcggcctcccctacgccatgtccgagcttggctggggccctggcatcgcggtgatgatcctgtcgtggataatcaccctatacacgctatggcagatggtggagatgcacgagatggtgcctgggaagcggttcgaccggtaccacgagctcgggcagcacgtcttcggcgacaggctgggcctctggatcgtggtggcgcagcagctggcagtagaggtgagcctgaacatcatctacatggtcaccggcggccagtccctcaagaagttccacgacgtcatctgcgacggcggcaggtgcggcggcgacttgaagctctcctacttcatcatgatcttcgcctccgtccacctggtcctctcccagctccccaacttcaactccatctccgccgtgtcgctcgccgccgccgtcatgtcgctcagttactccaccattgcgtggggcgcgtcgctgcacagagggaggagagaggacgtggactaccacctgcgcgccacgaccaccccagggaaggtgttcggcttcctgggaggcctaggggacgtggcgttcgcctactcggggcacaacgtggtgctggagatccaggccaccatcccgtccacgccggacaagccgtccaagaaggccatgtggaagggcgcctttgtcgcctacgtcgtcgtcgccatctgctacttccccgtcacgttcgtcgggtactgggccttcggcagcggcgtcgacgagaacatcctcatcacgctctccaagcccaagtggctcattgccctcgccaacatgatggtcgtcgtccatgtcattggcagttaccaggtttatgccatgccggtgtttgacatgatagagacggtgctggtcaagaaaatgaggttcgctccgagcctcacgctccgtcttattgcccggagcgtctatgttgcgttcacaatgtttctaggcatcactttccccttcttcggtggattgctcagtttcttcggcggattagccttcgcaccgacaacttattttcttccctgcatcatgtggctcaaggtttacaagcccaaacggttcggcctttcatggttcatcaactggatctgcatcgttattggagtgctgctgttgattctgggtccgataggagggctccggcagatcattttgtcagccaccacatacaaattctaccagtaaaatcgatcaactggagtcgtatggcgtggctgttttgttagcattacatttcttagggtggattggcttttaatgtacacgagcgagtgagattgatgctagtagctcctaggagtatatatatttctatcatccacagagcttaatgtatcttgtagttgggacattaaaagagcaagtaggctttactcggtgatctttcgtttc

SEQ ID NO: 97405 - DNA, 711 bp, Zea Mays
gtagtgaacagaataagtcagcagatggtggaggaacttgtagttgatgatacacctgaaacttcaagaggaataattggcctctgtagtgatccatctacaggacttttctatgcatatgatgaaagttctatattccaggtttccacttcagacgagggttgtgacatgtggcaagtttacttggatatgaatcattatgctgctgctttatcccattgccgtaatcctttccagcgtgatcaagtctacctagttcaggctgatgctgcatttgctgcaaaagagtattacatagcagcatccttctatgcaaagataaattacatcctgtcgtttgaggagatcagcctgaaatttatatcaataggtgagcaggatgctctcagaactttcttattgagaaggctcgataacctcaccaaagaggacaagatgcagattacgatgatctcaacttgggctactgagctgtacttagacaagattaatcgcctcctattggaggataccactgtcaccattataaattcagtagcagagcctaatagctctgaatatcgttcgatagtaaatgaattccgtgcttttcttagtgacagcaaagatgtattagatgaagcaacaacaatgaaactactggaaagagttttatttaggactacaggatttgtctgcaataaatcaaatgcaaacttgaacacttgcaat

SEQ ID NO: 97406 - DNA, 847 bp, Zea Mays
gtcatttctttagtctagaactctagatcattataccgtaccggtactgcttgtgcttgaggtgctctgatttaccacttcaatttttgcagttacggaagagtggatgagcttgtgtactttgccggtttgaaggagcagtatgaaattgtagttcatcattacattcagcaaggagaagcaagaaaagcattggaagtgcttccaacggcgcaatgttcctgtagaccttgtgtataaatttgctccagatttgatcatgttagatgcttatgagactgttgaatcatggatgatggcgagaaacaggttgaatccagggaaactcataccagcaatgatgcgttatgtgagcgaaccacatgcaaagaatgaaacacatgaagttatcaaatacttggaattttgtgtgaaagatttgaacaatgtggaccctggagtgcataatctgttgctatctctatatgccaagaaggaggatgaatcccagcttttgcaatttctcgacacaaaatttggtaaaggacaaacaaatggccctgacttcttttacgatccaaagtatgctctccgcctatgtcttcaagagaagagaatgcgtgcttgtgttcgtatttatagcatgatgtccatgcatgcggaagctgtggcacttgctttgaaggtattatgcctctgttggaaactgcgccggagagacaaccctgcaggttgccggcgagttcctacctcccagactttcataaggaaacaaactagctattacaaggtaataatccggactgctatcagtcctgatcttgctgattggatccgtccatataagactgatccactaccatactag

SEQ ID NO: 97407 - DNA, 368 bp, Zea Mays
gctcgggcttccctcccttctgtcccgtaaccaacccacctaggctataagtgcgcgcggtgtccggtcagccacttccccctttttcggcagagacctaccactaccatgccgccgtgcgggagagagagattcggtgtgggctcgccattgccgccaaccccaccgtcgacaaaaccacgcatccactgtcgttgtgccatccatatagctctgagcgcttcgtctcagcttgccgtaggagtccgcaaactcaacatgagggattataggctaggggatcgcgaattctttgtcggagaagttgctccgccgtggccgcatccgccgtcgaggccgagtctattcacgctactaatcttggtgag

SEQ ID NO: 97408 - DNA, 497 bp, Zea Mays
ttacaacctgaaacagacaaagaagctagagataataaaggggtcactaagaaagaatttctatctgaaaatcttttcaccaaatgtcctagacatcaccatggttgacctctctggaataacatgtatgtgtgccacttggagaccagcctagtaatattgagtcaagaataagagcaatgaccatacaatacattaggcatccaagttgtattatctttgttgtttctcctgcaaatgctgacttagctcattctgatgctctccaactagcaaggcttgatgatcctaatgggtctcgtacaatccttgctatcactaaggtatttatttactgtacacaaccaaagttgtatagtcctatgatcactgtatggtcattgataacctcatttcaatgtctttagtttatcatgggcaggggcactcatgctcgtaacttgttcctaggaaaagtgattctagtcaagtttggttatgtaagtgttgtaaatcgc

SEQ ID NO: 97409 - DNA, 576 bp, Zea Mays
gttttccaaaaaatattagatgaggagactgacgaggacatcgagatcgatggtatacaagatgaatctagttccactgatgtgcctgacctgtgcgacaaggtgtacaataacctctctaaagaaatacatatgctgaagcttgttcctgactacgattattgcactacaaagaagtttgagtgtgagccacctgggttttgctgtcgtggtgggaaggttgagctagcaccactggagacccctccctagctcaataggttgtaggatagtgcagactctgatgctaaatacatttgtgataacattaggttttttaatggccatttctatttcacttccttgtattgttgcctcgatagtatgacaactaatgtgagagattctggtatatacacgttccgagcacaaggcatgatgtaccacaatatcaagtcattcggtacggaaggtaggtcagagcataaacatctagagctttacttttatgatgatgatcccagtctcgagcatcggtaccgtaagtgtagtgaagagcaggttcaaaaagacaaagaggttattaaagagatagtt

SEQ ID NO: 97410 - DNA, 592 bp, Zea Mays
actgaaaactctcttgtgggttttggtgtttggatgacaacccaattaaaggactaacaagtgtgctaagtgttgaacaggtgcttaatgcaaagctaacagggttcaacacaagtgaacaagtataatgaacactgcttaagtgagactcagtttgcgtaactcagagacaggcgatcaagccaaggatgaaggcaagaagagcttcgaggtatcgagtgcacgggagaaggtcaaggagaccaggaacccaaagccaggggtgaagaagaagacttgcaaagtcaaggttgatcgagttaagaagagttatggtgcatcaaggatcactacataaggacatgacttacaaccaatgaggtaacatctacagttatgtggtgtaagtcataaggctcaagatcaagctcgagaagtgaacaagggagttggggctcagatatgtcaatctagatcaagtcaagttgacttaatggtttagagtccaacatcgacctcaaacatgccaaattgggtaaaacgatgaaaaaggttaagtatgtaaggtttgagtgttcacccatgttgcatacacctcttactacaagtttgg

SEQ ID NO: 97411 - DNA, 1196 bp, Zea Mays
ctcccacacaaataggacggagaagtcgggaacatgctaaggggaacggcgccaccgagaggaacgcgaggtcgccatcaccatggggggaggagtcatgcgcaccgccgcgaaggtgggcatcgccaggggcgccgcggcggtggcagcggcgaaaggcggccggttccgccacgccgcgccggccttcgccacggcccccgccgccacgggttccgatgcggcgccgcttgtctccgcctccggtggcgaggtgccccccgccgcggcgcagtgggcggcgtcctgggagctggacgattgggaattcgcagactgcggggacgttgccccggcggctgtggtggcggagagggaggcgacggcagcggccgcgaagcccaggctggtcttcgcgccgccgtcgagggaggaggccgaggaggctacgactgagctcagggacgccataggcagggcttatttcaacgaatcaccagttgaggttgttaaggaacaagataaagagtttaataaactggcaactgatgccataattccttctatgcctggacatgtggttcaagcttttacattgctgaaatcaagcacagaggctcagagtgttgtcgcctcccttgcatcagatagaaatgtctgggatgcagtattgaagaatgagaaggttatggaattttataagactcaccagacaactccagttcagacattccctgaggaagcagccacagcagagtcgcctgggaagtttgaagatgccacctctgaaaatgcatccaacagcgaactccccacgggctcaggcgcaagtttcgcagatttcgtggacaatgcgaagaagaaagtgatggatgtggtccacaatataaccgactttttcagggacttgttcaatgactcagccgaggcccagaccggagcaggcccttcagctgagaagggcttttctgcaacagagatggctgtgggaggatccttcatggctctgaccatagcggtcatcctagttgttctgttcaagagggcatgatagctcaagagtcatgggtaccttctgggacccatcgtgctttaaatctgtcgaaaattactcgtctgtcgtatggtcaataattccgaatgcaatgtatagcttgtccgtttctttggaaacagtacaataaaggatttatctaaagtatgctcctatacactgt

SEQ ID NO: 97412 - DNA, 165 bp, Zea Mays
cagttgttggagttggatcctgagcgtgtcatttcccatggacaagcgacattattagagaagcaaagattaatagatgattgtttggagaaatcctatgaaatttccctgggatgtggccagtttgggagttgtctggtaattatgtcacaacattacttttca

SEQ ID NO: 97413 - DNA, 2484 bp, Zea Mays
tacatagagcctatccattccaccgagggagaaatggaccaactcataggttttcgatccgacgaccacgtccttcacacggagttgcttcgccttgacgcaccctccgcgatcacgctgcgtgccgcagccagttccctccggaaccgccaccgccgagttttgaggcccaaactctggtgggtttgaggcccaaaccaccaaacctgccgtgagcaccgcacttcgtgcacgtcctccacgatcagacgcgtgtcccgccagtccctgaccacaccggcaacatggtccattccaccacgtcctcgcataagtgtgtgtcacaggtgtcagccaccacgattggtcaattgactgctttgatccgccagtcaagacccatcactcgtcccttcaccgctccgggtccatcagtacgagcccgcatgactttcacctcagtcgtcgaccaccgttcctgtgctccacacctgcacaccacaagtcgaccgacatggttgcacaagcataatctcacactctggactaacatgcaaatacggcgcaaatctatggtgcaatgtggaaaagcgttggtcgggttttgcggtgccagcgacggacatgagcgtggagagcccaggggagctagggttctgaagcgcaccgtggggcacagcgtggcgaacgacggcccccgacatcctgctaggttttccatgggagatgggggagtcgcgtgcgccgtccgctcagtcgagagcttccgtgccggcgccctcgtgaggagaggaggagcgggagaagcgatgccggacaagggggagagggcccatggccaccgccaccagcaccagcactggaagaaccagcagtcggcgacagctgctgacctggaggagggggagctgcttaatggggaggccgggaccaatgggttgcccgagaggagcatgccacctaagaagtggaggaaggtgctggcagcctccgcagctgctgtggaggtggagcctggggagattgtgagtacaaagcaagcagtgccattgaagaaggaaagaagaaacggggacgttgagaaggtagagctgctgccagagaggcagaggaaggaaaagtcttctgggaagagcaccaggaagtctatcaaggatgatgtggagccaggggagattgcactgccaggaaaaaggcgggatgccaagtcccaactggcccatgataacagcaggaggccaagttcgtctgcccagaaaggctccttgcgggattctgatgaagaacctggtgaaattaagccagagagcggcatcagtggcagtgtaaggaagaaccggccaacagagcctcatagcagtaaccacaagcaccacactgacacctctgaccagtcaggatcaaaacatcgcaggaagggagaaggaaagagttcatctgctgccagacatttgtctgggagaattcgtgaggtctcgccaccaacacgggatcggcgtgataagcacgagaggagcccaggcatcttgggccgttttcctcatgaccgttttcgtcatgacaggtatgacaggagcccgagccgcttggagcgttccccacatcgcactcgccactatgatagcagagaccgcagtccatatatttcacctcgacatagagctcgtccgccccaattcagggataacacaccaagtcgtgttgataattcccctcgtgggagggtccagcatgaagatatcagagaccgtagcccatttcgtcatgacaggtcgccttctgaacgttgtcgtcctactgacacgcatgaagcaagcaagaagagcagaagtagcaacaactcagagaagtcacatcacaaaagcaaatcagcgaagcaatcttcaaaaatcaagagtggtagcaatgggaagaatgaggagaaaatctccaaagaaaagcacactgaaagcagtcagtacactgaactgccaccaccacctcctcttcctctaccaccgccaccaccaccgccgccgccaccgccacccctgccgcctgctgtaccacctccattgcctccatcaccagaacctgagccacctggagttctagccgaggatatgatagaagacatggatatctgtgacaccccacctcacactagtgcagtacctgaacccacagaaccaatttgtgatatagggaggtggttttaccttgatcacttcggtatcgagcaaggaccttccaaacttgctgagctgaagaagctggtgcaagatggatatcttctttctgaccatctgataaaacatgctgatagcaaccgatgggtgactgtagagaatgcagcttcaccactggtgccatctgatttcccctctttatattcggacacttcaacacagttggtcaacccaccagaagccccaggaaatttgctcgatgaagctctagaggaggcttctaacttggcatcaggagctgaggataaacaaatggaggaaacgtctgcagaagata

SEQ ID NO: 97414 - DNA, 346 bp, Zea Mays
atctttattgaggagttgcttctgaatacattgaataagcaagttaggcatttcactggttcgggaaatacccctatgacttacaaccttaggcctgtcattgaagagatccaaaggtctgcagaggataatggtgatagacgaacttcaaagatgtgcttggggatgctaaagaccatgagaaatcgctctgaacagaacttcgttgcttatagaaagggtctcggtgttgtttgcaacaaaaaaggtggatttggtgtagatgactttgttgtagagttctttggggaggtttacccttcttggagatggtatgaaaagcaagatggtattaaacatatacaaa

SEQ ID NO: 97415 - DNA, 1493 bp, Zea Mays
ggtgtgctcgataggcatagcctgctgctacaggcttgtgaaacagactctgtctctcaacaagacttaattgacttgggtagagctggtcttggtacctgtttgcttgctggtttgcctggatggcttgttgcttacacagctcacctggtgcggtttatataccttgagagacagaaactccctgatgagatcttaaggcacaatgtggatgagaagcgccagttccttatagaaataaacatggattctgagaagaatgatgctgaggttcaggcagagggagtattaaattcaagattacaacaaatagtgcatacacttgacaaggtgagatatgttatgagatgcatatttggagacccaaagaatgctcctcctcctcttgtaaggttgtctgggaaaagtctggtatctgccatctggaaaggggacagttcaatagttgctgaactcattcagtcgatggaacctcatgttgaagaagaggtacttagtgatctgaaggccaaaatccgtgctcatgatccgtcagagtctgaagatattgagggaggcatccggaattctctcttgtggctgcgtgatgaattgcgaactctttcatgcacttacaagtgccgtcatgatgctgctgcagatttgattcatttgtatgcttatacaaagtgcttcttccgagtccgggattataagacagtaaaatctccaccagttcatatcagtccgcttgacttaggccccaaatatgctgataaactgggaccaggctttcaggagtactgcaagacatacccagaaaattattgcttagcccagcttatctattggtatagccagaattcagaacctgaatctagattaacaagagctagaaaaggttgcatgtcgttgccagatgtctcatccttctatgtgaagtctgcaaaaccatcacaagagcgagcttatggaaacagaactgtgagattcatgttatcgcgcatggaaaagcaggcacaaagaccatggccaaaggataggatatgggtgttcaagagtgatccgagattctttggtagtccaatgatggacaccgtgttgaataattccccgcttgacaaggagatggtgcactggctcaagactagaccaaatgttttcctaggctagtaaaaaaggtttgtaggcagataaggtggtatttggttctttctcctttttggagattttagtctacatgattctttttccgactcacaccttggctacctgatcatggggagtttagcttttagatagcagggtagtctcaccacccccatctgtacattcctctctccctactttccttgtagagatgtatctggttaataactgatagattcgtcattgatttgatgtagtgaattttccccataggaatgctccctcttttgtttcatgtaaatgcagaacaatttcaatcttgaattcagtaatgtgttacaggcatgttgcatttctgtggttca

SEQ ID NO: 97416 - DNA, 2763 bp, Zea Mays
atggggaagaacgacgacgcaaaagctcctccaatgcgcgcagaccacacggacatggaagaagcgccgcgagatatggatcacttggacgaacatgacagtgatgacatgaatgtaggggtagcttcagatggcccctccagactcagaaagaagaggtccaaggtttgggacgactacaagcccatcattgtagatggagcaattcagagcgcggaatgtcgctactgtcatattcacatgagttgcagaggtgctgatggtcaatccaatgggacaagccatttgtggcgacaccagaaaatttgccgagcaaaagatgggatttttccaaacccacttcaacaggacgcatacttgccatatgtggtgaatgaagtagacccgctggaccaaattcttccagattcacttgatgagattaatttagtgactcaaagtgagaatagcaaattcaggtcaaaggtttggaaggattttataccattctatgttcgagggagagtccagggtgctgactgtgttcattgccacaagcgattcagtgcagataaaggtagaagccatttgaaccggcacactcaaacttgtccggcacggagtggaaatagcctaaatcaccagaaaggtgtgttgtaccagtctagtctaccgagttctaaatctagctttcaagatgagctttcaccagcattgacaaatggcaaagttcagattgcagaatatgctagtaagttcctcaaagacagccgaggcgatgcaagccttgtggaacatcatgttctagctttaccagcaatggatgatatgaatccctcagagcagaatacttcatcagctcaggctgctactgatataaccaggaaacctgaccaagaagcatcttatcatgagttaactagaatgattatttcacatggctatcccttgtcgattgtcgagcatgaagaaatgagaaggtttgcaaagatcctaaaccccacatttaacatggcttcaagcattgatatagaagagtattcaactcttttgtttcagaaagaaaagtctgagcttaaggaaagaattgcacttttgtcccatcgggtttccttgtcagcaagtgtttgggttcctcatggagctgaagcctcagtaaagtatctctgtttggcagtgcattttgtagattcaaactggaaacttcaaaggaaaaccatcaaatttggtgtgttctggtcctcatctactagtttggaaaggatgatacagtttaaggaggcctgtgtgctagattctgatattggaccatttaatgtcatacaggaagctataagagattggaatcttgatcagaagcatttcagcttgacatctggtagtgaaattagaaatgacgaggggacctcaaaactgatggacttgctcatccaaaggaaatgccttcctattagaggcaagctatacaatatcgcttgtgtgaatgatgtgcttaacggcattgtctcaaaaggtcaaccggtgctttatcatgttggtaacatactagagaaatttattcaggcacaaatgtcctcatctctgactcgacagcaacttctagaagttgttgcacatatgggattgaagtgcccacaggaagaagctaaatggtggcacataatttactttaggcttgaagttcttctgcatttcaagaaggcatttccctcggaagacttgttatctgcagaagataacaaaacttttgagtctgtttgcaggatactcagggctttttatcgcgctgttgaagtgatttgtggtcctgtttgccccacagcaaatatgtacttcaatgaactgtggaaagttagaactgttttgcaagaagaagcatcaactgatcgtgctgcacttgctaacatggttttggagatgctggaagcattcaatgagtattggaaaaattcatatgtgtggctgtcaatacctgttgttcttgatcccagattcaaaattacttttattgagttccgtttaaagcgagcttttggtaccaatgcagaaaaacatgtatctgccattcgtgatacaataagggagctgtttcatgaatattgtggactttcagataacttgggtgccgatacatcaactcgtgaagctcatgatgttgagttgtatggatttgacagtgattcattggaagattgggatgagcatcttaatgcacagacaaggaaccaacaattgacagaacttgacaactatctagaagatggtcttgtcccaaggaaggatgattttgatatcctgaactggtggatgagtaattgtacaaagtatccaaccctttcagttatggcacgcgatgtcctggcgattccagcttctgccgataattttgaggctgcgttaagtggtgaggcaaatgtgatacataagcaatggagtacattaagtatcaaaacaattgaggctcttgtatgtacccgagattggggtaaatagaatgaagtttacaagcagttcataaccatagtgcttctaacccgggaatacaggatgatacagaaagagtacaccagccatttattgtgcagtatatcagacatctcgcagccaactggtaatacaaaccctaccaaacgtgggcttctgagtgttttcatgtattgtgcacattgatgtccagtgattttattatgttattactatttgtacagtgccaatgacgtgctgctgctttagcctgattgagaattcttgtacaacgtctctagaaagccatttgatgactga

SEQ ID NO: 97417 - DNA, 3003 bp, Zea Mays
atggggaagaacgacgacgcaaaagctcctccaatgcgcgcagaccacacggacatggaagaagcgccgcgagatatggatcacttggacgaacatgacagtgatgacatgaatgtaggggtagcttcagatggcccctccagactcagaaagaagaggtccaaggtttgggacgactacaagcccatcattgtagatggagcaattcagagcgcggaatgtcgctactgtcatattcacatgagttgcagaggtgctgatggtcaatccaatgggacaagccatttgtggcgacaccagaaaatttgccgagcaaaagatgggatttttccaaacccacttcaacaggacgcatacttgccatatgtggtgaatgaagtagacccgctggaccaaattcttccagattcacttgatgagattaatttagtgactcaaagtgagaatagcaaattcaggtcaaaggtttggaaggattttataccattctatgttcgagggagagtccagggtgctgactgtgttcattgccacaagcgattcagtgcagataaaggtagaagccatttgaaccggcacactcaaacttgtccggcacggagtggaaatagcctaaatcaccagaaaggtgtgttgtaccagtctagtctaccgagttctaaatctagctttcaagatgagctttcaccagcattgacaaatggcaaagttcagattgcagaatatgctagtaagttcctcaaagacagccgaggcgatgcaagccttgtggaacatcatgttctagctttaccagcaatggatgatatgaatccctcagagcagaatacttcatcagctcaggctgctactgatataaccaggaaacctgaccaagaagcatcttatcatgagttaactagaatgattatttcacatggctatcccttgtcgattgtcgagcatgaagaaatgagaaggtttgcaaagatcctaaaccccacatttaacatggcttcaagcattgatatagaagagtattcaactcttttgtttcagaaagaaaagtctgagcttaaggaaagaattgcacttttgtcccatcgggtttccttgtcagcaagtgtttgggttcctcatggagctgaagcctcagtaaagtatctctgtttggcagtgcattttgtagattcaaactggaaacttcaaaggaaaaccatcaaatttggtgtgttctggtcctcatctactagtttggaaaggatgatacagtttaaggaggcctgtgtgctagattctgatattggaccatttaatgtcatacaggaagctataagagattggaatcttgatcagaagcatttcagcttgacatctggtagtgaaattagaaatgacgaggggacctcaaaactgatggacttgctcatccaaaggaaatgccttcctattagaggcaagctatacaatatcgcttgtgtgaatgatgtgcttaacggcattgtctcaaaaggtcaaccggtgctttatcatgttggtaacatactagagaaatttattcaggcacaaatgtcctcatctctgactcgacagcaacttctagaagttgttgcacatatgggattgaagtgcccacaggaagaagctaaatggtggcacataatttactttaggcttgaagttcttctgcatttcaagaaggcatttccctcggaagacttgttatctgcagaagataacaaaacttttgagtctgtttgcaggatactcagggctttttatcgcgctgttgaagtgatttgtggtcctgtttgccccacagcaaatatgtacttcaatgaactgtggaaagttagaactgttttgcaagaagaagcatcaactgatcgtgctgcacttgctaacatggttttggagatgctggaagcattcaatgagtattggaaaaattcatatgtgtggctgtcaatacctgttgttcttgatcccagattcaaaattacttttattgagttccgtttaaagcgagcttttggtaccaatgcagaaaaacatgtatctgccattcgtgatacaataagggagctgtttcatgaatattgtggactttcagataacttgggtgccgatacatcaactcgtgaagctcatgatgttgagttgtatggatttgacagtgattcattggaagattgggatgagcatcttaatgcacagacaaggaaccaacaattgacagaacttgacaactatctagaagatggtcttgtcccaaggaaggatgattttgatatcctgaactggtggatgagtaattgtacaaagtatccaaccctttcagttatggcacgcgatgtcctggcgattccagcttctgccgataattttgaggctgcgttaagtggtgaggcaaatgtgatacataagcaatggagtacattaagtatcaaaacaattgaggctcttgtatgtacccgagattggggtaaatagaatgaagtttacaagcagttcataaccatagtgcttctaacccgggaatacaggatgatacagaaagagtacaccagccatttattgtgcagtatatcagacatctcgcagccaactgtgccaatgacgtgctgctgctttagcctgattgagaattcttgtacaacgtctctagaaagccatttgatgactgatgttctgttcatgttatcctggcgtgctggatgtgctgtgcccccttcaaaagctgaattttggggcaaccaccagtgctcaaatttgatctacgggtcctgtggctgacatcaccatgaaatgattgctggcttcaaatcacatttaggacaatgtggttggttaaacgttgcattaatcttgagtagcatatcaatactgcaaaagagcggaagaattagaatacctttcgctcaaggtctatattcatataggaatgtaaatattactgtcaccagtaagacatcttacaccttccttctgttcaaatcaatagatgcccattccgctggcaaa

SEQ ID NO: 97418 - DNA, 609 bp, Zea Mays
atgcgggttagggcgggtcgggctgggttaccctgggcacctcgggtcgctctctgctgttcgctcccagctcccgcagaaagagaaagacaacgccgccgctcgccgccgtcgttccccggcgacctcctccaacgaagtccgttgatccagatatggatcacttggacgaacatgacagtgatgacatgaatgtaggggtagcttcagatggcccctccagactcagaaagaagaggtccaaggtttgggacgactacaagcccatcattgtagatggagcaattcagagcgcggaatgtcgctactgtcatattcacatgagttgcagaggtgctgatggtcaatccaatgggacaagccatttgtggcgacaccagaaaatttgccgagcaaaagatgggatttttccaaacccacttcaacaggacgcatacttgccatatggtatgctttagctaccgacgtgttcttaagagatgccaattttcatttcaagcagctaatacaactatagactctgcataatgatttctgtggtattatgtattttgtaagctgcactacatttgtcatcagatgttataattttttttgtagaagtttcta

SEQ ID NO: 97419 - DNA, 2840 bp, Zea Mays
atgcgggttagggcgggtcgggctgggttaccctgggcacctcgggtcgctctctgctgttcgctcccagctcccgcagaaagagaaagacaacgccgccgctcgccgccgtcgttccccggcgacctcctccaacgaagtccgttgatccagatatggatcacttggacgaacatgacagtgatgacatgaatgtaggggtagcttcagatggcccctccagactcagaaagaagaggtccaaggtttgggacgactacaagcccatcattgtagatggagcaattcagagcgcggaatgtcgctactgtcatattcacatgagttgcagaggtgctgatggtcaatccaatgggacaagccatttgtggcgacaccagaaaatttgccgagcaaaagatgggatttttccaaacccacttcaacaggacgcatacttgccatatgtggtgaatgaagtagacccgctggaccaaattcttccagattcacttgatgagattaatttagtgactcaaagtgagaatagcaaattcaggtcaaaggtttggaaggattttataccattctatgttcgagggagagtccagggtgctgactgtgttcattgccacaagcgattcagtgcagataaaggtagaagccatttgaaccggcacactcaaacttgtccggcacggagtggaaatagcctaaatcaccagaaaggtgtgttgtaccagtctagtctaccgagttctaaatctagctttcaagatgagctttcaccagcattgacaaatggcaaagttcagattgcagaatatgctagtaagttcctcaaagacagccgaggcgatgcaagccttgtggaacatcatgttctagctttaccagcaatggatgatatgaatccctcagagcagaatacttcatcagctcaggctgctactgatataaccaggaaacctgaccaagaagcatcttatcatgagttaactagaatgattatttcacatggctatcccttgtcgattgtcgagcatgaagaaatgagaaggtttgcaaagatcctaaaccccacatttaacatggcttcaagcattgatatagaagagtattcaactcttttgtttcagaaagaaaagtctgagcttaaggaaagaattgcacttttgtcccatcgggtttccttgtcagcaagtgtttgggttcctcatggagctgaagcctcagtaaagtatctctgtttggcagtgcattttgtagattcaaactggaaacttcaaaggaaaaccatcaaatttggtgtgttctggtcctcatctactagtttggaaaggatgatacagtttaaggaggcctgtgtgctagattctgatattggaccatttaatgtcatacaggaagctataagagattggaatcttgatcagaagcatttcagcttgacatctggtagtgaaattagaaatgacgaggggacctcaaaactgatggacttgctcatccaaaggaaatgccttcctattagaggcaagctatacaatatcgcttgtgtgaatgatgtgcttaacggcattgtctcaaaaggtcaaccggtgctttatcatgttggtaacatactagagaaatttattcaggcacaaatgtcctcatctctgactcgacagcaacttctagaagttgttgcacatatgggattgaagtgcccacaggaagaagctaaatggtggcacataatttactttaggcttgaagttcttctgcatttcaagaaggcatttccctcggaagacttgttatctgcagaagataacaaaacttttgagtctgtttgcaggatactcagggctttttatcgcgctgttgaagtgatttgtggtcctgtttgccccacagcaaatatgtacttcaatgaactgtggaaagttagaactgttttgcaagaagaagcatcaactgatcgtgctgcacttgctaacatggttttggagatgctggaagcattcaatgagtattggaaaaattcatatgtgtggctgtcaatacctgttgttcttgatcccagattcaaaattacttttattgagttccgtttaaagcgagcttttggtaccaatgcagaaaaacatgtatctgccattcgtgatacaataagggagctgtttcatgaatattgtggactttcagataacttgggtgccgatacatcaactcgtgaagctcatgatgttgagttgtatggatttgacagtgattcattggaagattgggatgagcatcttaatgcacagacaaggaaccaacaattgacagaacttgacaactatctagaagatggtcttgtcccaaggaaggatgattttgatatcctgaactggtggatgagtaattgtacaaagtatccaaccctttcagttatggcacgcgatgtcctggcgattccagcttctgccgataattttgaggctgcgttaagtggtgaggcaaatgtgatacataagcaatggagtacattaagtatcaaaacaattgaggctcttgtatgtacccgagattggggtaaatagaatgtttacaagcagttcataaccatagtgcttctaacccgggaatacaggatgatacagaaagagtacaccagccatttattgtgcagtatatcagacatctcgcagccaactggtaatacaaaccctaccaaacgtgggcttctgagtgttttcatgtattgtgcacattgatgtccagtgattttattatgttattactatttgtacagtgccaatgacgtgctgctgctttagcctgattgagaattcttgtacaacgtctctagaaagccatttgatgactga

SEQ ID NO: 97420 - DNA, 794 bp, Zea Mays
cataatttaaaaaaacgcaccgactcccctacagccgccagcgatcccaatccccgactcctccggcagcccgcaacgactcgcgccgcctccggtcgcgccgggtccaggtaaagcggcttccatctcctcggtctcagcgcgtcatcccctcctccttcctcttccgtttcccttagggttggagtagacacgtcggctcaaggatccttcgaggtgcgtatcttctccttttctccatgctacctttccctctctttttcatgcacgatcttttgcgtttctgtgatgtgtgatggatcaagcccgggttcttctgggcggggtagatactcctccgatatgtgttacgctagtggtactagtagatgtaattcaactccaattttttcggtgttcaattgaacccttgtgccgttcgatgtttactttggtaattgtttgactactaaaaatagactactgttgcactgaatattgcatggcgtcttcttcgaataaaactgggttgactcgtctacagcctctagatgcagctgacctttgacactgctccagtaatccagcgcatatgcttcagtgatgtgtacatgaactttttgattggctgttatactcataccagttacagattgatcatgccggtagtgagtagtgaagatggctgatactaatgctctcaccatttgtctgctcatgtactcccaagaatcgagaatattcctttcagccatcgaatcatgtttgtgcctatgtagggaaaggagacctgggtaatgccttgctatacatcg

SEQ ID NO: 97421 - DNA, 1347 bp, Zea Mays
cataatttaaaaaaacgcaccgactcccctacagccgccagcgatcccaatccccgactcctccggcagcccgcaacgactcgcgccgcctccggtcgcgccgggtccaggtaaagcggcttccatctcctcggtctcagcgcgtcatcccctcctccttcctcttccgtttcccttagggttggagtagacacgtcggctcaaggatccttcgagggtcaggacacttattgattttgaacaaagatctagcatggaaccatcctcacagcctcaaccaatgatgggtgttgggtcacaaccttatcctgctgctgctccctatgtgccagtacctggatctcttgctgttcctcctggctcacagccagcagcagcattccccaatccaactcaactcagtgctcagcaccagatggtgtaccagcaggctcagcaatttcatcaacaacttcagcaacagcaggaacaacagctcagggagttctggactacccagatggatgagatcaagcaagcaaatgacttcaagatccacaccttgccacttgcaaggataaagaagataatgaaggctgatgaggatgtgcggatgatctctgcagaagctcctgttgtgtttgcgaaggcatgcgaggtattcatattagagctgacattgaggtcatggatgcacacagaggagaacaagcgccggaccttgcagaagaacgacattgcagctgccatcaccaggactgatatatatgacttcctggtggacataatcccgagggatgaaatgaaagaggaggggctcggacataatcccatagttggcctgccgcctgctatgggggctccagctgatcatggttctcatccatattactatgtgccagctcagcaggtgcaaggagcaggtatgatgtatggtggccagcagggtcacccagtgacttatatgtggcagacgccgcaagggcaagcggcagagccccccgaagaggagcagcagcagtctgcctgaatgtagcaaatagacgataacagcaaagcaattacatcttgatctgaagttctgaacttagttctctaaacaaacaaatatgatttggttatgttaattgtgcagatgattgcaggctgaaacaattgtcgctaattaggtgtcatagcctcatagggtttcctaatggtagtttcgactcccgacgctgccacggcagcagtagaaaatgattgtaatttgcagactaatgtagtaagattagccttttctgtctaatccaatatacgattgaggccctcgtatgaactgagtgtttgtttgccttatttttttaaccattgtgctctttgcttggc

SEQ ID NO: 97422 - DNA, 1223 bp, Zea Mays
accgactcccctacagccgccagcgatcccaatccccgactcctccggcagcccgcaacgactcgcgccgcctccggtcgcgccgggtccagggtcaggacacttattgattttgaacaaagatctagcatggaaccatcctcacagcctcaaccaatgatgggtgttgggtcacaaccttatcctgctgctgctccctatgtgccagtacctggatctcttgctgttcctcctggctcacagccagcagcagcattccccaatccaactcaactcagtgctcagcaccagatggtgtaccagcaggctcagcaatttcatcaacaacttcagcaacagcaggaacaacagctcagggagttctggactacccagatggatgagatcaagcaagcaaatgacttcaagatccacaccttgccacttgcaaggataaagaagataatgaaggctgatgaggatgtgcggatgatctctgcagaagctcctgttgtgtttgcgaaggcatgcgaggtattcatattagagctgacattgaggtcatggatgcacacagaggagaacaagcgccggaccttgcagaagaacgacattgcagctgccatcaccaggactgatatatatgacttcctggtggacataatcccgagggatgaaatgaaagaggaggggctcggacataatcccatagttggcctgccgcctgctatgggggctccagctgatcatggttctcatccatattactatgtgccagctcagcaggtgcaaggagcaggtatgatgtatggtggccagcagggtcacccagtgacttatatgtggcagacgccgcaagggcaagcggcagagccccccgaagaggagcagcagcagtctgcctgaatgtagcaaatagacgataacagcaaagcaattacatcttgatctgaagttctgaacttagttctctaaacaaacaaatatgatttggttatgttaattgtgcagatgattgcaggctgaaacaattgtcgctaattaggtgtcatagcctcatagggtttcctaatggtagtttcgactcccgacgctgccacggcagcagtagaaaatgattgtaatttgcagactaatgtagtaagattagccttttctgtctaatccaatatacgattgaggccctcgtatgaactgagtgtttgtttgccttatttttttaaccattgtgctctttgcttggc

SEQ ID NO: 97423 - DNA, 1380 bp, Zea Mays
cccctacagccgccagcgatcccaatccccgactcctccggcagcccgcaacgactcgcgccgcctccggtcgcgccgggtccaggtaaagcggcttccatctcctcggtctcagcgcgtcatcccctcctccttcctcttccgtttcccttagggttggagtagacacgtcggctcaaggatccttcgagggactgactggttgtgcaaatacctacttttaaattattgaaagtgggagcatgaaagggtcaggacacttattgattttgaacaaagatctagcatggaaccatcctcacagcctcaaccaatgatgggtgttgggtcacaaccttatcctgctgctgctccctatgtgccagtacctggatctcttgctgttcctcctggctcacagccagcagcagcattccccaatccaactcaactcagtgctcagcaccagatggtgtaccagcaggctcagcaatttcatcaacaacttcagcaacagcaggaacaacagctcagggagttctggactacccagatggatgagatcaagcaagcaaatgacttcaagatccacaccttgccacttgcaaggataaagaagataatgaaggctgatgaggatgtgcggatgatctctgcagaagctcctgttgtgtttgcgaaggcatgcgaggtattcatattagagctgacattgaggtcatggatgcacacagaggagaacaagcgccggaccttgcagaagaacgacattgcagctgccatcaccaggactgatatatatgacttcctggtggacataatcccgagggatgaaatgaaagaggaggggctcggacataatcccatagttggcctgccgcctgctatgggggctccagctgatcatggttctcatccatattactatgtgccagctcagcaggtgcaaggagcaggtatgatgtatggtggccagcagggtcacccagtgacttatatgtggcagacgccgcaagggcaagcggcagagccccccgaagaggagcagcagcagtctgcctgaatgtagcaaatagacgataacagcaaagcaattacatcttgatctgaagttctgaacttagttctctaaacaaacaaatatgatttggttatgttaattgtgcagatgattgcaggctgaaacaattgtcgctaattaggtgtcatagcctcatagggtttcctaatggtagtttcgactcccgacgctgccacggcagcagtagaaaatgattgtaatttgcagactaatgtagtaagattagccttttctgtctaatccaatatacgattgaggccctcgtatgaactgagtgtttgtttgccttatttttttaaccattgtgctctttgcttggc

SEQ ID NO: 97424 - DNA, 804 bp, Zea Mays
tgctgccaacgatataagtcccagcaaatgcagtcttctcatggaatttgctaggaggcaggatgggaggtgatggaactgttgcataatccagataattccattgaggcatccaagaagggtatcaacacttctaccttgagatgaaaggcgtattcaagggcctcaaggtcatctcccagatctttgtggtaaaagagcaccagatcgagatcggttatccgaccgatgtgaagcacgttgcgcacatcggttgggatagtcctacagggagtgtagcttctcctagctggatgaatggcatggagtcgccggacttttcatcgctgagcaatgccggaccatctgcacgaacctcctgggcttctcaagatcttgacgagcctcgagatatatcacccttcggtatatttccggaaagtggcggccaagaaacagcccgacggtaccctgacataccaaagccacccaggaagtcaagaaggaagaaatccaagaacaactcgccgagggcatcctcaaggtcgaggtcgagaagctcatcttcatctaccgctgacagtttcggtgttaaggatatgcaagcggaaatctagattgtataggtcattcgatctgacgtctgagagtaattggttctttttgttgagtggttgattagctgttgagacccttttatctttgcggccggctcagagaaaatcagcagtagaaatgtccggtggatgcgtgatgagagccaatattatacgatcgaacctgcatgaaacgaccagcaacgggcaatgatattgtggttcctcg

SEQ ID NO: 97425 - DNA, 382 bp, Zea Mays
atcgcaccaaaccaccgaacaaccttgccttcgagagaaaccaagagtgcgggaggaggcgcatccacagaatccggtgctcgatggcgtagcgctccagcgaagagaactgagggagtattggtctaggctgcgcgtccgcaaaacagaacctagtatcgagggtggctagagcatggggaatcgctcgcgggacttgctctcgcctttgtggaatccagccgccacggccaggcccactcgctgcacaatccctgacgagcaagcaactgcggacccagtactcagcagatggataatactgagcaggagctcgttgaaggcaagttgtacccttgaccacttttctttacccaataatgttctatataatctctgtggc

SEQ ID NO: 97426 - DNA, 3226 bp, Zea Mays
actgcccagctcgcaataactccttcctccccatctccacattctcccatccgccgttcccctccgcttcctcctaccatggcgtcttcttcctccccgagatctcgccatgctagctctcccgccttctgctagccagctgcgagtacggagcgctcgttttcgggcttcctgcatgcgatatcaccgacgaaacgtgtctctggaagaaggcatcacaggccgggatcggagaatgaaagctgacgatatagagcaagatgagctagggttcgcgaggcactagctgggaccgtacgtaccgtgctgccattgttcatgactccggcaaggcgcatgccggcgatgatcggccggaataatggcgtcgcgttcgggtcctcgtcagcgctatctttaagccaggctgacttcctagacagccatcatctgcagcaagcgttcgagcagcaactctttgaacagatcccagccgccgcagtggatagcagcgacaacatcatccacggtcgctccgacgcgctggtggacgagtttgagagcaagtcgtgcagcgagaatcccgatggcaccgcctccggcgatgatggccagggggacgaggaccctaaccagcggccaaacaagaagaagcggtatcaccgccacacccagcaccagatcgaagagatggaggccttcttcaaggagtgtccacacccggatgacaagcagcgaaaggagctgagccgggagctcggtctcgagccgctgcaggtcaagttctggttccagaacaagcgcacacagatgaagaaccagcacgagcggcaggagaacgcgcagctgcgcgcagagaacgacaagctgcgagctgagaacatgcggtacaaggacgcgctaggcacagcgtcctgccccagctgtggcggccctgccgccctgggtgagatgtccttcgacgagcaccacctccggctcgagaacgctcgccttcgcgacgagatcgaccggatctcgggcatcgccgccaagcacgtcggcaagcccatggtctccttcccggtgctctccagcccgctcgccgcccgttccccgttcgaccttgctggtgcctacggtgtccagccgcctggtggtggtggtggcctcggcgccgctgaccacctattcggcggtgccgccggcgacctgctgcgaagcgtgtcggccgggcagctcagcgctgacaagtccatgatcgttgagctggccgtcgctgccatggacgagctcctccggatggcgcgggtcgacgcgccgctgtggaacgggggcgtggcaggggtgccgcagcagctggatgaggaggagtacggccggacgttcccgggcgggcttgggcccaggcagtacgggcttcgtccggaggcgtctcgagacgacgccgtcgtgatcatgacacgcgacagccttgtggagatactcatggacgcgaaccgatttgctgcagtgttctcaagcatcgtgtcgagggcttctacgcacgaggtgttgtcaaccggtgtggcagggagctacaatggtgcattgcaagtgatgtcaatggagttccaggtgccgtcaccgctggtaccgacacgggagagctactttgcgaggtactgcaagaacaaccccgatgggacgtgggcggtcgtcgatgtatcactcgacagcctccgccctagccccgctctcaagtgccggcgcaggccatcaggatgccttgtccaagaaatgcccaatggctactcaaaggtgacctgggttgagcatgttgaggtggacgacagatcagtgcacaatctctacaggcctttggtgaattcaggcctgggatttggtgcgacaaggtgggttggcacgctggaccgacagtgcgagcgtctcgccagtgccatggccagcaacatccccaacggcgacctcggtgtgatcacgagcatagaggggaggaagagcatgctgaagctggcagagaggatggtggcgagcttctgcggtggcgtgaccgcgtctgcggcgcatcagtggacgacgctgtcggggagcggagcggaggacgtccgcgttatgaccaggaagagcgtggacgacccaggcaggccgccgggcatcgtcctcaacgctgccacctccttctggctgcctgtcccgcccaagagggtcttcgacttcctccgcgacgagacctctcgcagcgagtgggacatcctctccaacggtggcgcagtccaagaaatggctcatattgcaaacggccgggaccatggcaactgcgtctcccttcttcgtgtcaatagcgcaaactccaaccagagcaacatgctgatcctccaggagagctgcacggacgcatcgggctcatacgtggtgtacgcgccggtggatgtggtggccatgaacgtggtgctcaacggcggcgacccggactacgtggccctgctgccgtcaggcttcgccatcctccccgacggaccgccggcgccgggcatggctccccatcacggaggagagggtgctgccggcggcggcttggaggagttggaggccgccggcgggtccctcttgacggtggcgttccagatcctggtggactccgtccccaccgccaagctctcgctgggctctgtagccacggtgaacagcctcatcgcctgcaccgtggagcgcatcaaagctgccgtctgcggcgctgaaggcaacccacagtagtagccatccataagatagagagagcgagaggaggggtggtgcagcttttggggatcggagatatttatcagtggggagtcaagaacgcacctcagactctccttgccatgtggtgctctgatactgatgcaagcagggaaaaagaaggcgtcaccactatgcaaggggggatggttcgggtattgacttctccgtcgagtcaactagagaaaggatgcgtgctgcagagaagatgctgtttcttctggatctctttccatattttctagggtttacttcgtcatgttcgtcgtgttgttgttgttcaggctaaaaggtgcctgtgcctgctcgtaggctcgtagctagagaacagagatttgtttacctcttttattttattttttttggattgcaaagatttgtagaatctaggaccagtcatttcatcaccaatgcttggctaaaacgtgtaccgttgttgttcgtagctttcttgctatttaaaacgatgcaatttcaatcgctgagt

SEQ ID NO: 97427 - DNA, 3332 bp, Zea Mays
actgcccagctcgcaataactccttcctccccatctccacattctcccatccgccgttcccctccgcttcctcctaccatggcgtcttcttcctccccgagatctcgccatgctagctctcccgccttctgctagccagctgcgagtacggagcgctcgttttcgggcttcctgcatgcgatatcaccgacgaaacgtgtctctggaagaaggcatcacaggccgggatcggagaatgaaagctgacgatatagagcaagatgagctagggttcgcgaggcactagctgggaccgtacgtaccgtgctgccattgttcatgactccggcaaggcgcatgccggcgatgatcggccggaataatggcgtcgcgttcgggtcctcgtcagcgctatctttaagccaggtgattattccggctgacttcctagacagccatcatctgcagcaagcgttcgagcagcaactctttgaacagatcccagccgccgcagtggatagcagcgacaacatcatccacggtcgctccgacgcgctggtggacgagtttgagagcaagtcgtgcagcgagaatcccgatggcaccgcctccggcgatgatggccagggggacgaggaccctaaccagcggccaaacaagaagaagcggtatcaccgccacacccagcaccagatcgaagagatggaggccttcttcaaggagtgtccacacccggatgacaagcagcgaaaggagctgagccgggagctcggtctcgagccgctgcaggtcaagttctggttccagaacaagcgcacacagatgaagaaccagcacgagcggcaggagaacgcgcagctgcgcgcagagaacgacaagctgcgagctgagaacatgcggtacaaggacgcgctaggcacagcgtcctgccccagctgtggcggccctgccgccctgggtgagatgtccttcgacgagcaccacctccggctcgagaacgctcgccttcgcgacgagatcgaccggatctcgggcatcgccgccaagcacgtcggcaagcccatggtctccttcccggtgctctccagcccgctcgccgcccgttccccgttcgaccttgctggtgcctacggtgtccagccgcctggtggtggtggtggcctcggcgccgctgaccacctattcggcggtgccgccggcgacctgctgcgaagcgtgtcggccgggcagctcagcgctgacaagtccatgatcgttgagctggccgtcgctgccatggacgagctcctccggatggcgcgggtcgacgcgccgctgtggaacgggggcgtggcaggggtgccgcagcagctggatgaggaggagtacggccggacgttcccgggcgggcttgggcccaggcagtacgggcttcgtccggaggcgtctcgagacgacgccgtcgtgatcatgacacgcgacagccttgtggagatactcatggacgcgaaccgatttgctgcagtgttctcaagcatcgtgtcgagggcttctacgcacgaggtgttgtcaaccggtgtggcagggagctacaatggtgcattgcaagtgatgtcaatggagttccaggtgccgtcaccgctggtaccgacacgggagagctactttgcgaggtactgcaagaacaaccccgatgggacgtgggcggtcgtcgatgtatcactcgacagcctccgccctagccccgctctcaagtgccggcgcaggccatcaggatgccttgtccaagaaatgcccaatggctactcaaaggtgacctgggttgagcatgttgaggtggacgacagatcagtgcacaatctctacaggcctttggtgaattcaggcctgggatttggtgcgacaaggtgggttggcacgctggaccgacagtgcgagcgtctcgccagtgccatggccagcaacatccccaacggcgacctcggtgtgatcacgagcatagaggggaggaagagcatgctgaagctggcagagaggatggtggcgagcttctgcggtggcgtgaccgcgtctgcggcgcatcagtggacgacgctgtcggggagcggagcggaggacgtccgcgttatgaccaggaagagcgtggacgacccaggcaggccgccgggcatcgtcctcaacgctgccacctccttctggctgcctgtcccgcccaagagggtcttcgacttcctccgcgacgagacctctcgcagcgagtgggacatcctctccaacggtggcgcagtccaagaaatggctcatattgcaaacggccgggaccatggcaactgcgtctcccttcttcgtgtcaatagcgcaaactccaaccagagcaacatgctgatcctccaggagagctgcacggacgcatcgggctcatacgtggtgtacgcgccggtggatgtggtggccatgaacgtggtgctcaacggcggcgacccggactacgtggccctgctgccgtcaggcttcgccatcctccccgacggaccgccggcgccgggcatggctccccatcacggaggagagggtgctgccggcggcggcttggaggagttggaggccgccggcgggtccctcttgacggtggcgttccagatcctggtggactccgtccccaccgccaagctctcgctgggctctgtagccacggtgaacagcctcatcgcctgcaccgtggagcgcatcaaagctgccgtctgcggcgctgaaggcaacccacagtagtagccatccataagatagagaggtgaatatgctgcttcagttccttaattgggctcgaaaatacacctagcttgatgaaccgtttgaatgtttttttttttttttttgtagagcgagaggaggggtggtgcagcttttggggatcggagatatttatcagtggggagtcaagaacgcacctcagactctccttgccatgtggtgctctgatactgatgcaagcagggaaaaagaaggcgtcaccactatgcaaggggggatggttcgggtattgacttctccgtcgagtcaactagagaaaggatgcgtgctgcagagaagatgctgtttcttctggatctctttccatattttctagggtttacttcgtcatgttcgtcgtgttgttgttgttcaggctaaaaggtgcctgtgcctgctcgtaggctcgtagctagagaacagagatttgtttacctcttttattttattttttttggattgcaaagatttgtagaatctaggaccagtcatttcatcaccaatgcttggctaaaacgtgtaccgttgttgttcgtagctttcttgctatttaaaacgatgcaatttcaatcgctgagtttcta

SEQ ID NO: 97428 - DNA, 3256 bp, Zea Mays
actgcccagctcgcaataactccttcctccccatctccacattctcccatccgccgttcccctccgcttcctcctaccatggcgtcttcttcctccccgagatctcgccatgctagctctcccgccttctgctagccagctgcgagtacggagcgctcgttttcgggcttcctgcatgcgatatcaccgacgaaacgtgtctctggaagaaggcatcacaggccgggatcggagaatgaaagctgacgatatagagcaagatgagctagggttcgcgaggcactagctgggaccgtacgtaccgtgctgccattgttcatgactccggcaaggcgcatgccggcgatgatcggccggaataatggcgtcgcgttcgggtcctcgtcagcgctatctttaagccaggtgattattccggctgacttcctagacagccatcatctgcagcaagcgttcgagcagcaactctttgaacagatcccagccgccgcagtggatagcagcgacaacatcatccacggtcgctccgacgcgctggtggacgagtttgagagcaagtcgtgcagcgagaatcccgatggcaccgcctccggcgatgatggccagggggacgaggaccctaaccagcggccaaacaagaagaagcggtatcaccgccacacccagcaccagatcgaagagatggaggccttcttcaaggagtgtccacacccggatgacaagcagcgaaaggagctgagccgggagctcggtctcgagccgctgcaggtcaagttctggttccagaacaagcgcacacagatgaagaaccagcacgagcggcaggagaacgcgcagctgcgcgcagagaacgacaagctgcgagctgagaacatgcggtacaaggacgcgctaggcacagcgtcctgccccagctgtggcggccctgccgccctgggtgagatgtccttcgacgagcaccacctccggctcgagaacgctcgccttcgcgacgagatcgaccggatctcgggcatcgccgccaagcacgtcggcaagcccatggtctccttcccggtgctctccagcccgctcgccgcccgttccccgttcgaccttgctggtgcctacggtgtccagccgcctggtggtggtggtggcctcggcgccgctgaccacctattcggcggtgccgccggcgacctgctgcgaagcgtgtcggccgggcagctcagcgctgacaagtccatgatcgttgagctggccgtcgctgccatggacgagctcctccggatggcgcgggtcgacgcgccgctgtggaacgggggcgtggcaggggtgccgcagcagctggatgaggaggagtacggccggacgttcccgggcgggcttgggcccaggcagtacgggcttcgtccggaggcgtctcgagacgacgccgtcgtgatcatgacacgcgacagccttgtggagatactcatggacgcgaaccgatttgctgcagtgttctcaagcatcgtgtcgagggcttctacgcacgaggtgttgtcaaccggtgtggcagggagctacaatggtgcattgcaagtgatgtcaatggagttccaggtgccgtcaccgctggtaccgacacgggagagctactttgcgaggtactgcaagaacaaccccgatgggacgtgggcggtcgtcgatgtatcactcgacagcctccgccctagccccgctctcaagtgccggcgcaggccatcaggatgccttgtccaagaaatgcccaatggctactcaaaggtgacctgggttgagcatgttgaggtggacgacagatcagtgcacaatctctacaggcctttggtgaattcaggcctgggatttggtgcgacaaggtgggttggcacgctggaccgacagtgcgagcgtctcgccagtgccatggccagcaacatccccaacggcgacctcggtgtgatcacgagcatagaggggaggaagagcatgctgaagctggcagagaggatggtggcgagcttctgcggtggcgtgaccgcgtctgcggcgcatcagtggacgacgctgtcggggagcggagcggaggacgtccgcgttatgaccaggaagagcgtggacgacccaggcaggccgccgggcatcgtcctcaacgctgccacctccttctggctgcctgtcccgcccaagagggtcttcgacttcctccgcgacgagacctctcgcagcgagtgggacatcctctccaacggtggcgcagtccaagaaatggctcatattgcaaacggccgggaccatggcaactgcgtctcccttcttcgtgtcaatagcgcaaactccaaccagagcaacatgctgatcctccaggagagctgcacggacgcatcgggctcatacgtggtgtacgcgccggtggatgtggtggccatgaacgtggtgctcaacggcggcgacccggactacgtggccctgctgccgtcaggcttcgccatcctccccgacggaccgccggcgccgggcatggctccccatcacggaggagagggtgctgccggcggcggcttggaggagttggaggccgccggcgggtccctcttgacggtggcgttccagatcctggtggactccgtccccaccgccaagctctcgctgggctctgtagccacggtgaacagcctcatcgcctgcaccgtggagcgcatcaaagctgccgtctgcggcgctgaaggcaacccacagtagtagccatccataagatagagagagcgagaggaggggtggtgcagcttttggggatcggagatatttatcagtggggagtcaagaacgcacctcagactctccttgccatgtggtgctctgatactgatgcaagcagggaaaaagaaggcgtcaccactatgcaaggggggatggttcgggtattgacttctccgtcgagtcaactagagaaaggatgcgtgctgcagagaagatgctgtttcttctggatctctttccatattttctagggtttacttcgtcatgttcgtcgtgttgttgttgttcaggctaaaaggtgcctgtgcctgctcgtaggctcgtagctagagaacagagatttgtttacctcttttattttattttttttggattgcaaagatttgtagaatctaggaccagtcatttcatcaccaatgcttggctaaaacgtgtaccgttgttgttcgtagctttcttgctatttaaaacgatgcaatttcaatcgctgagtttctagcttcttgtcttc

SEQ ID NO: 97429 - DNA, 79 bp, Zea Mays
gcttgtgctttcactatgtacggaacgggcggggcggagggtgcaacagagcgtgctagcttgtctagtgtgtataatg

SEQ ID NO: 97430 - DNA, 1591 bp, Zea Mays
tttcagtcagttcgctccgctcccacatgcctcctccgcctccctctcgccgtcccggcatacccaatccctaggcaccccgccgaaaccctagattctcctctcctgctccgatggctggggcagcggcgtcccccgtggcggcccacgtggtggaacggttccgctcgcggctgcgcgaggaagcgggcagcggggagccgggcgcctccgcggtcgtgcgcttgtacgcggaggcgctccgcgagcttaccttcaactgcaagccggtcatcaccgagctcaccatcgtcgcaggccagcacgccgcgctcgccgccgggggaatcgccggcgccgtctgcgcccgcgtcgccgaggtgccacctgatcagatattaccatctttgtatctgctagatagtattgtgaagaacataggtggggaatatgtagagcattttgcaattaggttgcaaagtgtatttgttgatgcatactacagagttcatccaaaccagtatgcttcaatgaggcgcctctttcgtacctggtggccagtgtttccttcttctgtgcttcacagcattgaggatgaccttcaattttcgccctcagagaataaccgtcccaccacatcgacaaatgtgcatcaaacagagtcgttatctcctagaccatctcatggcatacatgtaaatcctaaatacctagaagcacaacataagttcaagcgggtcaatgtggcgcaccagtcagcagctcaggacactaggcaaatgtctgatgtgcaggaggatctgataaatggactaacatcgaatagttcacaaggacggccttcagtgtttcagaaatcttctttacagtatgctgatgatcctggtcaacaagagatgtttcgacctcttgctggagcaataagggcaacatcgccacatctcttgagaacacatgcatctgatgtgaatctagatgggccattagccaattcaaggagaaacttgtccagatcaccacctcttgatgtgttccctaggaatgtttccccaaagagaccactagagaggctaccaccatctcattctgtattgggacctgatcccagaaaattgcctgatcgaaatggcaggttaaggtgggctttggacgatggtgcacagtggcctacaataagtatgcttgatgaagagtacaggaagcaaagtgcaagggaacttattgatgcatatggaaattgtcaaggacgagatgctgatgaacgacttcctaaagtacagcgcctggattcaaatggtatgactagcaaatctggtgcacgaaattggttaacttcagaggaagagtattcatgggaggatatgagtccaactttgactgatcgagtcagaagcagcatgccatcttttcctcctggaaccatgagaattggatttcctggggcaaatgcagggctactggaatctgatgttgggaggcacaatttcctaagccaagctactagatcatcagttgatgtttcaccatttaatattgaagataggatttcagctgcaagtgtatggttgtctgatctctctttaaataatagtgaatcataacattagcataa

SEQ ID NO: 97431 - DNA, 2714 bp, Zea Mays
tcgctccgctcccacatgcctcctccgcctccctctcgccgtcccggcatacccaatccctaggcaccccgccgaaaccctagattctcctctcctgctccgatggctggggcagcggcgtcccccgtggcggcccacgtggtggaacggttccgctcgcggctgcgcgaggaagcgggcagcggggagccgggcgcctccgcggtcgtgcgcttgtacgcggaggcgctccgcgagcttaccttcaactgcaagccggtcatcaccgagctcaccatcgtcgcaggccagcacgccgcgctcgccgccgggggaatcgccggcgccgtctgcgcccgcgtcgccgaggtgccacctgatcagatattaccatctttgtatctgctagatagtattgtgaagaacataggtggggaatatgtagagcattttgcaattaggttgcaaagtgtatttgttgatgcatactacagagttcatccaaaccagtatgcttcaatgaggcgcctctttcgtacctggtggccagtgtttccttcttctgtgcttcacagcattgaggatgaccttcaattttcgccctcagagaataaccgtcccaccacatcgacaaatgtgcatcaaacagagtcgttatctcctagaccatctcatggcatacatgtaaatcctaaatacctagaagcacaacataagttcaagcgggtcaatgtggcgcaccagtcagcagctcaggacactaggcaaatgtctgatgtgcaggaggatctgataaatggactaacatcgaatagttcacaaggacggccttcagtgtttcagcatgttgacatttccacaaggagatatccaagcaattttggtgttcagaatggagctcttttggagtaccagaattctgaacatactctaaatcatgggagaattgctaccatgccagctccaccttggcaacagcctattggtcttccattgcgaatacaaggacctgaacatccttcagtacttggtagaataccacagcctgtcgacggtgaaatgccagtcaagaggttggacattagtggcacgtacaatggtttgaatgtagataaacccttggtgaagcataggtcatcacctgctcctgccccgacagaatggctcccccttcaccatgcccaatcacaaactttaccactaattccacctgataccaaacatgttagaagtgcatcagatagtttagaaattagttcttttgttagccatggaggtagttcatcagtatttgttccacggcatcagtatgatgccgtggatcggaaaacaggtaccagtaacttagctcaaccaccatcaccatatcagaaccaagatttgttgccatcaagtcaacaaaatcaaggtacaattttgggaaaccaagctcatcctcatcgtcccctaaagttacatccccatgctcatcctcaccatcaggagacctttagaagctttgcacctggcatgtctgtatctccattccaaggacaaggaggtaatgcaaccatgacaccagtttctgttctgccaacgtctttttctgtacctcctgctgtgccaccctatggcgtgctgtctgcacctgggtttcctatgccaccattaccgcctggaccaccagcacctgtctcactgcagatgggttcatcatcatcacaagttggtggcccccaaccatttgtctctggactgttgagtaaccttatgcggcacggtgtaatttcactggaaccacctagtcaatcccaggattctgttggagttgacttcaatgtagacctcaaggtacggaatgaatctgtcaccaatgctttgtatcaggatcttccaaggcagtgcaaaacttgtggtcttcgatttaaatgccaagaggagcatcgtgctcacatggactggcatgttacaaagaacaggaattcaaagaatcgtaagaaatcttcacgtaaatattttgtcaccgctgttgaatggttaagagcagcagaaacagtaggaaacgatggagttcctgcttttgtgctctcagacccagtcccagacagacaggaagagaaagaaattgctgttcctgcggatgaggagcaaacatcctgtgcattatgtcaagagccatttgaagatttctacagtgatgagactgacgagtggatgtacagaggtgcagtttatatgaatgcaccagatggtaatatcgatggtttggaatggtcacagttgggacctattgtccatgctaaatgtcgatctgggcccggcaatacttcttagggtgggcatagctgggatgatttgatagtttttttttcccgttgcggctgtaggcatgacctgtaaactaatggagactcagattttggtatggttagcttcttttccatctggctcccttaatagccagtgcatagaatgttttttggaacaaaaaggcaggagccagtgcatagaatgtcaatgtgacaatagtgtataactgtaaaatttttgtgtaattcagttgcacagtgctgctttttcattacaactatagtgtgatctatactgaagcttcatgtttagggtttctgcagcacagttgttgacaacggtatatgtatatgtaaccatggtttcactggacatgggaaacaatatatttcaatagtcctgttttcttccgttaatatcttgtgcagaatacatagcagttctct

SEQ ID NO: 97432 - DNA, 1918 bp, Zea Mays
acacgcaccaccagcatctataacagccgccaccttcccccttatactcgccggaggccaaccagtactcgtgccacgactgccacccctcctcttccttgtgatctccgaatacccatctcagattccaagggccgcgccgtgtaatccccggctctccccacccaccatatatctagtatccgcgcctcaaatccctcgcgaaacgccccgccgtaagcagttgttgtctgccgtgatttgagccgggcggacggattgatcccgggacgaggtgtctcagctcttgatcttgatcctgatcctgggaggcgttcctggtttattggtgggagcgaagaagccatgataccttccgtgaggctctctcctggtcctgcagccttctcaggctccagcctacgctcaaaattaccgtcaattccatccatctccagtctcaaaccctccaaatatgtggtctcctcgctgaaaccactctacctagcaccgctagatggtccgcgcactgccgagcttaagtctcggagacagccacttgagttccgttgttctgcttctgctgctgatgacaaggagtcaaagactcaggtggtgccagttcagtcggaaggcgcacagaggttgaagatctccatctatttcgccacctggtgggcgcttaatgtgatatttaacatttacaacaagaaggttctcaatgcattcccttacccctggctcacctccacactctccctcgcctgtggctctgctatgatgcttttctcgtgggccacccgtcttgttgaggcccctaagaccgacctggacttctggaaagttcttttcccggttgctgtggcgcatacaattggccatgttgctgctacagtgagcatgtctaaggtggcagtgtcattcacacacataattaaaagcgcagaacctgcattcagtgttttggtgtcaaggttcttccttggggagacgtttccaattccagtatatctttctcttcttccaatcattggtggttgtgctctagctgctgtcacagagctgaactttaatatggttggatttatgggtgccatgatatccaaccttgcatttgttttccgcaacatcttctcgaagaggggcatgaaggggaagtccgtcagtggcatgaattactacgcttgcctgtcaattatgtccctggtcatactgactccatttgctatagctatggaaggccctcaaatgtgggctgctggttggcaaaaggctcttgcagaagttggacccaatgttgtctggtggattgctgcacagagcgtgttctaccacttatataaccaggtgtcctacatgtctctcgatcagatttctccattgacattcagcattggcaatacaatgaagcgtatatcagtgattgtttcatcaatcattatcttccacactcctgtccgcgctgtcaatgcactgggagctgccattgccatccttggcacattcctgtactctcaggcaaaggcgtgaggcgggccatgatgacgaacgtctgcagaatcagtagcaagcactaaatccaattttgcttgttccagtggcatgtagatatcgggttagttttccgtatgagagtttgtaataatggatgaatggctctgctgtttcgttcttgtttgttggccagactcaaatccataggccatgaactgcggtcgagtgtacctgaataatactgtaacggagaattcgccgatgctgtttctttatgggtatatatatagtccaagccggaatcccgtttttaatagaattgttctatctgtgcattccagcattttagcagagaatgagttaggaccattagcgcttgttttttttaaaaagaattgttctttttattcgttactttaaataaccacttctatttttaatctaa

SEQ ID NO: 97433 - DNA, 1511 bp, Zea Mays
gggggattcatctgcaagattatggaagaagccatgataccttccgtgaggctctctcctggtcctgcagccttctcaggctccagcctacgctcaaaattaccgtcaattccatccatctccagtctcaaaccctccaaatatgtggtctcctcgctgaaaccactctacctagcaccgctagatggtccgcgcactgccgagcttaagtctcggagacagccacttgagttccgttgttctgcttctgctgctgatgacaaggagtcaaagactcaggtggtgccagttcagtcggaaggcgcacagaggttgaagatctccatctatttcgccacctggtgggcgcttaatgtgatatttaacatttacaacaagaaggttctcaatgcattcccttacccctggctcacctccacactctccctcgcctgtggctctgctatgatgcttttctcgtgggccacccgtcttgttgaggcccctaagaccgacctggacttctggaaagttcttttcccggttgctgtggcgcatacaattggccatgttgctgctacagtgagcatgtctaaggtggcagtgtcattcacacacataattaaaagcgcagaacctgcattcagtgttttggtgtcaaggttcttccttggggagacgtttccaattccagtatatctttctcttcttccaatcattggtggttgtgctctagctgctgtcacagagctgaactttaatatggttggatttatgggtgccatgatatccaaccttgcatttgttttccgcaacatcttctcgaagaggggcatgaaggggaagtccgtcagtggcatgaattactacgcttgcctgtcaattatgtccctggtcatactgactccatttgctatagctatggaaggccctcaaatgtgggctgctggttggcaaaaggctcttgcagaagttggacccaatgttgtctggtggattgctgcacagagcgtgttctaccacttatataaccaggtgtcctacatgtctctcgatcagatttctccattgacattcagcattggcaatacaatgaagcgtatatcagtgattgtttcatcaatcattatcttccacactcctgtccgcgctgtcaatgcactgggagctgccattgccatccttggcacattcctgtactctcaggcaaaggcgtgaggcgggccatgatgacgaacgtctgcagaatcagtagcaagcactaaatccaattttgcttgttccagtggcatgtagatatcgggttagttttccgtatgagagtttgtaataatggatgaatggctctgctgtttcgttcttgtttgttggccagactcaaatccataggccatgaactgcggtcgagtgtacctgaataatactgtaacggagaattcgccgatgctgtttctttatgggtatatatatagtccaagccggaatcccgtttttaatagaattgttctatctgtgcattccagcattttagc

SEQ ID NO: 97434 - DNA, 1544 bp, Zea Mays
ctagtcttcagaagaaaaatttcataccgttttctgtgtactaaagcgctggtgcattcttttacaactcaaagcaatgttttattcagaagaagccatgataccttccgtgaggctctctcctggtcctgcagccttctcaggctccagcctacgctcaaaattaccgtcaattccatccatctccagtctcaaaccctccaaatatgtggtctcctcgctgaaaccactctacctagcaccgctagatggtccgcgcactgccgagcttaagtctcggagacagccacttgagttccgttgttctgcttctgctgctgatgacaaggagtcaaagactcaggtggtgccagttcagtcggaaggcgcacagaggttgaagatctccatctatttcgccacctggtgggcgcttaatgtgatatttaacatttacaacaagaaggttctcaatgcattcccttacccctggctcacctccacactctccctcgcctgtggctctgctatgatgcttttctcgtgggccacccgtcttgttgaggcccctaagaccgacctggacttctggaaagttcttttcccggttgctgtggcgcatacaattggccatgttgctgctacagtgagcatgtctaaggtggcagtgtcattcacacacataattaaaagcgcagaacctgcattcagtgttttggtgtcaaggttcttccttggggagacgtttccaattccagtatatctttctcttcttccaatcattggtggttgtgctctagctgctgtcacagagctgaactttaatatggttggatttatgggtgccatgatatccaaccttgcatttgttttccgcaacatcttctcgaagaggggcatgaaggggaagtccgtcagtggcatgaattactacgcttgcctgtcaattatgtccctggtcatactgactccatttgctatagctatggaaggccctcaaatgtgggctgctggttggcaaaaggctcttgcagaagttggacccaatgttgtctggtggattgctgcacagagcgtgttctaccacttatataaccaggtgtcctacatgtctctcgatcagatttctccattgacattcagcattggcaatacaatgaagcgtatatcagtgattgtttcatcaatcattatcttccacactcctgtccgcgctgtcaatgcactgggagctgccattgccatccttggcacattcctgtactctcaggcaaaggcgtgaggcgggccatgatgacgaacgtctgcagaatcagtagcaagcactaaatccaattttgcttgttccagtggcatgtagatatcgggttagttttccgtatgagagtttgtaataatggatgaatggctctgctgtttcgttcttgtttgttggccagactcaaatccataggccatgaactgcggtcgagtgtacctgaataatactgtaacggagaattcgccgatgctgtttctttatgggtatatatatagtccaagccggaatcccgtttttaatagaa

SEQ ID NO: 97435 - DNA, 1280 bp, Zea Mays
caaaaaatttcttttccccaactcttcagggaaaagtccaatcttttgtgtcactttctatatgtacttcatatactgccatctgaaactttctttgttgatctgcagaagccatgataccttccgtgaggctctctcctggtcctgcagccttctcaggctccagcctacgctcaaaattaccgtcaattccatccatctccagtctcaaaccctccaaatatgtggtctcctcgctgaaaccactctacctagcaccgctagatggtccgcgcactgccgagcttaagtctcggagacagccacttgagttccgttgttctgcttctgctgctgatgacaaggagtcaaagactcaggtggtgccagttcagtcggaaggcgcacagaggttgaagatctccatctatttcgccacctggtgggcgcttaatgtgatatttaacatttacaacaagaaggttctcaatgcattcccttacccctggctcacctccacactctccctcgcctgtggctctgctatgatgcttttctcgtgggccacccgtcttgttgaggcccctaagaccgacctggacttctggaaagttcttttcccggttgctgtggcgcatacaattggccatgttgctgctacagtgagcatgtctaaggtggcagtgtcattcacacacataattaaaagcgcagaacctgcattcagtgttttggtgtcaaggttcttccttggggagacgtttccaattccagtatatctttctcttcttccaatcattggtggttgtgctctagctgctgtcacagagctgaactttaatatggttggatttatgggtgccatgatatccaaccttgcatttgttttccgcaacatcttctcgaagaggggcatgaaggggaagtccgtcagtggcatgaattactacgcttgcctgtcaattatgtccctggtcatactgactccatttgctatagctatggaaggccctcaaatgtgggctgctggttggcaaaaggctcttgcagaagttggacccaatgttgtctggtggattgctgcacagagcgtgttctaccacttatataaccaggtgtcctacatgtctctcgatcagatttctccattgacattcagcattggcaatacaatgaagcgtatatcagtgattgtttcatcaatcattatcttccacactcctgtccgcgctgtcaatgcactgggagctgccattgccatccttggcacattcctgtactctcaggcaaaggcgtgaggc

SEQ ID NO: 97436 - DNA, 1073 bp, Zea Mays
gtcctccagttcgttgccgttgcagtgttttccactcgaggtctccgttgcatacagcccacagctacagctccctgcacgcgtggacgcgtagaaggcagccatgtatactctgatcccgcgctgccacctccagccagtccaccggtcgccgccgccctgccaggcagcaacgacgacgtcatcggcgccgccgtcgccgtcgccatcactgtccatccggttccgccccgaccaggacgagctgcggtcgacgtggccgcagcgcgcgtggacgctggcgggcacggcggccatcctctcctccctgtccacgtccgcctccctcgcggcctcgggctccggctcgcccgcggagccaatcgccgcggcgctggcggcctactccctcgcagacctcgccacgggagtctaccactggttcgtcgacaactacggcgacgccgccacgcccgtgttcggctcccagatcgccgcgttccagggccaccaccgctacccgtccaccatcacgctgcgggagacatgcaacaacctgcacgcgctagcgcgcggcgccgcgctcgcgctcgcccccgtcgacgccgcgctctccgccacgggcgcgccagccgccgcgcacgcgttcgtcggcgccttcacggcgtgcgtcgtgctgagccagcagttccacgcgtgggcgcacgagaagcgccgcaggctgccgcccggcgtcgaggcgctgcaggacgccggcgtgctcgtgtcgcgcgcgcagcacgccgcgcaccaccgccagccgtacaacaccaactactgcatcgtcagcggcatgtggaacgggctgcttgacagatacaaggtgttcgaggcgctggagatggtcgtctacttccgcaccggcatccgcccgcggtcgtggggcgaaaccgacgcctcgtggaaggaggacaccggcgctgaagctgccgccgccgccgccagtaatgctggtctgttacagacagcgggcatcagctctgactctgactgacggtatgcgctgatgcacatagaagcacacaaagagtacttcagctatcacacaggtgcat

SEQ ID NO: 97437 - DNA, 373 bp, Zea Mays
gattctttgccgagtgtcaaatatctcgcactcggcaaagagggtctttaccgagtgccttctgtagacactcggcaaagcatatttttattttttttattttggccaccaaactttttgtggtatgttcctacactatgtagacctacatataccattttgggacaattataatagtgttttcaatagctagtagatttagttcgtttatttgaatttcttcagaaaatttagatttgaactgcatgtcactcgaaactcgaataatcgtgcatgcaaaaatgatacacatgttatttagcacacgttacgaccgatttcaggagcggaccggaaacttcaagcaacatgctcactaaacatggtcgtgaac

SEQ ID NO: 97438 - DNA, 984 bp, Zea Mays
accacatcagaacctcaactgctctatatatatgtgcatgtaccccctgcatgggcaacgcagccagctcgccatagctgattcatatacaatacaagcatcctctccgctgaagagatcaaattccattcagggcagatcgatagaaatggtgtcctccaacttttatcttctcagcgttcttctcatcgccatcgcttctggcgcacgggctacggatcctagtcctctccaagacttctgcgttgcagacaaagaatcgactgtacgtgtgaatgggttgccctgcaaggatattaaggatgtcaaggtggacgacttcttcctagcagccgacctcgacaagccaagggatacgacgacgaacaaggtcaagtcaaatgtcacgttgatcaatgtgatgaagctggccggtctaaacaccttaggcatctccatggccaggattgactatgcccctcaaggacagaacccaccacatactcatccccgtgccactgagatcttaacggttcttgaaggatcactctatgtgggttttgtcacatctaacccagacaacaaattctttagcaagctgctcaacaagggtgatgttttcgtgttcccacaaggcctaatccactttcagttcaatccaagtcatgacaagccagcagttgccctcgccgcactcagcagccagaaccctggtgccattaccatttctaatgcagtatttggatcaaaaccaccaatcgcggatgatgttcttgccaaggcgtttcaggtggacaagaaggttgtggactggctccaagctcagttttgggaggacaaccataactaagtgaagcttgtgcgctattgtcattgttttatgcacctatgtaacaatcaacaacattaatttgatttatttgtattatgtagcaaagtactatgtacttgatgccatatatattctataaaatgttaaatgacctcagttataaatgttaaatg

SEQ ID NO: 97439 - DNA, 170 bp, Zea Mays
atgtgcgccaaggaagaacaacacatataataacagttcgagtgtatagaaataaatgccataatattataaaagtaattattacatagtggaagtcttacaaaaataaatgataaatataaaacgaactaagagtccatccatgaagccataaagctgactgggagacg

SEQ ID NO: 97440 - DNA, 162 bp, Zea Mays
ttttgtgttctgccattctgtgatctcagtcgtccattctaccgttctacaatctcagtcgtccaatcccgcacaccagttttccgcgcgcataaaaaaaatcaaactgtggctgactagggatcgaactttagatctattaagcagaatgcctagccttcc

SEQ ID NO: 97441 - DNA, 2507 bp, Zea Mays
ctacctctcccgtcgcacctcgccctctcccttgccctgccccagatctcggcctccagtcctcgctgccgccgcgacttgctcgccccgtctccctccggccctgcctcatcgcggccgtggtggccaaggaacacgagctcattggaaacactcttaaataaagcttcaatgaacaagacaggagctcgacttcgcctagctccgaacaagcggttgacgaggcggaggtctcgcgtcctacgtgcgtcgcgccgttgcctggctccgtcctcgccgttcctctgtagaagctggccgctgacccccgcccgcctccgcttggccgtctggccgccccccgcgtggtcacctagatggctggccgcgcccctagatttgggttcctaccttgttaggacttccatcttcgttcattttgctgtgtgtccgtcggatagatgactaatgcatcctcaaagttctccaaggcggagccttgcatctttgtgtgtttgatttggttgagctgcaacccgtgctgctgtccttttcagtataaaaaaagatttagatgtaggttggcattcggatgaaaaatggaccgtgaaaaaaaaggaggtccattcaccttgtgttctgtcatttgagcacggatcctttagtgtataggaaagcgtgatatttctgataatcttctgcttttcagagaaaagctttgagtaattgagatgtatattcctctattgaaagaaaaagaggggttttcaagcaatatgaaagcttgatgctttcgttcttcgttttatttaagatcactttcctcccttgttcttatgaaatgtgcaactctttaatcagggatggcaaccgatagtgaagcctcgaaggcagctgaggttgtggttgactggcataaacaggacagcaagaggatgctccatgcagtttaccgtgttggggatctggaccgcacaatcaagtactacacagaatgctttgggatgaaactgctgaggaaaagggatgttcctgatgagaagtacaccaacgccttccttggctttgggccagagaacaccaactttgcagttgaattgaccaactttgcggaggtctcgcgtcctacgtgcgtcgcgccgttgcctggctccgtcctcgccgttcctctgtagaagctggccgctgacccccgccgtggtggccgtcgcgccgttttttattagatgaagaatgaatcaacccttgtagaagctaaagatagaagataacactactctgtttttgaatgtctgaagtgtaattttgcagccttgcaactataaaacaaacaatgtatggctaaattattgcagttgcacagtgtgaagatttaaaattgaagtgctatgaagagatggataagaggaagaaactttataatattgttcaagagacaaaaggaaattatcagggttttttgtcgatgccgacccttaagcaaaaatgaggtgtcatcaggcctgaatgcaaatggcggaacaactaaaaagacatttaagtttgatagagtattcacgccgaaggatgatcaaggtgtgggcgtctccggcggcccgactatacgaagcgagggcgtatcggggctaaggacacgaaaggccaagcgcaaagggcgtacggcagtaagcccgcctgcaccgcaccagaccgccacccgcgacgtgcccatgtcatgacgccacggtggcggcacgctgacccatcgacgtcaccctcttcctcgcttccgctcgacagcctccagtttcctggtcagtcttcgtgccgcctctctaccacacaccgtctctcagagatggaatcaccacccctcacggttgaagcgaccgcttttaccgagaaaatgatggacatgactttggaggatataatcaagatgtgaaagaaaaagaatcctggaggcaagaaaccccctaggcggccggtaaactctaagtctgaaggtttagggttttcatgctctcgactctgatagctaactcaggaacgaaccaatggtaacaattttcttcatttaatggtggattaaatgaaactatcttcggtctttggtacttgctcaacatctacaataagtaggtcagtggaacatatgtcctgtcaccgttagattgggcgatcgaaccatgaactgatattcaatgtaaaatattcagtgtgatagaaaaaagaagattagtcgagtatgatctttatttcaatctgccaatgctcttgcgtgtcaatggatgtttgcaaagacaacagatgccaatgcagactggcttcttcctaacaacaaacctcaacaagccaagagagacgacaattggcgacgtaggaaaaaagacgcattaatcaataacgtgtggattcctggcagtggcgtagacaaggggctctaaggtttgtacaaacatataaatacatattaattactactattttttaaatagttaagtatataaaaacagtgactgattcaataaagatttgttatttctttt

SEQ ID NO: 97442 - DNA, 3303 bp, Zea Mays
ctacctctcccgtcgcacctcgccctctcccttgccctgccccagatctcggcctccagtcctcgctgccgccgcgacttgctcgccccgtctccctccggccctgcctcatcgcggccgtggtggccaaggaacacgagctcattggaaacactcttaaataaagcttcaatgaacaagacaggagctcgacttcgcctagctccgaacaagcggttgacgaggcggaggtctcgcgtcctacgtgcgtcgcgccgttgcctggctccgtcctcgccgttcctctgtagaagctggccgctgacccccgcccgcctccgcttggccgtctggccgccccccgcgtggtcacctagatggctggccgcgcccctagatttgggttcctaccttgttaggacttccatcttcgttcattttgctgtgtgtccgtcggatagatgactaatgcatcctcaaagttctccaaggcggagccttgcatctttgtgtgtttgatttggttgagctgcaacccgtgctgctgtccttttcagtataaaaaaagatttagatgtaggttggcattcggatgaaaaatggaccgtgaaaaaaaaggaggtccattcaccttgtgttctgtcatttgagcacggatcctttagtgtataggaaagcgtgatatttctgataatcttctgcttttcagagaaaagctttgagtaattgagatgtatattcctctattgaaagaaaaagaggggttttcaagcaatatgaaagcttgatgctttcgttcttcgttttatttaagatcactttcctcccttgttcttatgaaatgtgcaactctttaatcagggatggcaaccgatagtgaagcctcgaaggcagctgaggttgtggttgactggcataaacaggacagcaagaggatgctccatgcagtttaccgtgttggggatctggaccgcacaatcaagtactacacagaatgctttgggatgaaactgctgaggaaaagggatgttcctgatgagaagtacaccaacgccttccttggctttgggccagagaacaccaactttgcagttgaattgaccaactttgcggaggtctcgcgtcctacgtgcgtcgcgccgttgcctggctccgtcctcgccgttcctctgtagaagctggccgctgacccccgccgtggtggccgtcgcgccgttttttattagatgaagaatgaatcaacccttgtagaagctaaagatagaagataacactactctgtttttgaatgtctgaagtgtaattttgcagccttgcaactataaaacaaacaatgtatggctaaattattgcagttgcacagtgtgaagatttaaaattgaagtgctatgaagagatggataagaggaagaaactttataatattgttcaagagacaaaaggaaattatcagggttttttgtcgatgccgacccttaagcaaaaatgaggtgtcatcaggcctgaatgcaaatggcggaacaactaaaaagacatttaagtttgatagagtattcacgccgaaggatgatcaaggtgtgggcgtctccggcggcccgactatacgaagcgagggcgtatcggggctaaggacacgaaaggccaagcgcaaagggcgtacggcagtaagcccgcctgcaccgcaccagaccgccacccgcgacgtgcccatgtcatgacgccacggtggcggcacgctgacccatcgacgtcaccctcttcctcgcttccgctcgacagcctccagtttcctggtcagtcttcgtgccgcctctctaccacacaccgtctctcagagatggaatcaccacccctcacggttgaagcgaccgcttttaccgagaaaatgatggacatgactttggaggatataatcaagatgtgaaagaaaaagaatcctggaggcaagaaaccccctaggcggccggtaaactctaagtctgaaggtttagggttttcatgctctcgactctgatagctaactcaggtatgtacaacattatcttattttcctattattaaattatctataaagctgctaggaaattacgcaacatttatatttctatatagagtagcttcttatgtccttaattgtaattagttatttaatttgatgattaccatcttgtaatatttgtataggaacgaaccaatggtaacaattttcttcatttaatggtggattaaatgaaactatcttcggtctttggtacttgctcaacatctacaataagtaggtcagtggaacatatgtcctgtcaccgttagattgggcgatcgaaccatggtacatcagtcaccttctttaatgatttttttgttctacttactaatctgctgctttactcttccctggtgtttgtactgacctttttaggaaatcttgcagaactgatattcaatgtaaaatattcagtgtgatagaaaaaagaagattagtcgagtatgatctttatttcaatctgccaatgctcttggtaattccagtttgcctaatagtcaacttgtttttttgtaatgttcgagcattcgctgaaattactgatcgtattcaaaattgttgctaaattgacgattaacccttgtttccatggatagcgagaggtgtgacgtggtatgtttatagctattgtgcagtatacaccttgcttacaggttgccacaactccgccggttggatccactaaacttccaatgtgtcctgtttgcattggtgtgcttacagttttgtatttttgtttcttagggcccacgccaccatgatgtcacatttcaattcattttgtgacctctgatgaagagatttaaacacatctgttctatcctatccatagttttaacttcaaatattgttctatttaatgccacaacaacatatatctttactatgtcatattatatatgattttgttggcttacaacctctcgatagggcgcccgaatgggcgcctcatgttctagttatatttatgacgtatcttatataattttccctccgtaatccatgcagcgtgtcaatggatgtttgcaaagacaacagatgccaatgcagactggcttcttcctaacaacaaacctcaacaagccaagagagacgacaattggcgacgtaggaaaaaagacgcattaatcaataacgtgtggattcctggcagtggcgtagacaaggggctctaaggtttgtacaaacatataaatacatattaattactactattttttaaatagttaagtatataaaaacagtgactgattcaataaagatttgttatttcttttgtt

SEQ ID NO: 97443 - DNA, 1233 bp, Zea Mays
attctgttttaactgaaatagtttgtcgatttttgcgtgggaacaacaaatacatgatggtaccccttccatccaaaaaatgcaaggcctctatttgacaaacagtcgaactcttagtagaggcggtccagaggtcgttagtggatagtcaagaagagattcacagttgatgtcgaacaaataaaggaatccaataaacttactgcaacattgagaagggaaaatcctacatcagctacatgtataatcgaattatttgtataaacaagataggtacaggcagagcaattcggtagagagaagggagggtgcatgcttgcagcctcattagattactcagttactattttaggctgtcttattgcgccttcatagttggaagtagtatagattttaatcttctctgtatgagcttaatatacttttatttagcttcttgcaagcttgaatttcctggtgctcaaatgccacctgccacttttgtagtctctgctcggaactgtgttttcttactctaattatacatatacgttcatatagagatggaatcaccacccctcacggttgaagcgaccgcttttaccgagaaaatgatggacatgactttggaggatataatcaagatgtgaaagaaaaagaatcctggaggcaagaaaccccctaggcggccggtaaactctaagtctgaaggtttagggttttcatgctctcgactctgatagctaactcaggaacgaaccaatggtaacaattttcttcatttaatggtggattaaatgaaactatcttcggtctttggtacttgctcaacatctacaataagtaggtcagtggaacatatgtcctgtcaccgttagattgggcgatcgaaccatgaactgatattcaatgtaaaatattcagtgtgatagaaaaaagaagattagtcgagtatgatctttatttcaatctgccaatgctcttgcgtgtcaatggatgtttgcaaagacaacagatgccaatgcagactggcttcttcctaacaacaaacctcaacaagccaagagagacgacaattggcgacgtaggaaaaaagacgcattaatcaataacgtgtggattcctggcagtggcgtagacaaggggctctaaggtttgtacaaacatataaatacatattaattactactattttttaaatagttaagtatataaaaacagtgactgattcaataaagatttgttatttctttt

SEQ ID NO: 97444 - DNA, 805 bp, Zea Mays
gtgatgataattgatatttcagtgttgatttaactcatgtattgtttttgtgttcattgagaggatataatcaagatgtgaaagaaaaagaatcctggaggcaagaaaccccctaggcggccggtaaactctaaggtctataactctggatgtgtggtggtgttgaaattagttttgtgtataactgttccaacttcaaatagcttcgttttaggtgctatgtttgggaataaattttccagttaaaagtacatgacgtccacgatggactttcttggttttccaaggctcagttacttgctgcgatatattcctttggtgaagttttgccgtgcaccatgtgtgtatcttcaagattaaactaaattttgcattattcatcggttttcttaattcttgtagttgaatagctttaacctgaaacaatacaccagtcgctttcgctgttgtttactttggtggatagtttctattgggaagtgatttgacaccagcaaaggcatttacttctcttttttatttgtagtctgaaggtttagggttttcatgctctcgactctgatagctaactcaggaacgaaccaatggtaacaattttcttcatttaatggtggattaaatgaaactatcttcggtctttggtacttgctcaacatctacaataagtaggtcagtggaacatatgtcctgtcaccgttagattgggcgatcgaaccatggtacatcagtcaccttctttaatgatttttttgttctacttactaatctgctgctttactcttccctggtgtttgtactgaccttt

SEQ ID NO: 97445 - DNA, 1293 bp, Zea Mays
cgcaaacggtgagcgcacagcacgcagcaaaccagatctcggtcgcccgccggctctccagacggagcgagcccgttccgtcgccgtcacccagcgcgccgatggagcagcagatggtaccactctgtgtgaagagtgtgaagcgaaagaggaaaagggttgaccacagcaatattattctagcattaccagctatatatccatttccacaaaagaaaacggtggcaagtgctgcaggaaagaaaagggcagcaaccaagaaaaacactacagtatatatattttcacttgtttcaggaagaaacaagacgcgcaacaaggctgcacgtgcacccaagcaaggactgaggaaaggtaaaagaaagaatgctaaggctgctcatgcacccaatgacgatgcactaacggaaggacgtataggttctgtagacatatcaaatggtgcaagcaatgaacatcctgtccaagaggatcaaaaagacctcatacggcaacaacacaacttctcaaacactggagacgacattattgtggatgatcgttcaggtgatgcaaatgaaccaaaaattgttagcaatgaacaatatatttccgatgaagaagcaggcacagtgcagctaccgaaccctgccaaacaagacattctggaagcggattctgcagtggaacaaccatatgttatcaacaacgaacaacagattatggaggaacaaccaggtgtggagaaccaacaaaatgttgcagttaatcagcaacacaaaccagacgaacaagcaggcataatgcaagaacaaaacattggaaatgctttagaagaaaatgtgccagaggatcctacaggagaaaggtggaggatgaagacccaaactttggaaggtatatatgccacaagtacaaagggaagagccttcaaacctcctagcaatatgcattgaggtagacaatgtgtcacataggtgggcttcatgaggattttcacattgacgatgcttgagcaagcaggaggagatgatgatgtgttttttaatagctagtcgacagctagatggccttagggtttagttcggatggatggcctagatttgattcacattgatacatgatacttattccagactacaaaaaacattactatatgcggtgtacgacatgcatatcaccatactttatggtgttgtactaatacgagtaaacgatcaataaccttcgctggatgaaatgggcatgggagttgtgacatcgatataatatattgtgtgcactagagaaataaatcaatttacaaacagaatc

SEQ ID NO: 97446 - DNA, 1279 bp, Zea Mays
cgcaaacggtgagcgcacagcacgcagcaaaccagatctcggtcgcccgccggctctccagacggagcgagcccgttccgtcgccgtcacccagcgcgccgatggagcagcagatggtaccactctgtgtgaagagtgtgaagcgaaagaggaaaagggttgaccacagcaatattattctagcattaccagctatatatccatttccacaaaagaaaacggtggcaagtgctgcaggaaagaaaagggcagcaaccaagaaaaacactacaggaagaaacaagacgcgcaacaaggctgcacgtgcacccaagcaaggactgaggaaaggtaaaagaaagaatgctaaggctgctcatgcacccaatgacgatgcactaacggaaggacgtataggttctgtagacatatcaaatggtgcaagcaatgaacatcctgtccaagaggatcaaaaagacctcatacggcaacaacacaacttctcaaacactggagacgacattattgtggatgatcgttcaggtgatgcaaatgaaccaaaaattgttagcaatgaacaatatatttccgatgaagaagcaggcacagtgcagctaccgaaccctgccaaacaagacattctggaagcggattctgcagtggaacaaccatatgttatcaacaacgaacaacagattatggaggaacaaccaggtgtggagaaccaacaaaatgttgcagttaatcagcaacacaaaccagacgaacaagcaggcataatgcaagaacaaaacattggaaatgctttagaagaaaatgtgccagaggatcctacagtttttgctgatatattcaactttccgctgaataatgaactcatggatctctcaaacattgaagacaatctggaggattcaacaggagttcaggatgaacaaactataatgaataatcaacaactgattccggaccaacaagcaggattagtgcaccaacagaaccctgaaaacgccatagaaaaagttgttgcagaggacgaccctgcagtactcggtgacatattcagctttcctttgagtaatcaacttatggacctggactaaggttctgcatagccaatcgccatgggaattgcgttgctgatttatttttttccaagataatgacatgaacctgtatttcaacattctctggtccaaatctgttttgttatcgtgaacataatgctgtatatacaagcgtatcgtcttctctgattattatatatacatggtatatatatatagatgttccagctgca

SEQ ID NO: 97447 - DNA, 2464 bp, Zea Mays
cgcttccaaccctcctcttgctctccctccaacgtctctcactccccggcctctccatcccgcccccgtcacaccgccggaaccctacacaaggtcccacagtcaatgccgcccgcttcacgccccgccgctgcctcctccgctctacccgcgccgccccgccgcctccgacgccgccgcccgctcaaagccacactagccaccacccccgcggctgacgcaggcgccgccgctggagctgcccgccacggcggccccgagactccgcatctctgttgggccgcgtctagcggcgagagcaatgcaaacgcagagaggccgcgcggggacccgccctcctccgtcagacgcttggccgcggcggtgtggcggctgcggccacccgaggaggcacccaccgccggccagtatgacgccgcctcccgtgtcggcctcgagcatataccgagacatctacaagctcacctcctgcgcaagaatcctcttacttaccaccgtagtttcaaaaaagacatttcaagccccaactccgtcctggagccacatagtgaagagctccacaagatacatcttggtctttcctctggtgtggaggatgcaacaaaatgggagcatataaacataaagagcatagaaccagatggtgcctatgtgattgctagccaactaaatctcgttgaggaacagcaagggggtagctatgttgctagccttgagttggagcttcagcaggcacgggatagagtgagcaagctagaagctgagcggttttcagccaagaagcaactgaatcacttgttcaagaaacttgcagaggagaaagcagcttggcggaacagagagcacaagaaagttcaagccattcttgaagatatgaaggctgatctggagcatgagaaaaagaaccggaggcagttggagactattaacttcaagcttgttgatgagttgaaagaggtcaaaatggccgcgaagcagctattgcaagagtatgacaacgagcagaagacgcgggaactcacggatgaggtgtgcaacaagctagtgagggagatagaggaacacaagtcagagatcgaagccttgaagcaggattctgtcaaactacgcggcgacctggatgaggataggaaattgctacagatggctgaggtgtggcgtgaggagcgagtgcagatgaaacttgtcgatgccaagctcactcttgaggccaaatatgaacagttgagcaaactgcaggaggaggtggaggctttcattttgactttcagctcttccaaaggagacagcacaattgttgaagccgcacacaacattgtacaggccattgggtcggccagagaccaagaggttgaattcacatatgagccaccaagagcatcagaagatatactggccatctttgaagagctacgcccaagtgaagagatggagaaaaaggaaaccgaaccatgcctaaagcaagaaatccaagaagctagcccaacagctgatatatttctggaaaatcgagccagattgttcccagatggaagccattctgatgagagcgataaggaagatggaagcagctgggagaccatgagccatgaagagatgcaaggctcaagccattcgccgtatgaaagtgaacattcagtcaacaagatctttgacagaatttcgtggaccagtggaaatgattctgagggtgagcaggccaacaaactgtgtgatgacttgagcagtgtgtacctgacggacatggaacagtccaagaagaaagagtccgccatatcaaagctgtggaagtcatctccactgaaaaactgtgaattccgtacaaaagatgttgcggatatgataaatgggagattatcaagtgcaagtcttccaaatggtgtgtactctactgccaaaggcttgaatctagatatgggggacagcacccctagcaccacgcaatggagctcaccggattcgatgaacagccagctcaaccggggtttcagaggttgcatggagatggttcagaggcagagcctgaaggcgaagctccttgaagctcggatggagagccagaagattcagctccgccatgtgctcaaccagaaaacttaagttagaaccgcactgtgtcgaaataaaattccaagcattggatttattacatttcccttgtccattgtagtatgtagcttaatctcatgtgtttctgcttcatagaactatatagctagctatagccttgtaggctgacctggccatggttgatgcagctgtctaattgtggcagtacatttgacaggttatgtgcccgtctttatgtgtaatgtggcagtaaactgtaaaccagaagcattattcagactaactgtaccagtactgtagcaggctggcaacaaacaaaatgcatcgttcagacaaactgtaccattggcagtgaagaattttaaaacatctgagaacgtgtttccatcagaag

SEQ ID NO: 97448 - DNA, 6006 bp, Zea Mays
ctagttcagagaaagaaagaagttgagaatgagaagcaagtgaggcgcgtttgctgggaagtggttcttgtgaggtttaggagttcacccttcttttcttccccttctagaaatggagatggtcctacggtcgcagagccctctctgccttcggagtgggccggtgctcatttttcgaccaaccgtcgcgggcggaggagggggcactcagtctttgttgaggactaccagatttgcgagaagaagggtcattcgatgcgttgtagcaagtccaggttgtcctaataggaaatctaggacagcgtctcccaacgtaaaagtagctgcttatagcaactatgcgccaagactcctcgttgagtcaagctccaagaagagcgaacaccatgatagcagcagacaccgtgaagaaactattgatacatacaatgggctgtcaggttctgatgcagcagaattgacaagtaatagagatgtagaaattgaagtggatttgcagcacatttctgaggaggaattgccaggaaaagtatcgattaatgcatcattaggagaaatggaaacagtggatgaagctgaggtcgaggaggataagtttgaggtagatacctcaggaattgtattgcgcaatgttgcagttcgggaagtggatccaaaggatgaacataatgctaaagatgtatttgtggtagattcgtcaggaactgcaccagataatgctgcagtggaggaagtggtagatgaagctgaggttgaagaggatatggttgatgtggatatcttgggacttgacttgaataatgcaacgatcgaggaaattgatttgatggaagaggctttactggagaacttcgacgtggattcaccaggcaatgcttctagtggtcgaacctatgggggtgtggatgagttgggtgagctgccttcaacatccgtggattgcatcgccattaacggaaaacgtagaagtttgaagcctaagcccttgccaattgtcaggttccaggaacaagaacagatagttttaagcattgttgacgaagaagggttgattgctagttcatgtgaagaaggccaaccggtggtagattacgataagcaagaggaaaactctaccgctttcgatgaacagaagcaattaactgatgatttccctgaagaaggcatatctatagttcacttccctgagccaaacaatgatattgttggatcctcaaaattcttggagcaaaaacaagaattggatggttcttataaacaagatcgatcaaccactggattgcatgaacaagatcagtctgttgttagttcacacggacaagataaatcaattgttggtgtgcctcagcaaatccagtacaatgatcaatctattgctggttctcatagacaagatcaatcaattgccggtgcacctgagcaaatccaatccgttgctggctatataaaaccaaatcaatctattgttggttcttgtaaacaacatgaattgattattcctgagcctaagaaaatcgaatccatcatcagttacaatgaaatagatcaatctattgttggttctcacaaacaagacaaatctgttgttagtgtgcctgagcaaatccaatccattgttagtcacagcaaaccaaatcaatctactgttgattcttatagacaagctgaatcaattattggtgtgcctgagaaagtccaatccatcaccagttacgataaactagaccagtccattgttggttctcttaaacaagatgagcctattattagcgtgcctgagaaaatccaatccattgtccattacactaaaccaaatcagtctattgttggcttgcccaaacaacaacaatcaattgttcatatcgttgaaccaaaacagtccatagatggtttccctaaacaagatctatcaatcgttggtatctccaatgagtttcaaacaaagcaactggctactgttgggactcatgatggattgcttatgaagggtgtggaagctaaggagacatctcaaaagactgaaggggatacacttcaggcaacgttcaatgtcgacaacttgtcacagaaacaggaaggcttaactaaagaagcagacgagataacaattattgagaaaatcaatgatgaagaccttgtgatgattgaagaacagaaaagcatagccatgaatgaagaacagacgattgttaccgaagaagacattccaatggctaaggttgagataggaattgacaaggccaaatttttacatctgctttctgaagaagagagttcatgggatgaaaatgaagtgggaataattgaggctgatgaacagtatgaagtcgatgagacatctatgtccactgaacaagatatccaggaatcacctaatgatgatttggatccacaagcactatggagtatgcttcaagagcttgctgaaaaaaattattcgctgggaaacaagttgtttacttatccagatgtattgaaagctgattcaacaattgatctctatttcaatcgtgatctatcagctgtggccaatgagcctgatgtacttatcaaaggagcattcaatgggtggaagtggagatttttcactgaaaaattgcacaagagcgagctggcaggggactggtggtgctgcaaactatacattcctaagcaggcatacagaatggactttgtgttttttaacggacacacggtatatgaaaataataacaataatgatttcgtgatacaaatagaaagcaccatggatgaaaatttatttgaggatttcttggctgaagaaaagcaacgagaacttgagaaccttgcaaatgaggaagctgaaaggaggagacaaactgatgagcagcggcgaatggaggaagaaagggccgcagataaagctgacagggtacaagccaaggttgaggtagagacgaagaagaataaattgtgcaatgtattgggtttagccagagctcctgttgataatttatggtacattgagcccatcacgactggacaagaggctactgtcagattgtattataacataaactcaagacctctagttcacagtactgagatatggatgcatggtggctataacaattggattgatggactctcttttgctgaaaggcttgttcatcatcatgacaaagattgtgattggtggtttgtagatgttgtcgtgcctgaaagaacatatgtattggactgggtttttgctgacggcccaccagggagtgcaaggaattatgacaacaatggaggacatgattttcatgctacccttccaaataacatgactgaggaagagtattggatggaagaagaacaaaggatctatacaaggcttcaacaagagaggagggaaagggaggaggctattaaaaggaaggctgagagaaatgcaaaaatgaaagctgagatgaaggaaaagactatgagaatgttcctggtttctcagaaacacattgtttacaccgaaccacttgaaatacatgctggaactactattgatgtgctttataatccttctaatacagttctaactggaaagccagaggtttggtttcgatgttcatttaatcgttggatgtatccaggtggggtgttgccacctcagaagatggtacaagcagaaaatggttcacacctaaaagtaacagtttacgttccacgagatgcctatatgatggactttgttttctcggagtcagaagaaggtggaatttatgataacagaaatgggttagactatcatattcctgtttttgggtcaattgcaaaggaaccacctatgcacattgtccacatcgctgttgagatggcaccaatcgcaaaggttggaggtcttggtgatgttgtcactagtctttcacgtgctgtgcaagatttaggacacaatgtggaggttattcttccaaagtacggttgcttgaatctaagcaatgtcaagaatctacacatccatcagagtttttcttggggtggttctgaaataaaagtgtggcgtggactagtcgaaggcctttgtgtttacttcctggaacctcaaaatgggatgtttggagtcggatatgtatatggcagggacgatgaccgccgatttggcttcttctgtcgttctgctctagagtttctcctccaaagtggatcttctcctaacataatacattgccatgattggtcaagtgctcctgttgcctggctacacaaggaaaactacgcgaagtctagcttggcaaatgcacgggtggtattcaccatccacaatcttgaatttggagcgcatcatattggcaaagcaatgagatattgtgataaagccacaactgtctctaatacatattcaaaggaagtgtcaggtcatggtgccatcgttcctcatcttgggaaattctatggcattctgaatggaattgatccagatatatgggatccgtacaatgacaactttatcccggtccactacacttgtgagaatgtggttgaaggcaagagggctgctaagagggcactgcagcagaagtttgggttacagcaaatcgatgtccccgtcgtaggaatcgtcactcgcctgacagcccaaaaggggatccacctgatcaagcatgcgattcaccgtacactcgaacggaacggacaggtggttttgcttggttcagcgccggactctcgaatccaagctgattttgtcaacctggcgaataagctccacggcgtaaaccatgggcaagtgaggctttccttgacctacgacgagcctctctcgcatctgatatacgctggctctgacttcattctggtcccatctatatttgagccttgcggcctaactcagctcgtcgccatgcggtatgggaccatcccgattgtccgcaagactggagggctcttcgacactgtcttcgatgtggacaatgacaaggaacgagcccgagatcgaggccttgagcccaacgggtttagctttgacggagctgatagcaacggtgttgactacgcgctgaacagggcgatctcagcttggttcgatgcccggagctggttccactccctttgcaagagagtcatggagcaggactggtcgtggaaccgacctgccctcgactacatcgagctctaccgttcagcgtccaaattgtaataatccaaccaacggccaatgtagtgtgttgtctgcaggtctcagatgcagccattcagcttttgcaggttcctgggcattgctgtacagcctccttgtctttagttagctccattccccgaggagcacagtgcaattttttatcctcagttattatgcatagattgtctcagtagaatgctttcttcgggcatgtatgtttgtttcctctgttgttgaattctggtgttaagtcgtgtataggaatctacaggaaatgaaaaagtccatttcctgcttcaaccttttagggctaccatgcacatgagacctttcaaatgcaaagaatattaggactagactactagtctgtgaactctatttttttccaaggatttctattttttcaaggaaaaataaactaatttttcttcggaaaatggaaatctttttaaaaaatggggttcccaaactagcccgtagagtatagatctagaattggtctagtggtttctcaagaaaaaaaaacatacgccttttcttgtcatatgcttatttaagtttattttgtacaaactttgagatccttcaaaaacaccccaatggctggtgtagtgaccagtgaaataaagaggatcaatggggaggaatcccccacctctctcccgcagatgtcacccagcaccggccaacctcacctgtccagtgaaattaaggttggttgcgacgacagcccatcaatggaaaccaacctcgccccgtgtcgggatctaccttcctcaccaccacgccgatctcaccttccataggagctacctaggcactgttacctattataggtacatgacattgtacatctttgtatgaacttacatcaatgccaaaaatcc

SEQ ID NO: 97449 - DNA, 2172 bp, Zea Mays
atggatgtgcgtggcaacgtccaaaatccagaccgctggtaggagtatctcgtagacattgaacaacggctgcatggcgagcgcctgcgccacctccatccccctcgtctcggcgccctctgcatgcccgtccaagaagaccaccgtcgccaggttccggcgccgcacggcgacgtgcagggccagcagcggcggtggcggtggccggggcggcgaaaatgatggcctcctttggctgccccggcgggacgtgatgctcaacggcctgtccagtgtcgccgccgggctcgcctggtacccgggcgtcgcgtccggcgcggatgcggtgtgcaccagggccgacaaggtgaacgagaagaccgtgcagtgcacggacccggccgggcagcttccgtgccctctggtgtcgccgacggaccccgtggacttcaagccggaaagcaaggtgacgcgcatccggcagccggtgcatctcctgagccgggagtaccaggagaagtacaaggaggccgtcgcgaagatgaaggcgctaccggaagagaacccgctgagcttcgcggcccaggcggccatccaccaggcttactgcgacgcctactacaagtacgacccgacggccaaggacgcgccgttcgacgtgcacttctcgtggatcttcgcgccgtggcaccgcatgtacatctacttctacgagcgcgccctcgggcagctcatcggcgacgacaccttcgcgctgccgttctggaactgggacacgccggccggcatggtggtgccgccactcttcaaggactccatgggcaacccgctgtacgaccccaacaggaacccgtcgaacgtcgacgcgctggtggacttagactacctcaacgacaggaatgcggagcccatccctttcaagggcccacgggacgaaaagtacaaggaacttgtgaacaagaacctgtgcaccgtatacacccagcaaatacgtagcggcaagggcgccgagtcgttcctgggcgagaagtactgcaccgacatcgggtcaagcacgagcagcatgggttcgctggagcggatggcgcacactgccgtgcacgtctgggtcggcaaggcgggcccgacgccttcctcggaggcgtgcagtgccgctaccggcggcttcccgaaccacaccaaaggcgggtacagctgcaacaacgacatggggttcctggggtcggcgggacacgacccgctcttctactcgcaccactccaacgtcgaccgcatgtggcacatctggtcgaccaggctcggcggcgggcagggcatcacggaggcggactggctcgacaccagcttcgtcttctacgacgacgtcaagagcccgcggaaggtgcgcatcaggttccgcgacgtcctggacacgcgcgacctcggctacacgtacgacgccgagtccgacaaggacctgccatggctgcgctgcaagatctcgtcgctggtgccccacggcaaggacagcccgccgaggtcgtcgtcggcaaggaaggcggcgccggtgttcccgctcgccctgactaagggccaggtggtggaagtgccggccgtgcctgtgccggccaaggacccggggaaggagcagctgctggtgatcgagggcatcgagtacgacccccaggcgaacaataagttcgacgtcgccatcaacctgcccgcggacaaagcgttgcaggtaggcccacagtacaaggagtacgccggaagcttcgccgtcgtgccgggctccggcgccgggaagacgcggaaagtgaagctctccctgtgcatcaccgaagtgctgttcgatatcgacgctgacggcgataaaaccgtcgacgtcgttatcgtgccgcgcacaaatgctaagatcacgctcaacgctcgccccaccatcaagaatcggaactaggagctagttgctactagtgctcatcaagcacactgtacgtacgtacgtatgtactcgatcgcgtggtcattcatcgaccatcatcgtttatatgctgtcacgcacagcgcgggccggccggtagggtgtcggcaataataaacgcggccagtgttgcattattgtgtgttttatttcacaaggattaggagcgagccaatggtagattctaaggaataaataacattgttatgaatgatatggttatgttttagaga

SEQ ID NO: 97450 - DNA, 265 bp, Zea Mays
gggagtcgcattgccgagcagaatcggtatcgggtagtcggtgatttctcaccgtcgtgggacatctgctcggggctgcaatccgccgtgggtcaccttcgttgcggtaaaattccaacgagccagtggccgatgattcaggtgtttagcaggtagaagttgctgagcaggagctcattgaagccaagttgtgcccttgaccacttttatttacccaataatgttctctataatcattttatcatgcataggcttaattttgatg

SEQ ID NO: 97451 - DNA, 1339 bp, Zea Mays
gggagtcgcattgccgagcagaatcggtatcgggtagtcggtgatttctcaccgtcgtgggacatctgctcggggctgcaatccgccgtgggtcaccttcgttgcggtaaaattccaacgagccagtggccgatgattcaggtgtttagcaggtagaagttgctgagcaggagctcattgaagccaagttgtgcccttgaccacttttatttacccaataatgttctctataatcattttatcatgcataggcttaattttgatggacccaataggccaccctagtctggttatctttacaccttgtgtacccctgaacttttgggtagtctttgctattgccatatatggttttgggtgttgagataactattacacatgatcattctttattactgttctattttcgttcatgataagacaactatgttaattggaacatcgagcttaacttgagaaacacgtgccaccacaagggtggaatgggacgcccttggctgactaactaggaaagctagtggaggactaccttgcccgaaaggggcaagaagagtaggggagtaggcgtgtagggaggttctcgggttgattttgctacgatggcggttagacgggggattcctgcattgctcttcctagaaactgtagcaagttttctgaagctagtggaactttgtaaaggcctcatagtggatccctagtcattcacctcggcagtgtctaagggccttgcaaatctaggctagatgggatacacgacttgtgggtacagggtacaacctctgcagagtgtaaaactggtatactagttgtgctcgtggtcatgagcagctcaagactcttgcatgattaatttatggaatcaaattcaatttgtcaattgcatcgcattgggatttattattaattttgatctattattactctggtttggtatctacttatatttagtaactgctaataaaatttgaccaacttattaaaagcaatgcttagctttaccccttatttgtgatcagccttacacttcacatgaactcccacctttggtgagttcatgcacattattccccacaacttgttgagctatgatcttttgtgagctcacccttgcgatatataaaccccccaaaggagaagaacatgtggtctaggaggagccttacaatgaagagtacgagttcatctaggtggcgtctcccagtcagcttgatggcgccaaggaataatatttagttcgttttattgttatcatttatttttgtaagacttccgctatgtaataatgatacttgtgacatttatctctatagactttgtcattatatgtgatgttctt

SEQ ID NO: 97452 - DNA, 172 bp, Zea Mays
aattcacatttgttgtgccagaagatgcattttggagcaatgatcatataaatcctatgcggcatttattctttgacgatctctggtcgttgtaccaccgacaaaggatggaaaccaactacttaaccctcttctgcttgtaagtacctctaaactttcatatttgttagtt

SEQ ID NO: 97453 - DNA, 661 bp, Zea Mays
catatgtcacatttaacacttaaacccttccaccaccagctcaataatctttataaaaaaacccctaacaaaccatgattatatctgtgattagatcgtaatctaatgaaccagatggtttacttgcacgcttgcaaagaaggactgcttgcatagcagtcgttgccgctaagattttaactaggctatttaaaatcttatggttaattttagatgctaaaaattatgtagaaagggtcaaacatgcccttagcttggtggggcccgcaaagccaatccattcgagagcaatccaaggaaaccaagtctcgtcccacctatccccgtgggattgtgtagtgggaaggggtacgttagcgtttgcgtgcgcgtagcaactccccacgcaaagccgccgccgttccctctcgtcttccccagttcccctacgccggtaatcccacgtcctatcagccgccgatccagccttgcttccatccatccatccatccatctcgtcgcttctctctgttccgcgtgcgatcgagtagatcaaaaggaggaggaggatggcgaggagttcgttcaagttggagcaccccttcggttcgtctctcgggtttccgatcccctcatcaacggggttaacttgttgttgctgctgctcgtgctagggcctcgg

SEQ ID NO: 97454 - DNA, 1268 bp, Zea Mays
catatgtcacatttaacacttaaacccttccaccaccagctcaataatctttataaaaaaacccctaacaaaccatgattatatctgtgattagatcgtaatctaatgaaccagatggtttacttgcacgcttgcaaagaaggactgcttgcatagcagtcgttgccgctaagattttaactaggctatttaaaatcttatggttaattttagatgctaaaaattatgtagaaagggtcaaacatgcccttagcttggtggggcccgcaaagccaatccattcgagagcaatccaaggaaaccaagtctcgtcccacctatccccgtgggattgtgtagtgggaaggggtacgttagcgtttgcgtgcgcgtagcaactccccacgcaaagccgccgccgttccctctcgtcttccccagttcccctacgccggtaatcccacgtcctatcagccgccgatccagccttgcttccatccatccatccatccatctcgtgagcgccggccaccgtcaatcgattcgatttgatcgttccccttccccgcgcctcctcgttcccctgaccagtcgccccgattttttttctgttccaggtcgcttctctctgttccgcgtgcgatcgagtagatcaaaaggaggaggaggatggcgaggagttcgttcaagttggagcaccccttcgaaaggaggcaagctgaggctaaccgcatcagggagaaataccctgacagaatccctgtcattgttgagaaggccgagaggagtgacatcccagacattgacaagaaaaagtaccttgttcctgccgacctcacagtcggacagtttgtgtatgtggtacggaagcggatcaagctcagcgctgagaaggcaatcttcatcttcgtaaagaacaccctcccaccaacagctgctctgatgtccgccatctacgaggagaacaaggacgaggacggcttcctctacatgacgtacagcggcgagaacaccttcgggctgttctgagtgggagccgctatggatccacattgggcaatgcctcctgtaaatactaaacatgcatcacaagaatctgtgtccatagcataatctggtctgtctgtcattacgcaacttgacgtgcaatgctaaacacatttaagtaataatatatactactctgctttgggatgcttcagaaattatgttaccttctgtatcctccgtgtgcctgtcgacgtgacgaagtaacatgaaggcgtctgcggtggttccacccatttagg

SEQ ID NO: 97455 - DNA, 1168 bp, Zea Mays
catatgtcacatttaacacttaaacccttccaccaccagctcaataatctttataaaaaaacccctaacaaaccatgattatatctgtgattagatcgtaatctaatgaaccagatggtttacttgcacgcttgcaaagaaggactgcttgcatagcagtcgttgccgctaagattttaactaggctatttaaaatcttatggttaattttagatgctaaaaattatgtagaaagggtcaaacatgcccttagcttggtggggcccgcaaagccaatccattcgagagcaatccaaggaaaccaagtctcgtcccacctatccccgtgggattgtgtagtgggaaggggtacgttagcgtttgcgtgcgcgtagcaactccccacgcaaagccgccgccgttccctctcgtcttccccagttcccctacgccggtaatcccacgtcctatcagccgccgatccagccttgcttccatccatccatccatccatctcgtcgcttctctctgttccgcgtgcgatcgagtagatcaaaaggaggaggaggatggcgaggagttcgttcaagttggagcaccccttcgaaaggaggcaagctgaggctaaccgcatcagggagaaataccctgacagaatccctgtcattgttgagaaggccgagaggagtgacatcccagacattgacaagaaaaagtaccttgttcctgccgacctcacagtcggacagtttgtgtatgtggtacggaagcggatcaagctcagcgctgagaaggcaatcttcatcttcgtaaagaacaccctcccaccaacagctgctctgatgtccgccatctacgaggagaacaaggacgaggacggcttcctctacatgacgtacagcggcgagaacaccttcgggctgttctgagtgggagccgctatggatccacattgggcaatgcctcctgtaaatactaaacatgcatcacaagaatctgtgtccatagcataatctggtctgtctgtcattacgcaacttgacgtgcaatgctaaacacatttaagtaataatatatactactctgctttgggatgcttcagaaattatgttaccttctgtatcctccgtgtgcctgtcgacgtgacgaagtaacatgaaggcgtctgcggtggttccacccatttagg

SEQ ID NO: 97456 - DNA, 1105 bp, Zea Mays
catatgtcacatttaacacttaaacccttccaccaccagctcaataatctttataaaaaaacccctaacaaaccatgattatatctgtgattagatcgtaatctaatgaaccagatggtttacttgcacgcttgcaaagaaggactgcttgcatagcagtcgttgccgctaagattttaactaggctatttaaaatcttatggttaattttagatgctaaaaattatgtagaaagggtcaaacatgcccttagcttggtggggcccgcaaagccaatccattcgagagcaatccaaggaaaccaagtctcgtcccacctatccccgtgggattgtgtagtgggaaggggtacgttagcgtttgcgtgcgcgtagcaactccccacgcaaagccgccgccgttccctctcgtcttccccagttcccctacgccggtcgcttctctctgttccgcgtgcgatcgagtagatcaaaaggaggaggaggatggcgaggagttcgttcaagttggagcaccccttcgaaaggaggcaagctgaggctaaccgcatcagggagaaataccctgacagaatccctgtcattgttgagaaggccgagaggagtgacatcccagacattgacaagaaaaagtaccttgttcctgccgacctcacagtcggacagtttgtgtatgtggtacggaagcggatcaagctcagcgctgagaaggcaatcttcatcttcgtaaagaacaccctcccaccaacagctgctctgatgtccgccatctacgaggagaacaaggacgaggacggcttcctctacatgacgtacagcggcgagaacaccttcgggctgttctgagtgggagccgctatggatccacattgggcaatgcctcctgtaaatactaaacatgcatcacaagaatctgtgtccatagcataatctggtctgtctgtcattacgcaacttgacgtgcaatgctaaacacatttaagtaataatatatactactctgctttgggatgcttcagaaattatgttaccttctgtatcctccgtgtgcctgtcgacgtgacgaagtaacatgaaggcgtctgcggtggttccacccatttagg

SEQ ID NO: 97457 - DNA, 930 bp, Zea Mays
acgatttgttggacattgagctcaccaatacgaataagtggacgtgcaaaacattattctagcactgttgatgtattatagacagtgtggagttaaaatgttaaatagacggtgggataggcgtgccctggtggcctcagccttaccaatttttgttatttatttttatcaaattcttaataatgcaaaactgttggctgtgggcattatccttgtgccaatgatgccttcaaagttggcaaattccggacacttacaaacgtcccaaccaagagtctgtttcttctgcaagtagccatctagaaattgattgcttactccattggtgtaatctttgcttgtacaatcttccagcattaattaattcatcagaatgaggtcttgtttatcggtacaaggcaagaccagctgcaacatttgtgtggcccctgatatgtgaattgtgattgcttgcaggtaccttgttcctgccgacctcacagtcggacagtttgtgtatgtggtacggaagcggatcaagctcagcgctgagaaggcaatcttcatcttcgtaaagaacaccctcccaccaacagctgctctgatgtccgccatctacgaggagaacaaggacgaggacggcttcctctacatgacgtacagcggcgagaacaccttcgggctgttctgagtgggagccgctatggatccacattgggcaatgcctcctgtaaatactaaacatgcatcacaagaatctgtgtccatagcataatctggtctgtctgtcattacgcaacttgacgtgcaatgctaaacacatttaagtaataatatatactactctgctttgggatgcttcagaaattatgttaccttctgtatcctccgtgtgcctgtcgacgtgacgaagtaacatgaaggcgtctgcggtggttccacccatttagg

SEQ ID NO: 97458 - DNA, 1238 bp, Zea Mays
tgccctgccctgcctggagatatgatgcatgcatctcactcactcgaggcatggcatggcatacatctctctctagtctatcctccttcagtgtcgccaataaatgcccccaacctcccgtcccgcgtcgtcgcctactcgctgcttcattcatccatccatccattcatccattgatgcgctcatcgccgtccggtcgctgccctgctgctgctgctgcttcttcttcttcttcttcttcttcttcacgcctcactctgtcgcttcttcctctgcagcgtacgtgctggtgctgcaaaaggaaaggagccgcggctccatccatccatccatccatccatgcaagtcgtcttcctgccgaccggcctgcctgcctctagtacattcgggatcgatcgaggtgggtggctaactaaagctaattaatggcgatatcctcgtgcgtgcatgcacgcaatggccgcgagctagacggggtattgacgcggttcaattcgagagctcgagccctagcagaggccagggggggtggggctctgctctctgattgagccgtgccaatatcacgtcccactcgccctcgcgcgcggacgttgccgccgcggtgtccgtccgtatcacatccgttagttctttgcctcgctgaactctgcattaattaatgtgcgtatattatatcctcaacaatttcccctctttttactgatgacgtgttccagtcaatgtgaatgaatggaaaatggacgtgtttactgatgatcgatatgagctgacaagttattctgggaaccttttattagtagaagcaaatcaatggtcacacgcaacgccatgtctggaaaccagcaaaggaaagctagctggtcataaaccgttcgtacgtgcgagggcaactgatggccactgcaaagctttgtgtgtgtgtgtgtgtaattggagttaccacagagagagcgtccaaccaaaaggacaattgtgataagctctcacgcatgccacctacccccgcgtttacatgatctcccatttcagtctcattctagtaatggttgatgccaagtccttatacatgagcatgagcatgtttggatcgtaacatcccatttcaatctcattctaataaatgatcaatgcggggtgcttatacatgatcatgagagcatgtgttggatccgctggactagttgtagcccaaccaaagtgtaggtgactaaaacttaaatagtcctatgttgttt

SEQ ID NO: 97459 - DNA, 351 bp, Zea Mays
atggcccagatgtttagattacaaacatgggcgtcttttgatattaactttcaggtcaaaggtcagttggaaaacatacctctgcatcaggccttatgtccagacgagccattgctggtgcgcgcggcgcggggcgaggatggcatcccacattggatgatgcgacaggcagggcggtacatggcggagtaccaggcgtcggctaaggggaaactcacattcagccatcgggttcggggagctcccagctgcgaggttttgaggtgggattttgacctcaaggtccaaggagatgcttatggcgtcgatgtcagacatcgagacaacaaaacggggcagcatgtggaatag

SEQ ID NO: 97460 - DNA, 783 bp, Zea Mays
atgcagcagataatcagcgcctgcaagctgcctcacacgcaacgggccgccgcgttcctgccgccgaggccatcgctcaggcgccttccagtcccaggtttagacaggccagcaggaggtgcgccgccgccgcggcgattggtggtcaggaggagatgccaggaagagaataagcagcagcaagaggccgaggagggaagcggcgctgacgagcaggagcagcagaagagaacgttcctgagcctggaggaggccgggctggtggagatgtccggactcagcacgcacgagcgcttcctctgccgcctcaccatatcgtctctgaacctcctgagagtgatctcggagcaggagggcgtcccgatagaggagctcaacgccgggcgcgtctgcgactggttcctcaaggacaagctcaagagagagcagaacgtcggcaccgccgtcttgcagtgggacgaccctggcttctagctagttccagcttcgttctgagccaatgatcatgctattctacactgcagcgcacgcaggggctatatatttcagggcttcaggcccttcacgggatgagcaaccaatgccacatgttcagtaatctcagaatttcagtttcaagaatgggcgcatcaatcctggccattccatttatatatctttcggtttggtttcatctttacaaattttctgtagcgacgaacatttttcctgtgcggaaaatgggaaaggaatttacgggtaaactgattttgggagatagatcgagtttcttgcaaataaatt

SEQ ID NO: 97461 - DNA, 1497 bp, Zea Mays
acggcccaattattttttcatctaaaatttcgccaattctgctgcaattcaccaccgtccccaattccccatctcctcgccgatccaacacaaccccaccttcacatcaagcagtacaccgtcgtgtccccgatccagccacacgagtcgacactcgacacaggcccgcgatcccctccccctcttccttctccggattcgcggcgatctagccggcggcgggcggcgcagcgatggcggggcaaaaccagcggctcaacgtcgtgccgacggtgacgatgctcggcgtcatgaaggcgcggctcgtcggcgccacccgcggtcacgcgctgttgaagaagaagtccgacgcgctcacggtccagttccgcgccatcctcaagaagatcgtcgccgccaaggagtccatgggcgagacgatgcgcgcctcctccttctccctcgccgaggccaagtacgtcgccggcgacggcgtccgtcacgtcgtcctccagtccatccgcgccgcctccgtccgcgttcgatctcaccaggagaatgtcgccggggtcaagctcccgaagttcactcacttcgtcgaccccgccgcggcatccggggggccctccaacgcgtctccgagccttacgggcctcgcccgcggcgggcagcaggtcgccgcctgccgcgccgcgcacgtcaaggccatcgaggtgctcgtcgagctcgcctcgctccagacctccttcctcacgctcgacgaggccatcaagaccaccaaccgccgcgtcaacgcgctcgagaatgtcgtgaagcccaggatcgagaacaccatcagctacatcaagggggagctcgacgaactcgagcgcgaggactttttcaggctcaagaagatccagggctacaagaagagggagatcgagcgccagatggccaacgccaggcttttcgcagaggaacagctcgccgaggatctcgcgctcaagaggggcatctccgtgggggctgcggcaaatctgctggctgctggaggggagaaggacgacgacatcatcttttgatcgcctctttccatgctcatccaatcattcaatcgccctggaaacaataagttgatgctggagctccagaactgtacctgtttatagagtgatggcgggtttttttttcagtgagtagtctggtgcctggtcatccaagaccgatgaataatctgtacttgttggggactaaagattgccaatgaactttagcacgcagtggttatgtgcagctggtgtagtaaattcaattgtgctctgttttccctgtttgtgttcattatagttgtatttatatttatttgcggggtgtgcgcggattgctgtactacacctactctgaagtcgcgaccgatgtattatttgctgttggatatggcatgctattgaggttatagctcgctatatatatatttggtttcgttgctcatctgttgctgtagtccctgggttgaatagggtcgtttcgttgtgt

SEQ ID NO: 97462 - DNA, 961 bp, Zea Mays
atggcggggcaaaaccagcggctcaacgtcgtgccgacggtgacgatgctcggcgtcatgaaggcgcggctcgtcggcgccacccgcggtcacgcgctgttgaagaagaagtccgacgcgctcacggtccagttccgcgccatcctcaagaagatcgtcgccgccaaggagtccatgggcgagacgatgcgcgcctcctccttctccctcgccgaggccaagtacgtcgccggcgacggcgtccgtcacgtcgtcctccagtccatccgcgccgcctccgtccgcgttcgatctcaccaggagaatgtcgccggggtcaagctcccgaagttcactcacttcgtcgaccccgccgcggcatccggggggccctccaacgcgtctccgagccttacgggcctcgcccgcggcgggcagcaggtcgccgcctgccgcgccgcgcacgtcaaggccatcgaggtgctcgtcgagctcgcctcgctccagacctccttcctcacgctcgacgaggccatcaagaccaccaaccgccgcgtcaacgcgctcgagaatgtcgtgaagcccaggatcgagaacaccatcagctacatcaagggggagctcgacgaactcgagcgcgaggactttttcaggctcaagaagatccagggctacaagaagagggagatcgagcgccagatggccaacgccaggcttttcgcagaggaacagctcgccgaggatctcgcgctcaagaggggcatctccgtgggggctgcggcaaatctgctggctgctggaggggagaaggacgacgacatcatcttttgatcgcctctttccatgctcatccaatcattcaatcggtgcgtagaatcatcaaagccttattctggatctggttttagaacatccacaatgtgtttcctctcatgttttttttttcttctgtgaagactgctgatgtagttgctttgattgt

SEQ ID NO: 97463 - DNA, 1434 bp, Zea Mays
gggatggcgcgtgcaccgcggccgtccgcggtacccaccctgctccgcctcctctcctcccatcccagcctctccaccgccgcccacgctgccctgctcaagtcctcctccctcaccagcgccgtcccggtcgcggccaccgccctcctcacggcgtacgcgaacgcggggcacccgggcgccgcgtcccgcctgttcgacgaaatgcccgcgccggacgccgtcgcgtggaacgcgctcctcgcctgcctcgtccgccacgggcgcgcgggggcggccgccgcggccttccacggcatgtccgtctccgcgctcccgcccacggccgccaccctctgcaccatgctcaaggcgtgcgccgcgtcgcgcgccgcccgccccggccgccagctccacgcgcggggcgtcgtctcgcgccacgccgacgccgacgtcatggtggccaccgcgctcgtcgatctctacatgagctgtggccacgtggaggacgccatgagggtgttcgtgctgacaaggtgcccgaaggacgctgccctgcacaatgccgttctctcaggatgcgtggagaacggacggttcagtgacgccttctcgacgctgaggcggcggacggagctcaatgggatctcgctgacggctgctctcacggcctgcgcggccacagcaaacctggcctacggtacgcaggtgcattgcaaggctctccgtggcgactttgattcggacaccatcacatgcaatgcgcttattgacatgtacgcaaaatgtgggagggcgacggctgcgcgcgtagtgttcgaccggatggctaccagaaacgtggtctcctggtcaagtatgatgggcgcttatagtcgccatggacatggcgttgatgctttggatttgtttaagctaatggaggaggctgcgccaacggtcctgccaaacgcaatcacattcctggcggttctgtcagcctgcggacactctggtctggtggacgaagctcagtccatgctacatttgatgaagagcaagtacgggatcgatccacagccggagcactacgcatgtgtgatagacatgctcggacgtacaggccgtgttgacgaggcttgggatctgtattctagtcttctaaccgcaagtcgaaataagccttccagcgctatcagtgtcgctatgctgaacgcgtgcagagcaaacgtggatgctgcaagaggaaaggaggtggctgtgcgcatgctggaggctgatccacgaaaccctgggattcatgtgttgatatcgaattttcatgctgctctgagacaatggcctcaatcaaatgaatcgcggaggattatagtggacaaggggctcaggaaagaagcggctagcagccatgtctgttttggctaaaagctaattgtgcacatatcttgaaaacatttgctacgataaatttggata

SEQ ID NO: 97464 - DNA, 590 bp, Zea Mays
atggcatacatggctcagcagctcgtcggccggatcacaatggaggtggcgccatcgaagctgccgtcgacgatggccaggtgtgctaggctcccgaggaacctcgacacgatcgcggaggacgacgacgacaaggaggcagcagccatggagtcgacaagggagctgcctctccgcaatgcgagccgcggcgcgcaggtcgtcgtcgtcgacgcccctgtgcactgcgccgacaagctggcctgctacctcgcccccatggcgaagacgaccgagtgcctcaagatcaaagcctaagtttgtcaggacatagagagagacgagggtgaggcactcgtctcatggagctggatttcttgctctcttgttttattgtgagcatatggcaatccgtttcgttttacgtatactgcagttgctgtcagtgttttgctcggtgtacctgatgtgcgttggtgcgtaagagtgctgtaaccaccaataaaaaaactatactagtaacgtgtgttttttaggctgttcacatcgaattaaaatcagttaaattaattgtaatctatatagacaaaacaccatagaaacaataataa

SEQ ID NO: 97465 - DNA, 1966 bp, Zea Mays
tccccacccctcgtcacctcgtcctcagcaccccaagtccccaagaccccaaccaacatttgccgaacggatcccgcccgagcccgagagctcgcgaagcccaggcccagccagacccacgaagcgatgcaacggagatagtgagatcgcgtgaagccgccgatgacctccgccgtcctcgccggccgggatgaggtccaccacggacacccgcaccaccgccactggggcggcgcccgcgcccccctcatgcccaagccatcctccaatcctaaccctaggcgctaccgcccgggaccaaaccctatcgtcagtggctcgccgccggcgccgcgggccggttcggctgtcgcggctgagcccttgccgtcgcccttaaggcacgtgaaattcaggccgtcggaactgacacccgccgaggcccgtcatctccgcgagcggctcaccggcgagcttggccgcgtccgcgctttcgtctcccgcatcgactcgtggcaggacgggcgtcgccggggcccggagcccgagccggagcctcccgcgcgccgctcttccccgccgccggcgctggtggaggcgatgcggaggcgatgtgcggatatcctgacgcggctgcggagatcgaagaaaagcgtgtggttcaattcccccgtcgacgtggagggcctcaagctgcacgactaccgcgccatcattcggagccccatggatctcggcaccgtcaagcaaaacctcaccgctggccggtacccctcgcacgaggcgttcgctggcgacgtccggctgaccttcaacaacgcgctgcggtacaaccctcccgaccaccacgtgcacaggtacgccggcgacctcctcgccacgtttgaggggatgtacaaggaggcggtctcgtggttcgagcagcagcgccagcagctcgagccgccaatgcagcttgatctgctgccaccaccaccaccaccgcaactcccagtttctgtgccagtgcaagcgcccctgaggatgtggggtgggaggaggcccaagcccaaggctaggcagccaaacaagagggagatggatgaggaggagaagcagaagctgagggtggagattgagaacctgcctgaggacaaggtgctgaatgtgctgcagattgtgcagaagaggaacagagatccagcattgtcgggggaggttgtggagcttgatttcgatgagctggatatcgagaccctatgggagcttgatcgatttgtggtcaattggaggaaagctctaaagaagagccagcggaattctaggatgaatggtgatgctgctgtgatgaatgcagatgccatcgatgcgacaattgttccggatgatgatgacagggtcgaggttgctgtcaatccgtctgtggtggttgaaattggagagtcggagactgacgttccagagaagaatgaagtggaggctgagatgggtgacgagtatgtggatatcggtgatgagatgctgacgatgaattaccagtcggtggagatccagagggattccctggccgccagcagctcaagcggaccaggaagtggctcgtcttcatcaactggtacggtggagcaaataaagttgtcaccacaaatgctgggttatggatttagtagctcgttaattcattaaaactccttgcagattcggacttggaccctgaatctgatggggataatgcaagcgccccgcactaggtggttgctcttttatctgactgtagtaggattagggacgtgtaggtgacccatttggcgagtcattttgaaggattagggacgtgcaaattgggggtcatgtaagtctttgttgtcatgtgtgttcgtttgtgtatgtgggtgcagcttaggttgtcggtacttagtgaattggtagatgcttgtgtagattgggagactgctgtaaagaagggaatataatctggaacaaagtggaaaagtagcaatgccttggc

SEQ ID NO: 97466 - DNA, 2012 bp, Zea Mays
tccccacccctcgtcacctcgtcctcagcaccccaagtccccaagaccccaaccaacatttgccgaacggatcccgcccgagcccgagagctcgcgaagcccaggcccagccagacccacgaagcgatgcaacggagatagtgagatcgcgtgaagccgccgatgacctccgccgtcctcgccggccgggatgaggtccaccacggacacccgcaccaccgccactggggcggcgcccgcgcccccctcatgcccaagccatcctccaatcctaaccctaggcgctaccgcccgggaccaaaccctatcgtcagtggctcgccgccggcgccgcgggccggttcggctgtcgcggctgagcccttgccgtcgcccttaaggcacgtgaaattcaggccgtcggaactgacacccgccgaggcccgtcatctccgcgagcggctcaccggcgagcttggccgcgtccgcgctttcgtctcccgcatcgactcgtggcaggacgggcgtcgccggggcccggagcccgagccggagcctcccgcgcgccgctcttccccgccgccggcgctggtggaggcgatgcggaggcgatgtgcggatatcctgacgcggctgcggagatcgaagaaaagcgtgtggttcaattcccccgtcgacgtggagggcctcaagctgcacgactaccgcgccatcattcggagccccatggatctcggcaccgtcaagcaaaacctcaccgctggccggtacccctcgcacgaggcgttcgctggcgacgtccggctgaccttcaacaacgcgctgcggtacaaccctcccgaccaccacgtgcacaggtacgccggcgacctcctcgccacgtttgaggggatgtacaaggaggcggtctcgtggttcgagcagcagcgccagcagctcgagccgccaatgcagcttgatctgctgccaccaccaccaccaccgcaactcccagtttctgtgccagtgcaagcgcccctgaggatgtggggtgggaggaggcccaagcccaaggctaggcagccaaacaagagggagatggatgaggaggagaagcagaagctgagggtggagattgagaacctgcctgaggacaaggtgctgaatgtgctgcagattgtgcagaagaggaacagagatccagcattgtcgggggaggttgtggagcttgatttcgatgagctggatatcgagaccctatgggagcttgatcgatttgtggtcaattggaggaaagctctaaagaagagccagcggaattctaggatgaatggtgatgctgctgtgatgaatgcagatgccatcgatgcgacaattgttccggatgatgatgacagggtcgaggttgctgtcaatccgtctgtggtggttgaaattggagagtcggagactgacgttccagagaagaatgaagtggaggctgagatgggtgacgagtatgtggatatcggtgatgagatgctgacgatgaattaccagtcggtggagatccagagggattccctggccgccagcagctcaagcggaccaggaagtggctcgtcttcatcaactgattcggacttggaccctgaatctgatggggataatgcaagcgccccgcactaggtggttgctcttttatctgactgtagtaggattagggacgtgtaggtgacccatttggcgagtcattttgaaggattagggacgtgcaaattgggggtcatgtaagtctttgttgtcatgtgtgttcgtttgtgtatgtgggtgcagcttaggttgtcggtacttagtgaattggtagatgcttgtgtagattgggagactgctgtaaagaagggaatataatctggaacaaagtggaaaagtagcaatgccttggcatttcatgtctgttgctttcttttgtaggagtatatgtttattactgctgtagccgatctattgtgcacatatgctttatcaatgttcattggatattgcaaactacatcaaaaagagtttgctggagt

SEQ ID NO: 97467 - DNA, 357 bp, Zea Mays
gttctcaccggtggagaaggcatcgtaggggccggccatgacgtgctagaggtccgccgagtccaccccaacgccggcgaggaattatagggccacagatgcacttttcattgcacccgagccatggacacagtcgttgcgccaaggcgaagcgcccaggtaatacaccgaggccccaacatggatgtatccctggatcgatatcggcggcatcactccctccttcctcctctctgttgtccgacgacacaggttttccccacggcggacggtggcggctggcagatgagggaccacggcaaccgggagggccggccgagacgcccaggccgggagcacccagagtcttcctatggc

SEQ ID NO: 97468 - DNA, 315 bp, Zea Mays
atggcaagccagcgatgcaagaactatgattctgccctgtacacagtgagatatgccttcaacactctacactcgatcgtctccagatcaccaactcactgtagaaacaagatccacctcttgacatctgaaagaaactgttcgaacacatacgacaagaacaatgagtcgacgatccgcaaagagcagatgcagacaaatctacaaatggagggtggacgaacgttgtacggcagaattgtcttagcaatacaatgtgctcacaatcttggttcagtcctgaaatggaagatggtgacatgctttaatttgtaa

SEQ ID NO: 97469 - DNA, 1056 bp, Zea Mays
atggcctccaccatcggtaacaacgaccgcctcacccagctcaaggccttcgacgacaccaaggccggcgtcaagggcctcgtcgacgagggcgttaccatcgtcccgcccatctttcatcacctgcctgaccctcacgacgccacctctaacgcccatgccgccatcccggtcatcgatctcgccgccttctcagcaaccaacaacgacgaggcccacgcccaccagcagctggtcgcccaggtcaaggcagccgccgagaccgtcggcttcttccaggtcgtcaaccacggcgtgcccgcggagctgctcccccgcatgctcgcgtcggtgaaaagcttcaacgaggagcccgccgacgagcggcggccctactacaccagggaccaggcgaggcgcgtgagtgacacggtcttcttcgaggactcggcggcgcccgaggagatgccgccggcctttagggacgtcgtgccggagtacgccaggcaggcgcgggggctggcggcgcagctgctggcgctgctgtcggaggccctgggcctgcacgcgggctacctgcagcgcgacgccggctgcctggacgggccctcgctcgccttcgcctgccactactacccgccgtgcccagagccgtggctcacgctaggcaccaccaggcactccgaccccagcttcctcacggtgctcctgcaggacgccgtgggcggcctgcaggtgctcctcggcggccgctgggtggacgtgccttcgctgcccggcgcgctcgttgttaacatcggcgacttcctccagctcatgtccaacgacaggttcaagagcgtggagcaccgggtggtggccgtgcctccaggcgccgctgcccgggtctcggtggcctgctttttcagaccctccggcgccgccacgtccaaggagtacggccccgtacccgacctcgtcaagccgccggaggccccgcgttacaggagcgtcaccggcgtagagttcctcgactactataggcagaagggtctcgacggacgatcggcgctcgaccacttcaggctgctggtctga

SEQ ID NO: 97470 - DNA, 603 bp, Zea Mays
atgaacaacatatatatcatcaacctcaatatctcacaaattcacactaataacatgaaatgtgtgtgcaactcaaaatagggataatttgtttcctaatatgctgccaatatttacaactgacaatggcatcctccgcagagaccaaccaaaaaaagttagcattccttgcagctacaggcgaatcaaacatttcttaacaggttcctcatcaatagataaaacccatctcgaagctgtttctagattattaatatgacatttgttttgcatagtctgtttctctagaaggatcactaattcatgccgcctggatgacaatgttgccagtattgattacaagttagggtataagcaaatgcattatcctgaaaatgacagttataagtggttagacgatggcccttcccaattaaatgatgatatctcaagtgttaacccaacttgttggaaaaggcaaaggactgaaggtatattccatgagtatgcatattctgataatcttgtaatgatggaagatgtgccaactgaaggttattttgctcacaaacaagagactgagttgattggtccagaagttgaaataccagaatcttgcttcag

SEQ ID NO: 97471 - DNA, 171 bp, Zea Mays
atgaaaaaatgttgtagctttgcttattcatatatgttcaagcatacacactgcaatcagagtagtacaatacctgactctggtgtctctgacgatgctgatggccatgccgacagcgaggacagcaaggctgcatgcgagttcgaaggagaggtgtgcgtagccgtctaa

SEQ ID NO: 97472 - DNA, 1258 bp, Zea Mays
gctccattcccactgccctgttgggcggccttcaaaacacagcccctcctctctctctctaagacgggaaactgcagcacatattaattagtaactagctaggtagaagaagatgagctcgtcgatcagcatgatggaggcgagaatgcctccggggttcaggttccaccccagggatgacgagctcgtgatggactacctcctacaaaagctctccggccatggccaccatgccggcgctgccatcgtcgtcgacgtcgacctcaacaagtgcgagccatgggacctcccagattccgcgtgcgtgggtgggaaggagtggtacttcttcagcctgcgcgaccgcaagtacgcgacggggcagcgcactaaccgcgccacgcactccggctactggaaggccaccggcaaggaccgcgccgtcgtcgccggcggcgaggtggcggtggggatgcgcaagacgctggtcttctaccggggccgcgcgcccagggggaagaagacggagtgggtcatgcacgagttccgcctccacccccatgccgcgccgtgcctgctagcagcagctgcgccaaacaaggaggactgggtgctatgcagggtgttctacaagagcagaacaaccagcccaaggccagaatctgaagacgcccgggacggcaccccatcagctgaaccgcaactgccggctgccctgccgcttgcgcccctcgctgacacctacgccgccccaacggttgcagagcaggtgtactgcttctccggtctgccggcactgccattcagaagaccagtgagccttggggaccttctggagttcgacgcctccgagaaggaatctgtcacgacagcgatgaccagtgtctcgaacaacactagttcagtgctggagctggctccaaattgcaactggaaccaggaaaatggcatgtcacggatgtggagcccccttgggatatgagatagatctgtgttgtttgctggatctggatgtatggagtgttagtactgagtggccagtagggttctgctgcttagatttgattagcagtgtgacttgcagattgtgtagattagattatccgttattggactaatggcttggcgtagtatttgtacatattactactgaaggaacagtgtccttatccttgtttggcgtagtatttgtacatagcacctgctaaacttcagacaatcagtgaaagacaaatgtgtacattgtaacatagtgttaagaaactctgagagttgctaa

SEQ ID NO: 97473 - DNA, 2946 bp, Zea Mays
gcacggctgcacgtcaagacctccacgaccacgactggaccgccgccgagcggcgacggcccctccctcctccattcccccgcgtccctctgccggatcctcccgtccccgccgctctccgcccgggcgcggacgttcgaaagattccttccgtgcaccttgttaactaaacaatgaggcagcagactggtaagcgtccctcccaacacagggaatatgaaagagaagaaaggaaggaccaacacaagaggccgtttccccgtgctcaggaaagctctaataatgatgggctggttctttaccgtatactctgtccagacagtttgattggtagtgtcataggaaagcatggcaatgtgataaatgctatcaggcatcagacaagtgccaaagtcaaggttgttgacccgtaccccggtgcagacaaaagggttatcttggtatattgctacgtcaagcatagagaccttgatgctgagggtgatgacaatgagcctgtttgtgcagctcaagatgcattacttagggtgcataatgcaattgttgatgcactgcagacattacataagaatcataaagactctgataagaagagcacagaggaagctaacattcttgtgccagctagtcaggcatcaaatgttataggaaaatctggtgctgtcatcaagcatcttcggtcaacatcaagagcattcattaaagtgagcccaaaagatccaagtgaccctacacattcatgtgctatgagttttgataattttgttcagataactggtggtgctgaagctgttaaaaaagcactgtttggagtatcaaccatcatttacaagcacccatcaaaagagaacattcctcttgaaacttcaattcctgatcctactccaagcattataatcccttcagaacttcctgtctatcctgctagtaacttttactcggccccagatgctgctataccttctgtacatccaagcatgtctgtcttagggtcaacacgtcatgttcccgaacttgctgtacctgccgatgatcatggtcggctgcctatttatcaatctattcttccagttattcctacttatagtgccccaaaatgttcaggagaacttgagtttcgtgttttatgccctggtggaaaaattggcttggttattggaagaggtggggctaccataaagaatataaggcaagagagtggtgcaaggatagatgttgatgatgcaaagaatgacaaggaggaaagtatcattaccattatatccactgagtccaccgatgatgttaagtctgccgctgtggaagctgttttgctgcttcaagccaagatcaatgattctgaggatgatagaatgaatcttcgccttcttgtgccaaataaggttataggctgtcttattggcaggggtggttcaatagtcaatgacatgaggaagaagactaaggcaaacatcctcatttcgaagggcgataagccccggagagcatcttccagtgatgaacttgttgaggtatctggagaagcagacaagctgcgtgatgctcttgttcagataattttaagacttagggaagccgttctgaaagagagtgttgaaagccaaaattctgacagggatggccaactaactgttgctgcctctgattccttatatggaagcagtcttcctttgcctgcattattacctcacaaccaacaaattgcccccttgggctatgatagaagaggtgaacctgagcgagctctggaagtattccctcgtaccagttcgtatgggtatagttccatgcaggtcacggatgatggctatggaggacttccatcctatgcatcaaaggcatatgaagaacatgtaccacgtttggaaatgactgtacctgctagtggcatctcaaaagtaatgggaaaacatggcacaaacttggacaacattagaaagatttctggagctcacattgaaattattgaaccaaaatcctctcgtcatgagcatattgcttacatatctggaacctctgaacagaggcattcggctgagaatttgatcaaagctttcataatgtctacctaagattccttctgtggtctgagaacaccatttcatcaatttgatctcttttgacttctgctatccatagtttccctgggtttgtgaacatcaaacgtagtgttttctcccacctgtccgagttcccaatgaatactgggcatatctgagcaaggtgtactccagtggtagacaaggcactctatgttccttagatcttcaactgttacctatttatgttggcatacttatcataattcgcgtgtcttactctaaattatctcaatgactggaccagttgctgcttactgatatctctttctattgtcctgccaatactgagttgattattccttcacaactacagtagaggggcctgtttctcaacctcaacgtctgattcactttctgcttagtgtagctcttataatttcatcccatcagactgctatctgattcattaggttagtagtaccaatgccctatttggaatttggaatgcgagaatgaacctttcacgaaaggcttgtccaaaactccttgagattcctgtgtttcaaacactctttggaattcccagtgaatgctgttggctgattcatttggtgcttattgagtttttgtatctctactctgcctatgctgctagctgtgaccttagagaggatcttgttccttgtcaatctgactagttcacccattgcttgcttcggtagttcggttcttatatctttgtcatgtcattaccttactctttcatcatcggttccaaagagttgcttgtttttctgctaactctgctgaggaaccataagttctttgtaaacttgcctgaaaaccctagaggcctagacttttaggagcaaccatgtacataagcttagtcacgttcttggat

SEQ ID NO: 97474 - DNA, 2062 bp, Zea Mays
atgatcctgtcacggtggctcaaatgcactgctgaatggttcaggcacagtaaggatttatcgcgggaagttccttcttgcaactactccgtactcgcttcagttcaccatgatgactcaagcggtgatgaaaggctgaattatgcttctgataatgagcctatccagaaacagcagaagtctttgagctcttacagtgttgtgcaggctctccgctgcctaaggaggaagcctgcagttgcatttgcctactttaaagatatacatagccttggttttaaccatgacttctcaacctactcagagatcatacaaattttatcccattcattccaggggaagatgttggtatccttgttttgtgagattctttcgggaactgctaatggtgacccagaaatcttaacacttattggtcacttgagcaaaacttgtgccacttctcacatactctcatatgcagtcaattgcttaatcaaggcatacactaacagccacgacgtacaagaaacagtagagatgttttgtcacctttgcaggcttggatttgttcctacactttgggcttgcagtttccttatcaaatttgtatcccagagtggtgattcagatatggttgttagagcttatgatcaaatgaagtgctttcagttgatgctggatactcaatcattgaacatagtcattaggtcgttttttgaagtaaataaggcagaagaatcatttcaagtgtgggttaggatgattgaaatgggaatgaaacctgatgcacatggatactcatcatttataattggcctttgtgattgtggaaagtacgatctagcttataacatggtaagcaaatacactgttcttcatgagatcacccaggaaagggttgcaattgagtccatcgcttataatatggtaattgatggactatgcaaagaaatgaaactggaggaggctgaaaaagtcttggacatcaagaccagacatggatctacccctgatctatatggttatagctatctcattcgtagttattgcaaaatgggtaacttagaaaaggtgtggcattatattgaagccatggtatcccatggcatcgagataaattgttacattgttggttaccttctacagtgcctcaagaagctaggcatgatatctgaagttattgttcacttccagaaatttagagatctaggactccatcttgacggcgttctttataacattgctatggatgcttattgcaagcttgggaacatgaatgaggcagttaagctactaactgaaatgatggcgggaggtttggtcccagacaaaatccactatacatgcctgatcaatggttattgtctgaaaggagaaatggaaaatgcctggcaagtatttgagcagatgctgaaggaaaatgtaaaaccagatgtagtaacatataacatattggccagtgggtatagcaggaatggcactgttattaaggtatatgaccttcttgagcacatgatgaatcaagggttggagcctaattcactcacctatggtgtagctattactagtttttgtagaggaggcaacttgagcgaagcagaggtattatttaatatagtagaagaaaaagggatagataatattgaactgctgtacagttctatggtttgtggttatttgcactcgggctggactgaccatgctcacgcactttttcttagagttgctaaacaaggaaatatggtggatcaattttcatgttcaaaattgataaatggcctctgcatagatgaaaaggttgaggaggcttcaaccgtgtgtagtatgatgctggaaaagaatgttattcctgatgtaatttcatatagcaaacttatttcagcttattgtcagaacagagatatgcacaatgctcacttatggttccttgatatggatgaaagaggactttctgatgtcattgtatacactatactgatgaatggttatgcaaggttggtcggttgcagaagcatgtgacttatttgttcaaatgataaatttaggatcaagccctgatgtagttgcatacacagtgcta

SEQ ID NO: 97475 - DNA, 1922 bp, Zea Mays
cagcgaccaaacccgggcacctcgtctagctcgccttccatttcgtcccttcctattcatactaccttctacgagtttgagcagccatggcggcaacaacaccactgcttgctgtggctggacatggagtatcctacaaaccagcaaatgctaaagacagctactactgcttcaaatttgcatcatcggcaagaacaagagtcaccctcccacagatcatccactggtagtacttacaatacattatatatcatactactagctacttgtttaatttgtgtgacttattacaataacggagttgttgtattttaggtgtatatatttttagatggttttataggacaagctcatgcaagtatatatagcccaacggataattcacgaactataattcctaatttttttaagagtcaaataatgaaaaaaactacttgttgtatgcgtagctaggattttttcatgaggtatgccataagaacttcaagtttacctaaaaaatcttttaaaaaactaaacatcatggatcaaaattgcagagaaaaagttagggtttgctacaaattcaccatctcttcctgtaagctcagggctaaggtctaagagggactggaggagagccgaacaacagcgctcactagcggcgatggtgggggcatgccgcgcacctgccaccttgttgttgcttttatttttgtgatgatcttccatcaggtggcggcttgactgctggtctcccactctcatataccctatggactattggtgtcgtattgtctctagactggtggtgcaggagcagtcatagcagcacggggaccacgaccatggccgtccctgtcctcaagcggcgggagaagcaggacgaagagcaggaatggatggggtacctggccccggagaagctggaggtgctagcacacctggagccgtgggcggaggcgcacgtgctgccgctgctgaagcccgcggaggaggcgtggcagccgtcggacatgctcccggacccggcggcgctgggcgacgagggcttccacgacgcgtgccgcgagctccgcgcgcgggcggccagcgtgcccgacgcccacctggtgtgcctggtgggcaacatgatcactgaggaggccctgcccacgtaccagagcgtgcctaaccgcttcgaggccgtgcgcgacctcaccggcgccgactccaccgcctgggcgcgctggatccgcggctggtccgccgaggagaaccgccacggcgacgccctcagccactacatgtacctctcgggccgcgtcgacatgcgccaggtcgaccgcaccgtgcaccgcctcatcgcctccggcatggccatgaacgccgccaggagcccctaccacggcttcatctacgtcgctttccaggagcgcgccaccgccatctcgcacggcaacatggcgcggcacgtcggcgcgcacggcgaccacgtgctcgcccgcgtatgcggcgccatcatggccgacgagaagcgccacgagaccgcatacacccgcatcgtcgccaagctcttcgaggtcgacccggacgcggccgtgcgcgcgctcggctacatgatgcgccaccggatcaccatgccggcagcgctcatgaccgacggccgcgacgcccacctctacgcccactacgccgccgccgcgcagcagaccggcgtgtacactgcgtctgactaccgaagcatcctggagcacctcatacggcagtggcgcgtggaggagctcgcggcggggctctccggcgaggggaggcgcgcgcgggactacgtgtgcgggctgccgcacaagatccggaggatggaggagaaggcccatgacagggcggcccagacccagaaaaagcccacgtctgtcccgtttagctggatcttcgatagatccgtcaatgtcgtgattccgtaa

SEQ ID NO: 97476 - DNA, 1466 bp, Zea Mays
cagcgaccaaacccgggcacctcgtctagctcgccttccatttcgtcccttcctattcatactaccttctacgagtttgagcagccatggcggcaacaacaccactgcttgctgtggctggacatggagtatcctacaaaccagcaaatgctaaagacagctactactgcttcaaatttgcatcatcggcaagaacaagagtcaccctcccacagatcatccactggaggtgcaggagcagtcatagcagcacggggaccacgaccatggccgtccctgtcctcaagcggcgggagaagcaggacgaagagcaggaatggatggggtacctggccccggagaagctggaggtgctagcacacctggagccgtgggcggaggcgcacgtgctgccgctgctgaagcccgcggaggaggcgtggcagccgtcggacatgctcccggacccggcggcgctgggcgacgagggcttccacgacgcgtgccgcgagctccgcgcgcgggcggccagcgtgcccgacgcccacctggtgtgcctggtgggcaacatgatcactgaggaggccctgcccacgtaccagagcgtgcctaaccgcttcgaggccgtgcgcgacctcaccggcgccgactccaccgcctgggcgcgctggatccgcggctggtccgccgaggagaaccgccacggcgacgccctcagccactacatgtacctctcgggccgcgtcgacatgcgccaggtcgaccgcaccgtgcaccgcctcatcgcctccggcatggccatgaacgccgccaggagcccctaccacggcttcatctacgtcgctttccaggagcgcgccaccgccatctcgcacggcaacatggcgcggcacgtcggcgcgcacggcgaccacgtgctcgcccgcgtatgcggcgccatcatggccgacgagaagcgccacgagaccgcatacacccgcatcgtcgccaagctcttcgaggtcgacccggacgcggccgtgcgcgcgctcggctacatgatgcgccaccggatcaccatgccggcagcgctcatgaccgacggccgcgacgcccacctctacgcccactacgccgccgccgcgcagcagaccggcgtgtacactgcgtctgactaccgaagcatcctggagcacctcatacggcagtggcgcgtggaggagctcgcggcggggctctccggcgaggggaggcgcgcgcgggactacgtgtgcgggctgccgcacaagatccggaggatggaggagaaggcccatgacagggcggcccagacccagaaaaagcccacgtctgtcccgtttagctggatcttcgatagatccgtcaatgtcgtgattccgtaattttcctcaaaaaaaattgagaatcaggttatgcttagaggtgcattcactgttgtgtggattatccttgcaataaaaaaacaacgccttgcgggtgaattctgc

SEQ ID NO: 97477 - DNA, 3076 bp, Zea Mays
ctttataaaaaggcaacgaacccctccaaagcaacgctgaactcctgtatcgaagtttttgatgacctgagcccgttgacttggtggattggagaaggcagcagcacatcactatctggttcttgtgttcttgctgcaatcagtcgagattcaggctgctttggatatacttgcaatccttgacaggattattaaggatttggaaggatcctagggaatagttgaatcaataattttggggggaaattaccctcatccctccagaatggagaacaagtcagatgaccttcagcacgagcatggtatgcccgatcagacgtctcgtcccttcacttcactcttactgtcggcaacatctgtcgcccaagcagcacaacaagataccggttctgacatcaaatcgcttagtctgctgcatggaagtagcttactcccacctgatgatggttacatctggaaggcgcgcgcgcagaacattgttccaggctgtgaatatcccaccatgtattacaagtgcgcccaggacaactgcaacacaaataaattggtggtatgctctgctgatggtcatcaggttcttgagacggttcttagtggttgccacaaccacccacgtcagcaagattgtgatctacccatacccaaggtatcaaaaacggatacttcaatgcctgtgtccagagagggagatgatgagcaactttcaagttcaagtgatagcgatgaagatgatgttgaccaagcaagagttgaaggtgatggcagtgtaactagacatgtgccacatccagctgaaaggatcactgcacaaactggaactgcaaattctcaccgacatgctggtagaagaagaccgaagtccaaggtgtgggaagaattcagtgctgtgttaagagatgacaaaattcaatgggccgaatgtaagcactgtaaaatgagccttggtggaacaagcacaggaagaacaacccatctgcggcggcatcttaagatctgtccagcgctacctgcaactgatcggatgcagaaacagaggtcatctccacatcctggttccaccattgagagcatctggaagttcgatcaagacagatctcttgaattgctcatcaaggttttagtgtccaaccttttctcctctccattgacaagcagcacaacttttagacagctatgggctggcatctgccctactaatgatgtgttatcggacgctgctattgaagagaagtttctcagtatttttgagaatgaaaagcttaagcttaaggaggaaatagcacttgcacctggcggagtttttctgacagctgcaagcagttctcttgaaactaagaacttcatctttttgaccgtgcacttcattgataaagaatggaacttgaataggaaaatcattagatgttgctttacggggtgtgaagactttgatgctgagtattttgttagcatgtttccgaatttgcaatcatgccacaatttcattaatgggaatgtgagagcagctgaagaagaaatagtgaaagaggcagtacaaaattggaggcttgagtggaagcttctaggaatttcatcacgtaagtcattagctgatgctgctgtactggctcttgagaagaatcttacagaacagaactatcttcttgccaaatgtaagttgttgaatctcccctgcataatagatgccctaaatgacctttttggttatgaaatcaatgaatatgtactaagtacaagtaagatgtggtttcagtacatgacatgcaccccactacgtagggataaatacaaagaaatcctgtcacgcctgcaaataaaccgaccttcttttggttcgcagagatggtacttaactttccactcattggaagctgctttgcagtttaacaatgagctgccagaccctcaacagatagactccagatattatccagctaagccatcttttgcacagctaaaagcagcagagaacttttgtgatcttgtaagggcgatttaccatgcagtaaaagtagtttccagaacttgcaatggggccttgaattcacaatttcacgcaatttggaacttgaagatggctctgctccgttcatctacaaaggaaaacatcgaccaagtttttaatattgaacaaatgaagctgaaatttgaccagctttggaggaaatggtacctatggctgtcgttagctgttgttctagatcccagatataaattcaggtttcttcttgtttgctttaaggaagcctttggtagtcatgccaaaaggtacatctttgaagtgcgaggaaagctgtatgagctctttcttcagtactcttgtcatgttgatcaacaaaatagtgacagctttgatcagagaaccaatgatttacagttggatacacatggtagcacaccagtgcatgccacaagtcaaaatttcattgagcaagcagcacatgaggaactgggagaagtcattagataccttgaagcagagcttattcctcaaaatgccaattttgatattttgaaatggtggaaggaaaatgctttgacatatccagctcttgccaggctggcttgcgacatcttagcaattcctggatctgcggtctctgctgaatctgcatttgatgaaactgatgaacgggtgggacttttcaatctgaagctgagtcctgaattagttgaggccctcgtctgcacccaggattggatcaaatcttcagaaataatttctgacgaagttggtggaaatataaatatgcctgcctagtgcacagcaagctccctcggccgtttcattggttcaataaaaaaatgaagagccctttagaccttctcagtataatgcgtgacggagtctaattggcaatgcttgttttgttgtgctattcagcgtgcaaaatatgaacaatattagtcttttattaagtcaattttgcagtacatggctgaaatatggaatgtgtactatgtgaatggctgaaatatattaaaaaaaacttcaaaacccaataattgtttttgctgacggatcagatttgaggtgagatgtgccatatatatttatctttgaagaacgtaataa

SEQ ID NO: 97478 - DNA, 1561 bp, Zea Mays
ggctgctattcatatacaagtgaaagcgatatatatttatatagttggtgctactagctccgcacctcaaaatcaaaaccgaggttgcctgcctagctccgactactggaactgatcatcttcttcgtcgggtcggcgccgcgcgcgtggataacaatgatggagacggaggaggagcagcagcagcgctctacgcggcgttggcaacggctccagcgagcggcctccgtggaggagctggtggtgcctgcgggtgcagacgcagcagcaggcggcggtgacgacgacgaccttgaggtgacaagggatcctacggtggtcaggggctggcgacggttgaaggccgtgtccatggtggtcttcagcggcggcgcccgacccaacaccaccaccaccaccaccacgacgacggaaatggagccgctgtatccagcccatgagcctcgaagtgacacagatatcaggttgagaagcccccagcggaaggcacgtgaggtagaagaagccagcgtggtactcaagagtccacaccgaaagaccgctgttgcagctcaggtatcaacgcaggtacaacagccctcgctacctccgcaacagcctgacgaggtcggaaccaaaaattcagcagcggaggttgtaatggacgtcatatcaccgaaaaccactcaggtgggcgttgtccatggcaacccagtcgacgatgacaaggaacagcgggcgcggtacctcaaatactcgcagaaggcgctcggcttcgccgtctgcacgtttgtcgggtacgcaagcaacgcatcgtccaccggaagcgcggccttcaagatggccgccgcgcccttcttcgtggccatcatcgccgacctcctgacgctgaagacgaaggcgaagcacggctgcgccctgatctacctgtcgtcgttccacctgatcctcatgacgtacctcatcttcatcgcgttcgacatggcccacgcctacgccgtcctcttcctgccgctggtcgcctccgcctcccacctccagcagaagctgtggccgccgccgccgcgtgacgacgggagcgccgacgacaggagcaaggccgttagcaaggacctggacagcatcctagagctgtcctctctgatcctcaactggagcagcttcgtcagcgcgatcatgaccgtggtcaggcactttcatcactgctgctggcaaggacaatgacgagatcgcgcccgaggctgtagggctcctgttcttcctcaccatcgttctcgggatctatctcatgctggccaccactgtgagagctccggcgctcaatctccctaccaagtacctcgacgtcctgctcatctgccttctcctcagcactcttatcgccaccgtcatgacgtttagtggtgcaaattggacgggaaagcagtcctctaccggcgggtcaacctaggtgtcttgctgtttcagcgtgttcatatatgtttcattcaatatttacgcctcttattactcacctgcgatgcaaagaaatgctgtctcgatccgtctccagtccaaataatcgaacttccagagtcgtctc

SEQ ID NO: 97479 - DNA, 267 bp, Zea Mays
gtgctcgccgagtgttatcggttgtacctcaacactcgtgcttgtcgctggcttgcgctaacgctcatgcgcctgctcgttgtcactgcgtcgcactcgctcttcgtccatcgggcttcacgcgtgctcgcgttagtcgtcgagctgttgaacccgtcctcccttgcacgtgacttcgtcatcgccagagccctcactggattcgtgtcctcgccagctcgctctagacactatctcgtcgtcgttccatgcgtcatcaagaaatcc

SEQ ID NO: 97480 - DNA, 342 bp, Zea Mays
atgccagaaccagaggataatattgagtcactagctaacggggctcaatttgaaagtcaggagacaacaatggtgcaagtagagactcaggtacaagacaaaactgacgacaataaaaaaatggtaattaatgtggaagagaaggagaaagagaaagtcgagaggagggagatggcttcaaggtctgagatgtggcaacattttatcaagatcaaggatgacaaagggtctctaagggctggaaggtgcaaatattgccatcgtgaaatcaaggctgacacaagggggcatggaacatctgcgttgaagaaacactttggtacatgcaaacgcaatcctcat

SEQ ID NO: 97481 - DNA, 1513 bp, Zea Mays
atctgaagcaccctgttcgcaaaacctctcctgctcctgccgccgccgccatggagagtgcgccgcaaacccccaccatggcggccgccggcgatgtccttcgcgtggccgacctcccgggacgaggtcgcggtctcgtggccgcccgcaacgtccgcgagggtgaggtgctcctctccgagcctcccgtcctcctctacccgtcgaccctctcctccctccgctcatactgctccgcctgcttccgctccctcccccccgccgccacgattccctgcgtttcctgccgcgccgctgccttctgctccccggcctgcgccgccgcttcgcacccgcacctcctctgtgccgcgctctcccacggcggcggcgctggcctcgccgccgccgctcccaccgaggcgatccaagagccgctcctcttccttctctccgcctactccctcccggagtcaaccatgcgctccatgctctctctctcctcggcgccgcccccgcccccgggcgcgcaggacgccgcggggctccatgctgctgtggcagccctagcgccgccgcacatgcttccccagggattgtcgccagacctaacggcggctctcctcgccaaggaccggggcaacagcttcgccatcatggagccgtaccgacacgggatgtcgctcgagctcctgaaggcgcgggcctacgcagtctacccccgtgcttcgctgttcaaccatgactgcctgcccaatgcgtgccatttcgattaccccgacaggcctgggccagggaacactgacattgtggtgcgtgcactccatgacatacccgaggggagggaggtctgcatcagctactttgcggctaattggaggtatgctgataggcagcgcaggctgctggaggattatgggttccggtgcgagtgtgatcgctgtcaggtggagagtcagtggaaggatgatgatgataacaatggagatgatggggatgacaccatggaagaggagggtgaggatgatgttggagatagaggtgatgatgggattgaggaggaagagggggatggtgctaccaatggcggtgatgatgatttcccacatgcctacttctttgtcaggtacttatgtgacaatgagggttgttggggtatgcttgctccattgccaccctcaccaaacggcgacctgtcccatgtgtttgaatgcaatctctgtgggaagctgaggaaggaagaggatgtcattcctgatgagggcacttctggcatggtccattagtttgatgaaaacatactgatccgtgtgctgcttcttttagtggagctcttggtgaaggaagcctgttaattccttggctgttcggcagaaagggcatgggttcgattcatctggacgttggaattgttcatgtaataccatgtaggcaaaaccttagcttactattcttagaaatctaatttggttgtagatttttttcgtgactcaaatctgggaaggaaaacttggataggtgagcctgagttcgg

SEQ ID NO: 97482 - DNA, 1566 bp, Zea Mays
cttctatctctctatctctacagtctacacaaatcatatttccccagcgtacaccttctgtctgctggattactgtggatttgaccatcgtacggcagcccacatcgctgcttctcccccggtcggttactgtagcaccaaagtttgatcttgccggggtttggaggaggtgaaaggttggggttttcttggtcctgggaatctgtccaggttcgtctctctatgtgaagattctgagaggttggctgtgagtcaagattttcggctcggcggtggcgaatcctctgctcctgactccgatttgggtattctcgttcttgattcctgactcttggcccgaaacttctgttctgttcttgccgaaatcgaagggaaacagctccattctggttgcaagttctttgtaaagattcgaggtggcattcagatttcggttacctgtgcttgtgctgttggttttgcttcgaaaatttgctgtttgggtagaccaaggttactgacggcctccgccgccgcagatgtgcggatttgagatggaatcgcagtgagagggttgaagagttgttcctgtccctgattctggtggcttagtttctggtgctctgtttggcaacttaagcgcttccattttcggttcatgcaagggtcgctttcggccatcggggagctctcagccgtgaggttttgaggtgggattgtgtcattgtgacctcaaggttgaaggagatgcttatggcgtcgatgtcagatagcgagacgaccaaccgaggcagcatgtgggaactggatcagaaccttgatcagcccatggacgaggaggccagtcaactgaagaacatgtacaaagaaaagaaattttcgtcaattttgttactgcggctcgcgtttcaaagtcttggggtagtgtttggggacttaggtacatcaccattgtatgttttctacaatatctttccacatggtgttgacgaagacgaggatgtaattggagctctatccttgatcatttacacactcaccctcatccctctgatgaagtatgtttttgtcgtcttgcgagctaacgacaatggtcaaggtggcacgtttgctctttattctctactgtgccggcatgcaaaggtcagcactatacccaaccaacataagacagatgaagaattaacaacttatagtcggcaaacttatgaggagaattcacttgcagcaaaagtgaagaaatggctagaggggcatgcatataaaaagaactgccttcttattcttgttctcattggtacctgtaccgccatcggagatgggattcttactcctgcaatctcaggtattcagaatcgtagttgaataaatccaatgcagctgcgatctaagctgtattttgtatgttatatgcagttctttctgcggcaggtggaataagggtccagaatcagaacatgagtacaggtatatttttttcttttctgtatggttatatctgtgttcattgttgaatctggtggactatttccttgatctggtgaggagcataacttactttgcctaatctgattagtctaatatctt

SEQ ID NO: 97483 - DNA, 3310 bp, Zea Mays
atcatatttccccagcgtacaccttctgtctgctggattactgtggatttgaccatcgtacggcagcccacatcgctgcttctcccccggtcggttactgtagcaccaaagtttgatcttgccggggtttggaggaggtgaaaggttggggttttcttggtcctgggaatctgtccaggttcgtctctctatgtgaagattctgagaggttggctgtgagtcaagattttcggctcggcggtggcgaatcctctgctcctgactccgatttgggtattctcgttcttgattcctgactcttggcccgaaacttctgttctgttcttgccgaaatcgaagggaaacagctccattctggttgcaagttctttgtaaagattcgaggtggcattcagatttcggttacctgtgcttgtgctgttggttttgcttcgaaaatttgctgtttgggtagaccaaggttactgacggcctccgccgccgcagatgtgcggatttgagatggaatcgcagtgagagggttgaagagttgttcctgtccctgattctggtggcttagtttctggtgctctgtttggcaacttaagcgcttccattttcggttcatgcaagggtcgctttcggccatcggggagctctcagccgtgaggttttgaggtgggattgtgtcattgtgacctcaaggttgaaggagatgcttatggcgtcgatgtcagatagcgagacgaccaaccgaggcagcatgtgggaactggatcagaaccttgatcagcccatggacgaggaggccagtcaactgaagaacatgtacaaagaaaagaaattttcgtcaattttgttactgcggctcgcgtttcaaagtcttggggtagtgtttggggacttaggtacatcaccattgtatgttttctacaatatctttccacatggtgttgacgaagacgaggatgtaattggagctctatccttgatcatttacacactcaccctcatccctctgatgaagtatgtttttgtcgtcttgcgagctaacgacaatggtcaaggtggcacgtttgctctttattctctactgtgccggcatgcaaaggtcagcactatacccaaccaacataagacagatgaagaattaacaacttatagtcggcaaacttatgaggagaattcacttgcagcaaaagtgaagaaatggctagaggggcatgcatataaaaagaactgccttcttattcttgttctcattggtacctgtaccgccatcggagatgggattcttactcctgcaatctcagttctttctgcggcaggtggaataagggtccagaatcagaacatgagtacagatgtggtcgtaatcgtcgcggtgtttatattaattggcttattctgcatgcaacactatgggacagataaagttgggtggctctttgcacctttggtgctcctttggtttattctaatcgggagcgttgggttagtgaacatacgcaaatacaacagttctgttctaaaagcatacaatccagtctacatcttccggtattttagacgaggcaagtctgagatttggacatctcttggaggagtcatgcttagcatcacagggactgaagcattgtatgcagatctatgtcacttccctgtattggctattcagtttgcgttcaccttagtggtgttcccctgccttctactggcgtacactgggcaggctgcctacatcattgacaacaaggatcatgtagttgatgccttctaccgctccattccagaggccatatactggccagccttcatcatagcaactcttgcggcagtagttgcaagtcaagcaaccatatctgctacctactcgataattaagcaagcccttgcactgggctgtttcccccgtgtcaatgttgtgcatacctcgaagaaatttctggggcagatttacatccctgacatcaattgggtacttatgattctttgcattgctgtaactgctggattcaagaatcaaagccagataggaaatgcatatggcactgcagtggtgattgttatgctagttacaacatttctcatggtcccagtgatgctgctggtatggaaaagccactggatacttgttgtcatcttcctcgtgctctccttgacggttgagctcccatacttcacggcgtgcataaataaagtggatcaaggtggctgggttccactagtcatcgcaataaccttcttcgtcatcatgcacgtgtggcatttctgcactgtgaagcgctacgaatttgagatgcacagcaaggtctccatggcgtggattctggggctagggccgagccttggccttgtcagggtccctgggataggcttcgtgtacacagagctggcgagtggcgtcccgcacatcttctcccatttcgtcaccaacctccctgccatccactcggtggttgtctttgtctgcgtcaagtacctcccggtctacacggtgccagccgaggaacgattcatcatgaagaggatcgggccaaagaactaccacatgttccgctgcgtcgcaaggtatggatacaaggacatccacaagaaagacgacaacttcgagaagatgctcctggacaggctcttgatcttcgtcaggctggagagcatgatggacggctactccgactccgaggacctcaccgtgatggagcacaaggccaagaggtccaccagatcacttcagctgatcgagaaggctgggggtaataacacgatgagctccaccggtgacctgagctactcatcgtcgcaggactccattgttttggccaagtcacccctgacagggaacagcctgacgagatactcaagccagacacccggcgacgagctggagttcctgaaccgaagcaaggatgccggcgtcgtgcacttcctcgggaacaccgtcgtgcaggcgcgcagggactcggggatcttgaagaaggtcgccgtgaattatgtgtatgccttccttcggaagatgtgcagggagaacagtgtgatcttcaacgttccacatgaaagcctcctgaatgtagggcagatatactatatatgaatatttttgttttagattcttctgttcggactcgaagtgaacattgtacatggtgatcagtcctagagtaaagcttttagtcaggtctgcggcttttagtcagttctgcgactttcttgagcacatagattactggtattgccattggcacattctcgatgaggcttgctgactgctgtatccgaatgccatttctcccaactgtcaaccattgctgctgctgctgctgcatacatc

SEQ ID NO: 97484 - DNA, 2239 bp, Zea Mays
cagaaaagggacgggaaggtgccaataaattgcgaggatgccgctttatctcttctcctctcccgccgccgccaagctcgccaccggcccacacgcgtccctgcaccggcggcgccagttcctcttccgagttccccaccgccccagccgccgcgccccactgctaacttcggcggctgagcgtccagcagggcgcaccatggctactgcggataccggagcgtccacggtgaccgattcgaggctccgagctacaggagtgaagcaagcactgatatcattgtcagataaaacagacctggctaatcttggaaatggtcttcagcgtttggggttttctattatttccactggtggcacggcatcaagtttggaagcatctggtgttaatgttacaaaagttgaagaaattacacagtttcctgaaatgcttgatggaagagtaaaaacattgcaccccagtatacatggtggtattcttgcgcgaagagaccaggagcaccatctgaaagcactgaaagagcatggcattgggacatttgatgtggttgtagtgaatttgtatccattctatgataaggtcacctcaggtgcaatatcttttgaggatggcattgaaaatattgatattggtgggcctacattgatccgagctgctgccaagaatcataaggacgttcttgtcgttgttgatcataaagactatcctgctctactggaatatctagaagggaaacaagatgaccctgatttccgcaggacacttgcatggaaagcattccaacatgttgcttcctatgattctgctatctcggagtggttgtggaagcaatctaataaagcagattcatttcctcccagctttactgtgcccctcacaatgaagtctacacttcgctatggtgagaatcctcatcaaaaggctgccttttatggtgacaggagtctttctctagtaaatgctggcggtattgcaacagcaattcagcaccatggaaaggaaatgtcctacaacaactatctggacgcggacgctgcgtggaactgcgtctcggagtttgagagcccgacttgcgtcgtggttaagcacacaaatccgtgtggcgtagcgtctcggcacgacatcctggaagcgtacaggttggctgtgagggcagaccccgtgagcgcgttcggaggcatagtcgccttcaacacgacggtcgacgaggatctcgcgagggagatccgggagttcaggaggccgacggacggcgagacgaggatgttctacgagatcgtggtggcgcctgggtacacggcggagggcctggaggtgctgaaagggaagtcgaagacgctgaggatactggaggcgaagcggaggaggagcgggaagggcacgctgctgtcgctgcggcaggtcggcggcggctggctggcccaggagcccgacgacgtgaccccggaggacgtggccttcacgaacgtgtccgagagggctcccgacgcccgtgagctctcggacgccaagttcgcgtgcctctgcgtcaagcacgtgaagagcaacgccattgtgatcgccaagaacagttgcatgctgggcatgggcagtggccagccgaaccggctggagagcctgaggatcgctttcaggaaggcaggggaggaggccaagggagctgctttggccagcgacgccttcttcccgttcgcttggaacgacgcggtggaggaggcgtgccagcgcggcgtggcggtgatcgcagagcccggcggcagcatccgggaccaggacgccgtggagtgctgcaacaagtacggggtggccctcgtcttcaccggcgtccggcacttcaggcactgatcgacggcgacggtggcagcggagaccgtgacgacggacgatgggagggacctctatatagctgcgtcgatctggccggtggctggaaggaaggatctggcgtttcatcccagcgctgatgccggctggcgtttcttggctactagggagactctgatggtgctgatacaaccaaatgtcgcctctcgagaggatgggtcggtgggtcccggtttgtatatatgacgtcgtcagcctggcaagaggttgattgagcttaatactaactcttgcggtggatggaaatcggaaacggtcgctgaccggtgggatcgcacagtctgctgctagaagcatgcaaaggctacatgccgtgttattattgttattaatatttattgctgtcacgttaca

SEQ ID NO: 97485 - DNA, 781 bp, Zea Mays
acgcgtcgccgctcttgcatgcgcgcgccgtccacggtccaccgccggccgcgcgcccggccgcgcctatatctgcgagccaacaagcaggcagggtcatccagcatacgatctgacgctcatcccacatcagtagtcgaccaagcacaagcagcagagccggccggaatatgtggacgatcaggaaggtggcgacgccgcaggtggccgtcctcctgctgctcctcatcgtcgttgcgcaggaggcggcgccgttggcggaggcgcgcgtgtgccggcgccggagcgcgggcttcaagggggtctgcatgtccgaccacaactgcgcgcaggtgtgcttgcaggagggctacggcggcggcaactgcgacggcatcatgcgccagtgcaagtgcatcagggagtgctagctagctaggctctaggatctagcaagctagctatatcggcctttaattaaattaataaggatcgacgtcgtggccggtcgctaaatatgtactactatacgtctacactacatgcaataatgcaccacatgtacgcgtacgcgcgccgagctgtgtggacgccgcagctagcatgcacggccatcgttcctatacgtcgtcgtctgtcgttcgagtactcatgagctgtgtcgtcgacgtccacccatgcatccggccgccacgctttgatgatggtcatgacatcttgacaataaacacgtgcatgcagtattatatacatgtcctgatgttcgtatactcttatcgaaaaatttaagagcgacaacagt

SEQ ID NO: 97486 - DNA, 1706 bp, Zea Mays
agttgttgctgctggaacttgctccttggaagcaacagcttggtcagatcacgcatagattctgacaacgacctgaaaaggattttccaactatgaaatgctgtggttgtgcaggctgcgttgagcggcgtcttaaccttgaagaaaagagatagattgtttgcaaggcaatgcaattcaagctgcttggcgcggtgcatttcatcatgttaaaatacccccaaatccaacgaccaaatagtgagctcagttcatgtatgcagatgagcgccaagaccattgtggcagcagcagctgctgcatttcttttctatactcacctctacttcccaaccgctgctcatctctactcctcaaccactccgttggctggaaccctctttgatctcacaatgcctcccccattgtacccactttcggctgattccacctctatccatcatcagtatggctgtagatacaacccgctgtgcgatgacttcccaccggatttccccccggccgacacgccagcactgtcgatcttctgcgtcgaccccaatggctgctgtgacttcacgaccgtgcaggcggcagtcaatgcggtcccgaaccacagcagcaagaggaatgttgtgtggatcaacaggggcatctactttgagaaggtgacagtcccggcatccaagcccaacatcacattccaggggcaggggttccacctgacagcgatcgcgtggaacgatactgccaagtccgcgaacgggacattctacagcgcctcagtctctgttttcgcatcaggattcatcggcaagaacataagcttcattaatgtagcaccgattccgaggcccggtgctgtcgatgcacaggcagtggcaatcaggatcaatggtgaccaagcagcattctggggttgtggcttctttggagcgcaagacacactccatgacgacagaggccgacattacttcaaggaatgtttcatccagggctccattgactttatctttggagatgctaggtcactctatgaaaattgcagattgatatccattgcagatccagtgccttcagggcaaagatcaattactggttcagtcactgcacatgcccgggaatcagaagatgacaacactggctactcatttgtcaattgtagcataggtggcaccggttccatatggcttggacgagcatggagaccatattctcgggtcatctttgcctacacatcaatgtcagacatcatagcttctgaaggatggaatgactggaatgaccaaacaagagatcagactgtattttatggagagtacaagtgtacaggtgatggtgcaaacctggcagatagagtgccttatgctcagaagcttagtgatgtgcaagtgttaccttacctaaacacatctttcatcgatggagatcaatggttaaaaccatactgtgactcactaatatctgcttgaagcaattctaggtaaagacagacttgaaacagagaaaatagaacatctcattgtttgatttttcttacatcatagttcatagaatcaagaattacaattgttcaaagataataaatatttggtacatttgctgttttcaaaaaaaattattacacaaaagcatgtcataatctacattcgaaaggcagatacacattaatgctaggggagaaaggaggcaacttcaggtgttgcgttacaatatttgatccttgc

SEQ ID NO: 97487 - DNA, 99 bp, Zea Mays
caatgtacgcgatattgtgtgtggatgcagatgagagaatataagcaaaataaattatttaaaagatataaaatattctgtatttgcatgcttttttag

SEQ ID NO: 97488 - DNA, 858 bp, Zea Mays
atgcactgggatgggagacaatgtcctaaaattcagggtggggttgttaggataaactgcattatggattctggcaacagttcgtgctctagaacacgaagtgggcttgtaaggaaaaaagacacatttgctctcagtagatcttcatgttcaagaactcgaagtggacttctaagagtaaagagctctgtggattccagtgatgtttcgagttccagaactcgaagtggccttctaaggataaagagctttctggattcccatgatggttcattttcgaggtcacaaagtgaccatgtaggaggtagccctcctattgttgaggctataaatgatgaatcagttttgaaggagtctcctgatagattgatgaaagaagagatgcctgttacaactccaaatgggcttgttagacagagctttactgaacaggctgtaaccaaggacaagtcaggcatgaggacacttctcgatggatgtttgagtgaagatatgccttctagaacacggagtggacttgtcagaagaagccctactgttaagactctaagcaaggacaaatcagtcattaaggggctggcagatgggtgtctgaaagaagacaagcctcttggaacacgaagtggccttgtgagtggaagccttgctgccaaggttccaatcaaggctgaagtactcacaaaggggcagcatgatagatggctgaaaaatgacaaggctgctgcaatgcggagtgaccatggtggcagaagattggctgccaagactgtaagcgaggacaaaagaggcgttgagggtttgcctgatggatggcaaaaagaatacagacccaggaagaatggtccatgttcagatccg

SEQ ID NO: 97489 - DNA, 2500 bp, Zea Mays
atggaaccggcctggtcgatatcgtttctggctcgggtcggtagcgcccagcgctgcagcccgactgaaggttttagtttgagtgatgtcagtggatatgaattccgctctttgaaggatgtgcacaactatcttgaaactggagatattagccaatgcgctgtgacaccaaagaagagcaccatctgcgaagatataacagaaagtcaaactcatactagtacatcaccgcagcacatgaggcctggtactgcgaataagggtattcagtgtgaaatattaacttcggatggtatcatggcgccatgggaggataatggaaatgatactgaacataccatgttaccagagcctgagagcttgaaagcaactcaagggtatggcaacaagcttgaaacttcagaacccacgagggttcaaccggtttctccacataatggttcaagacaaaccaaatctgttaaaaggaaagaatcaaatgcagaggtcaaatccaagaagcgtaaaaccagttctgctgtgactcgtgttcgagcgtcgccccgcttagctgcattaaatgctcatcttgatgtaagcatcgaacatgaagatgacatggttagcacaaatcatgtggactgggtacagactattgaagagagagccatcgatcaggcacagaaaagccaatcaggctcttttgatcagatacatggtaatctggaaagcactttcagtcagttacagttgagccaagcagaccctgctaatggaatgcaggttatacaggcaaacactaccattcattcacaaccaagccaattggatactctgagtcctacacagaaaaaacaggaaaacagttccaaacagttacaatctgtggtcacagattcttcgattccaaaacgaaccacacagaaatgcactatagatcagccaagccagccagacataaatcatatacgcacagatcaggaattcactgggaatcagttcccctcgagcctaccagttgacactgttatttcattaggggatactgaagaattcacagcgggtcactcacagccaagaaatagtgacactgcaggacaaattcaggccaatgaggaaaatactgccgatcaagtacagttgagcctggcagagacagtcattctggtaccggctattcaagaatatgctgctggttattcactgctgagcaaagctgacactactgatcaaacacaggccaatcaggaatacattgctgatcaagtacaatcgtgcctaacagacgcactcattccagtaaaagctattgaggaatacacaactgattattcacatattagtaaagctgacattacaaatcaaatacaggtcaatcaggaaagcactgatgatcacttatatttacgtcaagtagactgtctcgctgaaatgcagataattgagcaaaatttgtccaagcaacctcagctgagccaaccagacactggggatcaaatacgaattgatctggaaagcactaccaatcacttgcaaccaaactacgatgaaaattctatgctgcaatctggtttctcttgggctcctgaacagaacagaggagcccctactacagatttctggaaaaatgttgaaagtcaggcgtcatcggtttccatgccaataaatggagcgcctctttcaagctttccagcaaatgtcagattccaaaatgcagcagcagcagcagcagcagcagaacctgctttgccaccacaggttgctccaaccgaaacaggttccgatcagtctgggttggccttccaatcccttttcggaaacatctggtcagatccttgcatcgagtttgctttcaagacccttacaggcgacattcctgttctcgacgacacaacggctgtcacagactacttcccagagcaacaagacttgaataaagacccagcgccaaactgtgcaggctctgtgtttgacagttcaagaaaccacacacaagtcgacgtcaaccttccaccgcctgctccggatggtttctacgatggcagctggttccctccccaatgaatttgagtgcagggaggggaaaaatgcaataacattttgtacctgtgaaaaggcaaatcagagaaggctagtggccgaaacataaaagcaatagtcgcactcttgttagggctctgatctgaatgtctaatcccacaggacacattttgtaaaaaggcggtagcttctttagccttattagactgttaatacactcaactgaatgatgtccagttccatcaacaaggcttcaccgagactgtcgagtgactgatcaggatcatgttttttttttcacgttttgcttctgtgcagttgcctaataaacccattcgttgtaaacaagccagttctaactttaaaaaaaagggcctgtgcatggcgctctaggttattgtgcagatggaactgttcttgatattttgaacacgcaaatgtagaggctttgctgtcacagttcttcagcggaattgcgaag

SEQ ID NO: 97490 - DNA, 1724 bp, Zea Mays
ttcttctctcggcgtcttcgaacttcctggtttccccaaaatacccctctcttaaaccctccgccgccgccctctctcctccgccgtagccgcagccgcagccatgcgccgcttcctccaagccctccgtccgctccaaaacctacccctcaaccccgctcccggtatccccacccctctccgcatcctctccacctcctcggcggccgcgtcctcggagtctgactctgcccccgccgcggccccgacccccgctgccgatgccgacttcgacagctccgactacgccctcccgaccccgggccccgccccctcccgaaaaatcaacaaccccgtcgcggcgctgaggaagctccggttcgacccctccctccgcgcgcgcgccgacgaggcgctttttggtaagggacttggcgcggcggccgtcgaggagcaggatgaggagcactcgcgggacgtggcgctcgcgctgctcgatgcggcgctggagccgcccgacgaggacgaagatgatctcggggaggtcaaggaagaagaccagatgtcgctttccgttggcattgtcggcgcgcccaacgccggcaagtcctcgctcacaaataccatggttgggacaaaagtggctgcagtttcccgcaagacaaatactacgactcacgaaattttgggggtgctaacaaaagggaacacacagatttgcttttttgacaccccagggctcatgttagggcaccatggatttccttatagggatgtcacagttcgtgtggagagtgcctggagctcaattaacctatatgatttactaatagtcatgttcgatgtcaataggcatcttaatttgcctgattcacgtgttataaagttaatcaaacgttttggtacagaggtgaacccaaaccagcggcgaatattgtgcatgaataaggttgacctggtggaagacaagaaggacctccttaaagttgcaaaagaatttgaagatcttcctggatatgaaaggtacttcatggtatctgggctaaaaggcaagggggtgaaagaccttatacagtacttgatggaccaggcagtaagaagaccttgggatgaagaaccaactgtaatgactgaagaggtaatgaaaaccatatcattggaggttgtgcgggagaagatgctgcatcacatccaccaagaaatcccctatgtaattgagcatcgtctgatgggctggaaggagctaaaagatggttctcttagggtggagcagcacttcattgccccaaagcaaagccaacgtcagattcttgttggtaaaaatggctctaagatagggagaatcggtattgaggccaatgaagaactgaggtccatattcaagagagatgtccatctaatcctccaagttagagttgcgaagaagagaagtgcttgaacagattttttttagtgcctgtatagactgctagtgatatgggaagtgcagttcagtgttggcacaatgtattaacgagaatggttagtaagtggtgcttgggtgcatcagttccggggactgagttgatagaactttggattgaggatctaatggaggcactgagctgtacgggtgtgtggagccaagatttctgaagaaaggatatattggcggcaattcacatgccagtagtgacaaggaaacggcttgcggcatgtagcccttctctttccaggtctcagcctgtattttctgtaggttattt

SEQ ID NO: 97491 - DNA, 2056 bp, Zea Mays
ttcttctctcggcgtcttcgaacttcctggtttccccaaaatacccctctcttaaaccctccgccgccgccctctctcctccgccgtagccgcagccgcagccatgcgccgcttcctccaagccctccgtccgctccaaaacctacccctcaaccccgctcccggtatccccacccctctccgcatcctctccacctcctcggcggccgcgtcctcggagtctgactctgcccccgccgcggccccgacccccgctgccgatgccgacttcgacagctccgactacgccctcccgaccccgggccccgccccctcccgaaaaatcaacaaccccgtcgcggcgctgaggaagctccggttcgacccctccctccgcgcgcgcgccgacgaggcgctttttggtaagggacttggcgcggcggccgtcgaggagcaggatgaggagcactcgcgggacgtggcgctcgcgctgctcgatgcggcgctggagccgcccgacgaggacgaagatgatctcggggaggtcaaggaagaagaccagatgtcgctttccgttggcattgtcggcgcgcccaacgccggcaagtcctcgctcacaaataccatggttgggacaaaagtggctgcagtttcccgcaagacaaatactacgactcacgaaattttgggggtgctaacaaaagggaacacacagatttgcttttttgacaccccagggctcatgttagggcaccatggatttccttatagggatgtcacagttcgtgtggagagtgcctggagctcaattaacctatatgatttactaatagtcatgttcgatgtcaataggcatcttaatttgcctgattcacgtgttataaagttaatcaaacgttttggtacagaggtgaacccaaaccagcggcgaatattgtgcatgaataaggttgacctggtggaagacaagaaggacctccttaaagttgcaaaagaatttgaagatcttcctggatatgaaaggtacttcatggtatctgggctaaaaggcaagggggtgaaagaccttatacagtacttgatggaccaggcagtaagaagaccttgggatgaagaaccaactgtaatgactgaagaggtaatgaaaaccatatcattggaggttgtgcgggagaagatgctgcatcacatccaccaagaaatcccctatgtaattgagcatcgtctgatgggctggaaggagctaaaagatggttctcttagggtggagcagcacttcattgccccaaagcaaagccaacgtcagattcttgttggtaaaaatggctctaagatagggagaatcggtattgaggccaatgaagaactgaggtccatattcaagagagatgtccatctaatcctccaagttagagttgcgaagaagagaagtgcttgaacagattttttttagtgcctgtatagactgctagtgatatgggaagtgcagttcagtgttggcacaatgtattaacgagaatggttagtaagtggtgcttgggtgcatcagttccggggactgagttgatagaactttggattgaggatctaatggaggcactgagctgtacgggtgtgtggagccaagatttctgaagaaaggatatattggcggcaattcacatgccagtagtgacaaggaaacggcttgcggcatggtgagctgccgcacctcctggcgaatcttgtttttgtgatacttgataatatagatacgtctatgctagaccactgacacccttttttacctactttctgattcgaaaagtagcccttctctttccaggtctcagcctgtattttctgtaggttatttaaacagtgttgtaataataatctgatgtccgggcatgccccgtcttgaggacgtctagaggacgttctcgaaggcaaagtttgctgctgatcttccagtgttctgagcactacaaattccaggatggaatctggtgatctaccttgtaaagtgcacgaacgttgtgcaagggaaatctatcacttgcggcccttttgttgggtttgatgattttattctgtc

SEQ ID NO: 97492 - DNA, 1671 bp, Zea Mays
aaaatacccctctcttaaaccctccgccgccgccctctctcctccgccgtcgaggagcaggatgaggagcactcgcgggacgtggcgctcgcgctgctcgatgcggcgctggagccgcccgacgaggacgaagatgatctcggggaggtcaaggaagaagaccagatgtcgctttccgttggcattgtcggcgcgcccaacgccggcaagtcctcgctcacaaataccatggttgggacaaaagtggctgcagtttcccgcaagacaaatactacgactcacgaaattttgggggtgctaacaaaagggaacacacagatttgcttttttgacaccccagggctcatgttagggcaccatggatttccttatagggatgtcacagttcgtgtggagagtgcctggagctcaattaacctatatgatttactaatagtcatgttcgatgtcaataggcatcttaatttgcctgattcacgtgttataaagttaatcaaacgttttggtacagaggtgaacccaaaccagcggcgaatattgtgcatgaataaggttgacctggtggaagacaagaaggacctccttaaagttgcaaaagaatttgaagatcttcctggatatgaaaggtacttcatggtatctgggctaaaaggcaagggggtgaaagaccttatacagtacttgatggaccaggcagtaagaagaccttgggatgaagaaccaactgtaatgactgaagaggtaatgaaaaccatatcattggaggttgtgcgggagaagatgctgcatcacatccaccaagaaatcccctatgtaattgagcatcgtctgatgggctggaaggagctaaaagatggttctcttagggtggagcagcacttcattgccccaaagcaaagccaacgtcagattcttgttggtaaaaatggctctaagatagggagaatcggtattgaggccaatgaagaactgaggtccatattcaagagagatgtccatctaatcctccaagttagagttgcgaagaagagaagtgcttgaacagattgtgattttttagtgcctgtatagactgctagtgatatgggaagtgcagttcagtgttggcacaatgtattaacgagaatggttagtaagtggtgcttgggtgcatcagttccggggactgagttgatagaactttggattgaggatctaatggaggcactgagctgtacgggtgtgtggagccaagatttctgaagaaaggatatattggcggcaattcacatgccagtagtgacaaggaaacggcttgcggcatggtgagctgccgcacctcctggcgaatcttgtttttgtgatacttgataatatagatacgtctatgctagaccactgacacccttttttacctactttctgattcgaaaagtagcccttctctttccaggtctcagcctgtattttctgtaggttatttaaacagtgttgtaataataatctgatgtccgggcatgccccgtcttgaggacgtctagaggacgttctcgaaggcaaagtttgctgctgatcttccagtgttctgagcactacaaattccaggatggaatctggtgatctaccttgtaaagtgcacgaacgttgtgcaagggaaatctatcacttgcggcccttttgttgggtttgatg

SEQ ID NO: 97493 - DNA, 477 bp, Zea Mays
atggggcatatatacatggcacaagatcgatttgagatttttagtgaagcagccttgcgcctgcccattgcccagccccccaactacagccagctacaagagatcctcctctattattctgcattcactagtgattttgggagtttatataacataccgttattttcttacaggttctacaacagcagcagtacatcatttctgctcagttctgttcgatcagttcagttctgctcagttctgttcagccactcggttgatacattttctggttacaagccattcactgatgcagcacttcagcaatcagttctgttcatcagtacatcatttctgctcagttctgttcgatcagttcagttctgcttagttctgttcagccactcggttgatacattttctggttacaagccattcactgatgcagcacttcagcaatcaggaagaggagctagaagcaaggaccagattgcttga

SEQ ID NO: 97494 - DNA, 523 bp, Zea Mays
tattattattattattattattatttacacgtatacaacgattattatttgacggtttctgaaaaaaatgatttggtgctacgtaccaatgatgagatcaaagggcgggatctcgagaggcttggtgggcaggccgaccatgatcatcttgccgttgggcttgagcaggcccatgtacggggccaaggtgaggttcgccgacaccgtgttgatgatgccgtccatggtgctcgcagccgccttcatttcttcggcgtccttgctgacgacgaaggcgtcggcgccaagccggtcgagcgcctcctgcttcttcccaggcgacgtgctgatgaccgtgaccttggccccgaacgccttggcgaacttgacggcgacgtggcccaggcctcccagccccatcacgccgacgtgcttccccggcacgttcaggccgtggtacttcatggggctgtacactgtgatgcccgcgcacagcagcggcgccccccgatccagcggcatcgcgtcggggaaccggaccacg

SEQ ID NO: 97495 - DNA, 453 bp, Zea Mays
atttggtgctacgtaccaatgatgagatcaaagggcgggatctcgagaggcttggtgggcaggccgaccatgatcatcttgccgttgggcttgagcaggcccatgtacggggccaaggtgaggttcgccgacaccgtgttgatgatgccgtccatggtgctcgcagccgccttcatttcttcggcgtccttgctgacgacgaaggcgtcggcgccaagccggtcgagcgcctcctgcttcttcccaggcgacgtgctgatgaccgtgaccttggccccgaacgccttggcgaacttgacggcgacgtggcccaggcctcccagccccatcacgccgacgtgcttccccggcacgttcaggccgtggtacttcatggggctgtacactgtgatgcccgcgcacagcagcggcgccccccgatccagcggcatcgcgtcggggaaccggaccacg

SEQ ID NO: 97496 - DNA, 834 bp, Zea Mays
atgatgacccttggtcgcgctgagctggagtccctgcagctgctgctcggtgacgtggaaggagaaggacaccatgtcatgggtggtcgggaccacccagtgatcgccgacgggggccgcggtggccttgaccgacggcgggaccgtcacgctggtaggtggggccgacggcggcacggcgagtgggtctcgcagggttggcgccggggccttgttgccgccgaggacctgcgcccactttctgaagctggcaacggcggaggggatgtcgccgatgaggtgcgcccacgtgaagccgagggccatccccccacacttgaagctggtgacctgcacgtagagcagcggcgagaagaagagctccggcccgatcaccttgtcgtaggccagcgccttgcacagcccgccgcgctccgcctccgcctccagccactgctccacggtggcgccgcaggtgacctccacgatgcgcacgccgcagtcgttgcaccgcacgtagggccgccccaccgccgccgcggcggcctcttcgccctcggccgcttgacgccgccggagccggccgctgacggggaagtacatgtccagccacgggaacatgggctctttcagctcccggatggtgagcggaggcgctgcgacgccggtcggcgcgcggaacacgtgcaccgcgcgtacgtaatgcagcttgtggagcaagtcggcgtccgcgagctcgtagttcacctcctccccggtcaccgagctcggcaccacggtcgaaagctggtggccgtgcacggccatgctgctgccggtgccggccacgccgacggccgccagcgtgctccctga

SEQ ID NO: 97497 - DNA, 2640 bp, Zea Mays
tgccccgtcccctcgtccccgtctcggtctcaaaagcctcgcacaccagtgcaccaccaccacgggccacggcaccatctccagactcccgaggggaccatcaccgccgcctgcccttccttctcccacctgcaccgccgcctccaattcccgcccgccccactgccattgtgcgcccccggaatggcgtcacgcggaggagatccggtaaaccaactctagctgaagtgacgagtggcagcattgttcaaccgtgcggcttctgcttggctggaattgtgatggatccagaaaaacaaaatgaaatgagcttgatggacaagagacaactagtatacgaagttgcaagatggccgcaaggtgccgtggagattcttaagtgctggactcgaagggaacttcttgagcttatctgtgttgagttgggcaaagagaggaagtataccaatgtcccaaaagctaagatgatcgcttatctcttgaaattagtttcacgaaagagtggaaagaatgggcaactcaaggatgataatgcaaatgttatgttattagagcaggataacaaagatgaaacacaaatgaaggaatctgaggaacaagaacaatcacgaccactcaaaactgcaaactctgactcatcaatacgtagagaggctcatgcctgttgttcagtggtgtgcagcaatgttgcatgccaagccacacggaatgcaggagataattattgcaaacgttgctcttgctgcatttgcaataaatatgatgataacaaagaccctagcttgtggttggtttgcagctctgataatccatacagtggttgttcatgtggtgtctcttgtcacctaaactgtgctctaaagaataaaaaggctggcattgtcaataatggctgcaacaagttagactgtagtttctactgtgttagctgtgggaaaatcaactggctaatgaggagtttgcagaaacaacttgcaattgctagggaggcaagaagagttgatgtgctttgtgagaggctgtcattgagccataaaatggtaaaaggatctgaacgttataaggaaataacgagcataatcagctcagctgcgaaaacacttgaaaaagaagttggtggtgcattagatcaggtttctgcgatcacggggcgtggcattgttaaccggcttacttgtggtgctgaagttcagaagctttgttcaagtgcattagaaattgtagactctacagtggatagcatcttggagttcgagtcaaataatagtccaaaactcttaggtccccagccccaaatcctttttgatgaaatcactccattttctgtggtaattgtgttgaactatcaggatagcatcggtaaggagcaggttgatggttccaaagtttggcaccgaagtgccaaggtttgcaactattcatcggagcccacatgccacatattgaggccaaatactaggagcctggtttctggtctgagcccttcaactgaatacttcttcaaggttttgccttttagcagcgtacaggggtttactgagtgggaggcaaaatgcagtacacgcagcctggaccatggcagcagccagtgctcaactcagaactctgagagcatgtgcctcaaagtggatccaatgcagcatcagaaaaaggatttgaatgtgcagaatcatcagagaactattcaatatgattcacctaaggggtctacaaattcaagtgagaacaatttattgtgtgaccggtattccaagcgggctaaggttgcaaggctagatggtgcaagtgacaatgatgaaagccagttgccgccaacttctgaagttttaccgtttgcaagctccaactactctccttccgaagctccaagtaaacctgacttgcttattggcaccccagattcggcatccaagaactatgtggagcagcagtacgagtactgtgtgaaggtggtcagatggttggagcatgaagggcacatggacaatgacttccgtgtgaagttcctcacttggttcagtctgaaggcaacagcgcaggacaggcgaatcgttggcgccttagtagatgttcttatcggtgatcctgcaagcttggttgcccaactggttgatgcattcaaggatatcatctacaccaaggagaagccctttcaaacacaacagaaggatgcacgctgcaagatttggcactagaaaccttcataactgctctgtgtcgctgtgtgacatcatttttctggtaattttctggcgactgaatgatgaactactgaagttatatcacctagcagattgcgtgcggattctgttgagatggatattgtgcactctcttaaaggttataagatgctgtagatgcttcatttggcattcaggtccatcagatctctcatttgttcattcaaattcagtcggtaggcagactattaatccatgaagacaatcatggtggaaccatgtgctggtaatcatgaatcggttctgagtttaggtttcgactagtaagtagttgaagcttgttagcagacaagcaactgtattcatatgtggaatgctatggtggatctgcaagctaactattgtgaattcatatcatgacttaagagatgtttattattattagttgacttattttttt

SEQ ID NO: 97498 - DNA, 1217 bp, Zea Mays
aaaaccgcttaaattaaagaaaaaactgtgcttgcacacaatactagttgttcgttcccaccgcaagcaaagcattttcagccgccccaccgcagcagcagagaagaggccgccgccgccgcgaccaagagccgatggatccgaagatgacagaggtgacccagatgttcgcccgcttcaaggcggcctacacccgcaacgacctcgacgcctgcgtcaccctcctctcacagctcaaggtccatctcaccaaattccccagccttccgccctcatttgagcagacacctaaagccgtggaggagctcaaacttgcaagggacatttatgagcatgctgttgtttttgagtgtgaaacttgaggaccaagatgcatttgaacgtgatttctgtcagctaaagccttattacatggatacatgtggcataattcccccctcaccagaggagtacccaattttgggactcaatcttctgaggctgttggttcagaatagaattgctgagttccatactgagctggagcttttacctgtcaaggcacttgagcacccttgcatcaagcatgctgtagagcttgagcaatccttcatggagggtgcctacaaccgagtgttaagcgctcggcaagctgtgccacatgagacctatgtttacttcatggaccttctcgccaagacagttagagatgagatcgctgggtgcagcgaaaaggggtatgattccctatctgtaagtgatgcaaaacaaatgcttatgttcagttctgaccaagatctgcacgagtacatcacagaggagcacccggaatgggagcttaagaacggtgccgtcttcttccagaaggcaaaggagtcacagccctacaaggagatcccatccttgcagctcatcaaccagacgctcagctatgcgagggagctggagcgtattgtatgatttaatttcacagtaatccctggttgatgtttatttctgtggtcacttggcatggcatgtactgtcctttacatttgagatcagctctgatcgcagctcatgtcagctctgatcaatctctgaagggcttgatctctgcggcattgtttcaccacattaactgcattgcttgaaagatgcctgtcatccattgctgctgttaacttttgatgggcttaatattgaattattacatcgaaattgcactgattgtctttttttatttaaaaaaagacaaa

SEQ ID NO: 97499 - DNA, 1101 bp, Zea Mays
ttgttcgttcccaccgcaagcaaagcattttcagccgccccaccgcagcagcagagaagaggccgccgccgccgcgaccaagagccgatggatccgaagatgacagaggtgacccagatgttcgcccgcttcaaggcggcctacacccgcaacgacctcgacgcctgcgtcaccctcctctcacagctcaaggtccatctcaccaaattccccagccttccgccctcatttgagcagacacctaaagccgtggaggagctcaaacttgcaagggacatttatgagcatgctgttgtttttgagtgtgaaacttgaggaccaagatgcatttgaacgtgatttctgtcagctaaagccttattacatggatacatgtggcataattcccccctcaccagaggagtacccaattttgggactcaatcttctgaggctgttggttcagaatagaattgctgagttccatactgagctggagcttttacctgtcaaggcacttgagcacccttgcatcaagcatgctgtagagcttgagcaatccttcatggagggtgcctacaaccgagtgttaagcgctcggcaagctgtgccacatgagacctatgtttacttcatggaccttctcgccaagacagttagagatgagatcgctgggtgcagcgaaaaggggtatgattccctatctgtaagtgatgcaaaacaaatgcttatgttcagttctgaccaagatctgcacgagtacatcacagaggagcacccggaatgggagcttaagaacggtgccgtcttcttccagaaggcaaaggagtcacagccctacaaggagatcccatccttgcagctcatcaaccagacgctcagctatgcgagggagctggagcgtattgtatgatttaatttcacagtaatccctggttgatgtttatttctgtggtcacttggcatggcatgtactgtcctttacatttgagatcagctctgatcgcagctcatgtcagctctgatcaatctctgaagggcttgatctctgcggcattgtttcaccacattaactgcattgcttgaaagatgcctgtcatccattgctgctgttaacttttg

SEQ ID NO: 97500 - DNA, 758 bp, Zea Mays
ggcataatgcaagttccatggatgcttcaaatgttagatatgtcctaagacttagtaaagtgactgagttaagctcaactatgttctttgattaaggacgcaattcttcccatggttgtggctccagtcacgataggataaagaagaagacacagttaaacaccattctcgataggatagctaccacattggctagtacaagagctacataagatagctatgtgattgacaaactttataagataaattatggacttctttatattttatgatatatttttcaattacttagttatttcctagtttgttataagtatggaatattataatggtgaaaattatgtcagccatcacgaataatgttacgccatggtcaatttggcaacaaatcatatatatctacaatgtcacagcagtttaaaacaaacgactttcaacttttcagcaacagacagctaactacagccttttcacagtacacaacagaaagcaacttttctcacagcaaacagcacaaccaaaagcaccttttatagagtatttcatttattcatggtagattaactctgcagcaactattcatcttgcaaactctctacaagggttccatacaagccaaaggcttccaagtggccagaacaattagaatagccaacgaaattgaaggggcgtccaaagccattgaacatttacctctatcattagatgatggttttgtattgtttcttacatatgtcttatttctaacttgatttcag

SEQ ID NO: 97501 - DNA, 236 bp, Zea Mays
ttttggtccagtttgattctgtccatccgcttccatcctacaaaaccgaccctatctataaaacagatcatatctctaaaaccaaccctatccacaaaatagatcctatctctacaaccgaccctatccacaaaacagatcctatctctaaacccgaccctatccacaaaacagatcatgtatctaaaccaaccatatccacaaaacaaatcctatctctaaaactgaccctgtgc

SEQ ID NO: 97502 - DNA, 1093 bp, Zea Mays
agggttttgggtccacaattccgcattgccatctagtccagttccagtccgagcagcagcaagcggcggcggcgatgggctctggatccaactccaaggagggagaggagcgggtgctgagccacggtgacgtggtgctcatccgctccgacctcgcaatccttcgcggtccctgcttcatcaacgaccgcatcattgccttctacttcgcacacctctccgccagcctccaggacgacgacctcctcctgcttccgccctccatcccctacctcctctccaacctccctgactcggccgccgtcgccgccgtcgccgagccgctccgcctcgcctcccgccgcctcgtgctgcttcctgtcaacgacaatcccgatgcctccatcgccgagggcggttcccactggaccctcctcatccttgataacatcactagcccctccgtgccccgctttgtccaccacgacagcatcgctggagcgcccaacctcccaatcgctgcccgcctcgccgacgcactccgccccctgctgtcaggcagcaattccaagagggatactgttccgcttatcgaggggcccaccccaaggcagaccaacggctatgactgtggtgtctatgtcatggccatcgccagggctctgtgcgcctggtggaagagtggccaggaccaacgaggaggcgattggttccaggcggtgaggagcggggtggacgcccacagcgtcgaggccatgaggaccgacttgctgcagctaatcagcactctcatccaagagaaggccaatgccaattccacacccatgggcgacactgacccagggtcattagaatgataggcagtagattagttgctggtggtgatttctcaaatctggtacctcttcttgatcttaataagttatttcttgctgtttctgcttgtttgggaagaggaggaacagatggagcatacacacttcgtgtaagtaccaaacttttaaggaaaacacgtctcttgtgtgagtcaagtcttggcaaaatccagttgcaactctactattattattgtctatgatcaaaatgctgcaatcaatactgtgcttccgtttgc

SEQ ID NO: 97503 - DNA, 1047 bp, Zea Mays
tgcattgcttccaccagtacatacagctgcaacagagtagaggactatgtgaaccctcccgttcttccattactctctttacttgctcagttcattggctatgtgaatgcccttccccggattactatgatttgtttggtttattgtgggagtttgtaattttcactagaaaacagttcagtttgtatacgaagtattggtctactactctcttaagttccataaatccctggttcagggaagatgcaacctcatgagaaggttgctgttctgaagcctgttgcctccaggcctttctccagcttctggcccttcccaaagtttctgcacgacttcaacgccacttgttccccaacaatcaccttcccacaggagactgagctaatcaggccaaaagccactcggttggcatcgctgccgggtgaccttccaacacagattgcagcaacgacagatgccgggtcggataccatgtctgaggaggtggaagggtatgcaaaacatcacacgtatcgtgaccatgcaacagcgtgccaagctgcgaggcggaatggtgagcgcagtcgcctgtcacttgacgggtacagctggaggaaatacgggcaaaagaaagtgaaaggcagcgagttcccgcggagctactacaagtgcactcaccctagctgccctgtgaagaggaaggtggagacgacgccagatggccaggttgctgagatcgtgtatagtggtgagcacaaccacctgaagccgggcaagccttgtcccccgaggaagccattgctgtcgacaagcacagatgctgtgatgtgtgacacgcatggtattgacgacatgacgccgccggagtagagacgaagacaaccaggagttcagattcttcgttccagtacttaaatctagctaagctgctggtttcacaattccattaaagattgctgcctttacttttctttattttgtttacaactccaagtcactcttacagttgtcataccagctgtttgattcatcattcatacacatcaatggcaattgcatgctctctga

SEQ ID NO: 97504 - DNA, 894 bp, Zea Mays
gtctctatttctccccctacaaacaagcaaatgagctactgctatggttacaaattcatgaattgtcccctgttttcaggttcagggaagatgcaacctcatgagaaggttgctgttctgaagcctgttgcctccaggcctttctccagcttctggcccttcccaaagtttctgcacgacttcaacgccacttgttccccaacaatcaccttcccacaggagactgagctaatcaggccaaaagccactcggttggcatcgctgccgggtgaccttccaacacagattgcagcaacgacagatgccgggtcggataccatgtctgaggaggtggaagggtatgcaaaacatcacacgtatcgtgaccatgcaacagcgtgccaagctgcgaggcggaatggtgagcgcagtcgcctgtcacttgacgggtacagctggaggaaatacgggcaaaagaaagtgaaaggcagcgagttcccgcggagctactacaagtgcactcaccctagctgccctgtgaagaggaaggtggagacgacgccagatggccaggttgctgagatcgtgtatagtggtgagcacaaccacctgaagccgggcaagccttgtcccccgaggaagccattgctgtcgacaagcacagatgctgtgatgtgtgacacgcatggtattgacgacatgacgccgccggagtagagacgaagacaaccaggagttcagattcttcgttccagtacttaaatctagctaagctgctggtttcacaattccattaaagattgctgcctttacttttctttattttgtttacaactccaagtcactcttacagttgtcataccagctgtttgattcatcattcatacacatcaatggcaattgcatgctctctga

SEQ ID NO: 97505 - DNA, 1296 bp, Zea Mays
cgctggacccaccgacgcccgcggacagaacgtccaggaacccgacgcggacgggccgccgaaacgcgaggtcgaaccgccggacacgggacgggcgggaccctgccaagtcaacagtcagacctagcctcccttgccgcgtcccgcgtgggccaggctcctccaacccgccggcgccgccccgccctcttgcagtcttgctctagctttgcgtgtacgagtacttgcacaagtataaaactcacacgtcgtcccgacctcgaccatccagtcccaactcccaactcgcactcgcccaacctcgaatgccaagctagcaagagaggcctcgatcgcagaacccagcggcaaagcaagcacgcccgtgtctacaggcagctctttccatatggcgcccaagaggagcagcgaggagcgcgcggcggcggagcaggagcagccgaggctccgcggcgtgcggaagcggccgtggggcaggtacgcggcggagatccgggaccccgtgaggaaggcgcgcgtgtggctcggcaccttcgacacgcccgagcaggccgctcgtgcctacgacgccgccgcgcgcaggctccgcgggccgcgcgccaccaccaactaccccggcgacgtcgtccgagaagcgccgtgcacggccccggctctggctgcgagcgcgagcggcagcaccgagtcgtcgtcgtcgtcgtcgtcaagggacgacggccacccgccaccgccgctgcctacggcgccgtcgtcgctcggcctgggcctcgggctcttcccggcgacggtggccacccagccgtgcctgttcctggacccggcgccggtggagagggaggaaggggagcgggagcggagctgctgctcccggtcgccgccgtcggtgctggcgggcctcgggttcgacttcgacctcaacctgcctccgcccgccgagatggtcatgtagcgttggagatagtaattctagcaaaaagggattgtgtagtaaataggaagggcaatcggtttgtgtagtagtagtgtagtactagctagccagtttgcctgtgcactagccactagccaatttgcgacttcgcaatgcaaatcaagaaatcgacgggcaaatatttttctcctgcaaaaaaattgcagtgccatgccatctcctaagactattcacagcggcttcatctaaattttacccctataccacttttttatgtcacattatcaacatttcatcccctactttttatctctcccagcgattctccctatattctcctcctatatcccacaacaaacataaaa

SEQ ID NO: 97506 - DNA, 228 bp, Zea Mays
atgacaatgcatgagatatcgtccttgctcatccttcccagggcctcggacgtcagtcgcttcgccgctgtttgcgggtccttggttgacttcaccagatcaacggcttcctggttcttcattaccttccataacccgtcactggcaagtatgacaaactctgtgcttgaatttatctttatatgcttaacatcaggctctgagctcaagtgtgccttgaggctctga

SEQ ID NO: 97507 - DNA, 104 bp, Zea Mays
cgtccatatagtgacacttgctaaattgacgttgattgaagttgattacttactagacttcaacaatttaatttactacttaggaacgtgcactagttacttac

SEQ ID NO: 97508 - DNA, 1210 bp, Zea Mays
atggccggccggggcgcctccccggccgcggcggccgccgtccaggtgcgctgcgccggctgccgcggcgtgctcgccgtggctcccggcatgaccgagttcatctgccccaagtgtcgcatggcgcagcgcctcccgccggagctcatgccgccctccccgcccaaggcctccccgactccgcctccctcaggtccaactccgcctccaccacctccaccttcgctgccgcctccgcctccgcctccgcctcagccagtgccgcaccctctgacccgccgctccgctccccgggcgcagggcgtggaccccaccaagatccagctcccctgcgcgcgctgcaaggccgtcctcaacgtgccccacggcctcgatcgcttccgctgcccgcagtgcggcgtcgacctcgctgttgacttgtccaagctccgccatttccttgcatctgctggcccaggcttttttccgcccccactcccacctcccccacccccgcaacccccagtgccaatgcctcatctgccctttctgccgatgatgccacgccttccattgcccatgctgccgatgctctctcctgctgagctaccggaggagatcaatgaggcaatatcatatgagaatttgttgcgtgcatgtttggatgctattattctggttatcagttgtctacggatgcaagaattagctaagctaacctttgattttgttcgtcatacatccatgatgatggatggttccctttgtgaccttgacttctatgttgcagttgatgttgagcgcgacgaagatgaaagtggcacttttggggaaactttcattgattatagacctcccaagctatcttttggttttcctcatcctgaccctgtagtagaaacatcctccttgtcagcagtgcaacctccagaacctacttacaagttgactatcatgaaagaattggatgaaaccaatgcattatcttccttacagattgaaacaatagtgtatgcttgtcagaggcatcatcatcatcttccaactggagctagagcaggtttcttcatcggtgatggggctggtgttggtaaaggacgtaccgttgctggattgatctgggaaaattggcagcagggaaggcataaagctttgtggatatcaattggttcagacctgaaatatgacgctcgcagagatctggatgatgttggtgcaaaatgtgtggaag

SEQ ID NO: 97509 - DNA, 462 bp, Zea Mays
atgaagaactcaaattttaacatctatctggtaaatacatccattttccattcattgcacgctttaaataagcttccatattctaagctagactctaaaacctttgggatcacagatggagttgtttttgtaacttatagcagcttgatagcatcctctgagaaccgttcccgtttgcaacagttggtacagtggtgcgggtctgagtttgatggtcttctggtgttcgacgagtgccacaaggccaaaaatctgattcctgaggcagggagccagcccacccgcactggtgctcttgagaaaggaggtgtgggtgctcttgaacttgttgctatggacatgaaagccaggggaatgtatgtttgccgtactctaagttacaagggtgctaactttgatatcctagaatcacttctggaggaaagaatgatggatatttttgttagtatgattgctcattga

SEQ ID NO: 97510 - DNA, 666 bp, Zea Mays
aagggatcgacgacgcacagagacgaggagtcggggacttgaccgtggtcgccggggttagactggtggagcgagacaaggagccagacgtcgatggtcggcgatgtcgacggccggacagggagggagctcgaggaggcacggactgtggccatggcgaggcgagtatgggatgagctcgacgaactgcgacacgaggagcgaggacgtgcgtccagcaagagggtgacgcgcgctgggatgggtgccgagcagagcttgggcgccaaggaaggtgaggccgtcggcctgaggtggggaaggagaggatcggctggcgttgaagatgggcaaagggaaggcgagtctggcgagtgcacggcatggggaggtgtggtcgagcgccgatcaagagcagaggctctccatggagaacgacgtgcaggtggagattgacgtcgagctcagaactgctggagggagatgaggagaagaatttgcagcagccgagacaagagctcacggcaaggaaatctattccggggagccgatcgcgagagccaaggagaggtgagcttcacctgggcacgcacggtcagttgccgtgaccgagcagggggtggaggagcgacagccacgggcgagcgcaggcaagcgtgaaaaaaaatctgcatgcgtgaaaaaatc

SEQ ID NO: 97511 - DNA, 1304 bp, Zea Mays
tgtctttttaaataactgatataaaattcagatgttttttcattttttgttgtagggagaaaataatgcataaaaagctatacaaaattttattctcgtacttcgtaatatttgtaataacataaaataaaaattaacacaaaattctatacatatctaagctaaaatattaatataattcagatgttgaaacattcctaaggtctactttgggaagcacaaatcgtcttcgggattggaggggttgagatagaaataaacaaattttctctttaattatattcaatcccagaaatttgactatctgtcaataaaaaattagcatcattttccattactgacagccactgccctggtcctgtggtcaattcaaaagccaaacgaacttctctgttcacttgcatgtaaaagggaggtttcacaggtgggccccactgtctcaccctcaacaaccccaccatccccagcgccagcggatcgattcccgagacacgagcgccagcggatcgatcattcgatccccaccactgcccgaggccccctcctcgctgacttggctcctccgccgtggccggaggcgaagcaagtggggaccacagaagcattagctgggtgaactctttcaaaaggggcaggtgcgctagtttgaatggctgctacaaagcttcaggccttttggaaccaccctgctggccccaaaaccattcatttctgggcgccaacattcaaatggggtatcagcattgccaacatagccgactttgcaaagccgcctgaaaagatatcttaccctcagcaagttgctgttgcatgcactggaatcatttggtcaaggtacagcttggttatcacaccgaaaaactggaaccttttcagtgttaacgttgcaatggcgggtacaggcctgtatcagctttcacggaagattaggcaagattacttgtctggtgagaaggatgctgctccacaactgcaagaatagataatgacaacacacaaagaataactgattgagaagtctgcggcctagggatcttactcttgatttttctgggcaggcaaggatatgtctcgatccaggacgggtcatgtttgttttcttgttcttctgaaatcatgagcaggtcaatgtgaaaatctcctgccaaaaaaagaagcccatgaagtaatattttgtgcatttttgtgggaaaaaagtcatgccaggacatgattcgtatattgtccttttgttcactctatctcgtatttgtgaactctaaattgtttgccaatttgattgatcatagcccagtgttcagaga

SEQ ID NO: 97512 - DNA, 1205 bp, Zea Mays
atcattttccattactgacagccactgccctggtcctgtggtcaattcaaaagccaaacgaacttctctgttcacttgcatgtaaaagggaggtttcacaggtgggccccactgtctcaccctcaacaaccccaccatccccagcgccagcggatcgattcccgagacacgagcgccagcggatcgatcattcgatccccaccactgcccgaggccccctcctcgctgacttggctcctccgccgtggccggaggcgaagcaagtgtaaaccagcccaccctcctccccgtctcctctccctccccatgcgctgttttgttctgtattgggttgtgcgcgggggacaggacgcctcctgcgccgaccgttccgttcgtgtttgtgcctgcctgtgccttcggttgttcctctgagcgacggcgagtcggcgaccgaggtggggttccgagcgccccagcccgtggtggaattcgtttggtctggttgttgcgggggaccacagaagcattagctgggtgaactctttcaaaaggggcaggtgcgctagtttgaatggctgctacaaagcttcaggccttttggaaccaccctgctggccccaaaaccattcatttctgggcgccaacattcaaatggggtatcagcattgccaacatagccgactttgcaaagccgcctgaaaagatatcttaccctcagcaagttgctgttgcatgcactggaatcatttggtcaaggtacagcttggttatcacaccgaaaaactggaaccttttcagtgttaacgttgcaatggcgggtacaggcctgtatcagctttcacggaagattaggcaagattacttgtctggtgagaaggatgctgctccacaactgcaagaatagataatgacaacacacaaagaataactgattgagaagtctgcggcctagggatcttactcttgatttttctgggcaggcaaggatatgtctcgatccaggacgggtcatgtttgttttcttgttcttctgaaatcatgagcaggtcaatgtgaaaatctcctgccaaaaaaagaagcccatgaagtaatattttgtgcatttttgtgggaaaaaagtcatgccaggacatgattcgtatattgtccttttgttcactctatctcgtatttgtgaactctaaattgtttgccaatttgattgatcatagcccagtgttcag

SEQ ID NO: 97513 - DNA, 1676 bp, Zea Mays
ccactctcgctttcttctgtctcgcctcgccctcgcctttgttgatcttttcctctctcgcgttcccctcgccttcctcttcctcccccacacccaccggtcgccgcccccgtcgccccgtcctcctcggtccagagacgagggggtccgcgccgttccgacgccacaccgcaaccgcatcacatcacacaccgcctgctcccaccgtccgtccgccctccctcgatcgcgccccccggatcgctggtacctccgcgcgcggctccgacctcatcttcctccatcgactggcatcggcagcggcggcgtgttcccggccagccttcgaaagggtaatcaatcgccagacttttgggagctctgttgggggggaccggggggaagagccaagttactgcagaggctaacatttcggttgtcgagtgatggcgcaaggcatcaacttccctgacttcatcggcgccgtgggtggccatgatggtggtgtggactttggtgggaacttctgtgacatggccttctaccagaagctaggggagggcaccaacatgtcggtcgacagcctcaacagcatgcagaccagcatgcatggggggtccatcgccatgtctgtggacaacaacagcagcgttggctctaacagtgactcccgcactggcatgcttggtcatcctggtctcaaggggcctgccattgtgggaagctactcggttgggcacagcatcttccgccctggccgggtgtcccacgccttgagtgaggatgcgctggcacatgctctgatggacaataagttcccaactgagacactcaaggattatgaggagtggactattgatctggggaagctccacttgggaatgccctttgcacaaggtgcctttgggaagctctacaggggaacatacaatgggatggatgttgctattaagcttttggagcgacctgaggctgaccctgagaaagctcaactgttagagcagcagtttgtccaagaagttatgatgcttgcaacactgaggcacccgaatattgtcaagttcattggtgcgtgcaggaagccgttggtttggtgtattgtgacggagtatgcaaagggtggatctctcaagaatttcttgagcaagaggcagaacaggtctgtcccgctgaagttggcagtcaagcaggcattggatgttgcacgtggcatggcctatgtccatggccttgggttcattcatagagatcttaagtcggacaacctcctgatttctggtgataagtccattaagattgctgactttggagtggctaggattgaagtcaagactgaggggatgacacctgaaactggaacataccgctggatggctccttgagaagtggcagttaagaagaggtggagcaatatgggacgaaggaagctttggtctcatttggttccatgaactagacccaacaatgatcgtggtcccaaccacgatgacaacgacgatgaccagagaggagccgacgaacggaagatggacatattgcataatacggtggacatctagatgtgtaaatcgatgacaatttccatttattttgcaatcaatcatgatctagtgttttcatgcgattgctattatgtaattcctttggcaaccaaacacaataattggtattggtgggccttgcggtgcatttagcaa

SEQ ID NO: 97514 - DNA, 2151 bp, Zea Mays
ccactctcgctttcttctgtctcgcctcgccctcgcctttgttgatcttttcctctctcgcgttcccctcgccttcctcttcctcccccacacccaccggtcgccgcccccgtcgccccgtcctcctcggtccagagacgagggggtccgcgccgttccgacgccacaccgcaaccgcatcacatcacacaccgcctgctcccaccgtccgtccgccctccctcgatcgcgccccccggatcgctggtacctccgcgcgcggctccgacctcatcttcctccatcgactggcatcggcagcggcggcgtgttcccggccagccttcgaaaggatggcaccaattcaccccaaatcaccagtcactgaccagtgggaccaggtaatcaatcgccagacttttgggagctctgttgggggggaccggggggaagagccaagttactgcagaggctaacatttcggttgtcgagtgatggcgcaaggcatcaacttccctgacttcatcggcgccgtgggtggccatgatggtggtgtggactttggtgggaacttctgtgacatggccttctaccagaagctaggggagggcaccaacatgtcggtcgacagcctcaacagcatgcagaccagcatgcatggggggtccatcgccatgtctgtggacaacaacagcagcgttggctctaacagtgactcccgcactggcatgcttggtcatcctggtctcaaggggcctgccattgtgggaagctactcggttgggcacagcatcttccgccctggccgggtgtcccacgccttgagtgaggatgcgctggcacatgctctgatggacaataagttcccaactgagacactcaaggattatgaggagtggactattgatctggggaagctccacttgggaatgccctttgcacaaggtgcctttgggaagctctacaggggaacatacaatgggatggatgttgctattaagcttttggagcgacctgaggctgaccctgagaaagctcaactgttagagcagcagtttgtccaagaagttatgatgcttgcaacactgaggcacccgaatattgtcaagttcattggtgcgtgcaggaagccgttggtttggtgtattgtgacggagtatgcaaagggtggatctctcaagaatttcttgagcaagaggcagaacaggtctgtcccgctgaagttggcagtcaagcaggcattggatgttgcacgtggcatggcctatgtccatggccttgggttcattcatagagatcttaagtcggacaacctcctgatttctggtgataagtccattaagattgctgactttggagtggctaggattgaagtcaagactgaggggatgacacctgaaactggaacataccgctggatggctcctgaaatgatccagcataggccatacaaccagaaagttgatgtctacagttttgccattgtcctgtgggagttagtgactgggaatgtcccctttgcaaacatgagcgcagtgcaagctgcatttgctgtggttaacaagggcgtgcgaccagccataccccacgactgcctccctgcccttgcggagatcatgaccatgtgctgggacacaaaccctgaagtccgtcccccattcgctgagattgtgaggatgctggagcaggtggaggtggaggttctgaccactgtccgtaaggctcgcttccgctgttgcatcgcccaaccgatgacgctggactgacggactgagtcgtccgcaatccaggaaaagaacctggagaggggtttaatcctatgtgtttataatcccaatagacttgtgcttcagaaacagaaggctgactcctcagtctgctcctcagtctgccttctgtctttgacatgttatcgtagagtacacctagctgtcgtcaccagtggttgtaatagaggtagctttatgcttgactaaatacccttccgttataacaagtgcatgctcttgctgctcgctgttatgtgtcttcatcatcatgcggcagcatgtggaagctttgcttaatggtatatatatatgatatatgtattattagtaactagcatggatttgctcctgcctcgtagtctgtcgaaattcgatgctgacagaaccattaatctttgccttg

SEQ ID NO: 97515 - DNA, 2103 bp, Zea Mays
ccactctcgctttcttctgtctcgcctcgccctcgcctttgttgatcttttcctctctcgcgttcccctcgccttcctcttcctcccccacacccaccggtcgccgcccccgtcgccccgtcctcctcggtccagagacgagggggtccgcgccgttccgacgccacaccgcaaccgcatcacatcacacaccgcctgctcccaccgtccgtccgccctccctcgatcgcgccccccggatcgctggtacctccgcgcgcggctccgacctcatcttcctccatcgactggcatcggcagcggcggcgtgttcccggccagccttcgaaagggtaatcaatcgccagacttttgggagctctgttgggggggaccggggggaagagccaagttactgcagaggctaacatttcggttgtcgagtgatggcgcaaggcatcaacttccctgacttcatcggcgccgtgggtggccatgatggtggtgtggactttggtgggaacttctgtgacatggccttctaccagaagctaggggagggcaccaacatgtcggtcgacagcctcaacagcatgcagaccagcatgcatggggggtccatcgccatgtctgtggacaacaacagcagcgttggctctaacagtgactcccgcactggcatgcttggtcatcctggtctcaaggggcctgccattgtgggaagctactcggttgggcacagcatcttccgccctggccgggtgtcccacgccttgagtgaggatgcgctggcacatgctctgatggacaataagttcccaactgagacactcaaggattatgaggagtggactattgatctggggaagctccacttgggaatgccctttgcacaaggtgcctttgggaagctctacaggggaacatacaatgggatggatgttgctattaagcttttggagcgacctgaggctgaccctgagaaagctcaactgttagagcagcagtttgtccaagaagttatgatgcttgcaacactgaggcacccgaatattgtcaagttcattggtgcgtgcaggaagccgttggtttggtgtattgtgacggagtatgcaaagggtggatctctcaagaatttcttgagcaagaggcagaacaggtctgtcccgctgaagttggcagtcaagcaggcattggatgttgcacgtggcatggcctatgtccatggccttgggttcattcatagagatcttaagtcggacaacctcctgatttctggtgataagtccattaagattgctgactttggagtggctaggattgaagtcaagactgaggggatgacacctgaaactggaacataccgctggatggctcctgaaatgatccagcataggccatacaaccagaaagttgatgtctacagttttgccattgtcctgtgggagttagtgactgggaatgtcccctttgcaaacatgagcgcagtgcaagctgcatttgctgtggttaacaagggcgtgcgaccagccataccccacgactgcctccctgcccttgcggagatcatgaccatgtgctgggacacaaaccctgaagtccgtcccccattcgctgagattgtgaggatgctggagcaggtggaggtggaggttctgaccactgtccgtaaggctcgcttccgctgttgcatcgcccaaccgatgacgctggactgacggactgagtcgtccgcaatccaggaaaagaacctggagaggggtttaatcctatgtgtttataatcccaatagacttgtgcttcagaaacagaaggctgactcctcagtctgctcctcagtctgccttctgtctttgacatgttatcgtagagtacacctagctgtcgtcaccagtggttgtaatagaggtagctttatgcttgactaaatacccttccgttataacaagtgcatgctcttgctgctcgctgttatgtgtcttcatcatcatgcggcagcatgtggaagctttgcttaatggtatatatatatgatatatgtattattagtaactagcatggatttgctcctgcctcgtagtctgtcgaaattcgatgctgacagaaccattaatctttgccttg

SEQ ID NO: 97516 - DNA, 1899 bp, Zea Mays
actctcgctttcttctgtctcgcctcgccctcgcctttgttgatcttttcctctctcgcgttcccctcgccttcctcttcctcccccacacccaccggtcgccgcccccgtcgccccgtcctcctcggtccagagacgagggggtccgcgccgttccgacgccacaccgcaaccgcatcacatcacacaccgcctgctcccaccgtccgtccgccctccctcgatcgcgccccccggatcgctggtacctccgcgcgcggctccgacctcatcttcctccatcgactggcatcggcagcggcggcgtgttcccggccagccttcgaaagggtaatcaatcgccagacttttgggagctctgttgggggggaccggggggaagagccaagttactgcagaggctaacatttcggttgtcgagtgatggcgcaaggcatcaacttccctgacttcatcggcgccgtgggtggccatgatggtggtgtggactttggtgggaacttctgtgacatggccttctaccagaagctaggggagggcaccaacatgtcggtcgacagcctcaacagcatgcagaccagcatgcatggggggtccatcgccatgtctgtggacaacaacagcagcgttggctctaacagtgactcccgcactggcatgcttggtcatcctggtctcaaggggcctgccattgtgggaagctactcggttgggcacagcatcttccgccctggccgggtgtcccacgccttgagtgaggatgcgctggcacatgctctgatggacaataagttcccaactgagacactcaaggattatgaggagtggactattgatctggggaagctccacttgggaatgccctttgcacaaggtgcctttgggaagctctacaggggaacatacaatgggatggatgttgctattaagcttttggagcgacctgaggctgaccctgagaaagctcaactgttagagcagcagtttgtccaagaagttatgatgcttgcaacactgaggcacccgaatattgtcaagttcattggtgcgtgcaggaagccgttggtttggtgtattgtgacggagtatgcaaagggtggatctctcaagaatttcttgagcaagaggcagaacaggtctgtcccgctgaagttggcagtcaagcaggcattggatgttgcacgtggcatggcctatgtccatggccttgggttcattcatagagatcttaagtcggacaacctcctgatttctggtgataagtccattaagattgctgactttggagtggctaggattgaagtcaagactgaggggatgacacctgaaactggaacataccgctggatggctcctgaaatgatccagcataggccatacaaccagaaagttgatgtctacagttttgccattgtcctgtgggagttagtgactgggaatgtcccctttgcaaacatgagcgcagtgcaagctgcatttgctgtggttaacaagggcgtgcgaccagccataccccacgactgcctccctgcccttgcggagatcatgaccatgtgctgggacacaaaccctgaagtccgtcccccattcgctgagattgtgaggatgctggagcaggtggaggtggaggttctgaccactgtccgtaaggctcgcttccgctgttgcatcgcccaaccgatgacgctggactgacggactgagtcgtccgcaatccaggaaaagaacctggagaggggtttaatcctatgtgtttataatcccaatagacttgtgcttctgtctttgacatgttatcgtagagtacacctagctgtcgtcaccagtggttgtaatagaggtagctttatgcttgactaaatacccttccgttataacaagtgcatgctcttgctgctc

SEQ ID NO: 97517 - DNA, 106 bp, Zea Mays
ctgtggttattcacatgctcaattaaatagagacaaaacactcctatcatatgatttacaaattttggtattacgcaaacccatcatgcgggaaggatccctaact

SEQ ID NO: 97518 - DNA, 1349 bp, Zea Mays
gtccccagtctctccacctagaatcgaatccgcgatcttcttctgctccaagcaaagccgcacccagacctcgacggacggcgagcagcaagagggcaagcccgtaccctatcgactcgaacctcggagcggcggatcggtactcgtaggcagtggtggacatggcttcggcggcggtgatggtgagctcggcgggctccctgctggcgatgctgcaagagccggcgccggagctcaagctccacgcgctcgccagcctcaattctctcgtccacgccttctggcacgagatctccaccagcgtctcctccattgagagtttgtatgaagacgaggagtttgtccagaggcaacttgcagcactagttgcctctaaggtatttttctacttgggcgagctaaatgatgctctgtcatatgcacttggcgctggacccttgtttgatgtttctgacgactctgattatgctcaaacactgttagcaaaagctttggatgaatatactgccatccaatcaaggggcactggggaagaaaaaacgatcgaccctaggctggaggccatagtggaaaggatgctggacaagtgcattcttgatggaaaatatcaacaggccatgggtatgtctgttgagtgccggagactggataaactggaggcagcaatttcccgatgtgataatcttcatggagtgctttcatattgcatcaatctgtctcaccaatatgttagtcaccgtgaatatagattagagattctacaatgtcttgtcaaaatatatcagacattgccaaatccagattatttaagcatttgccagtgtcttatgttcttgggtgagcctgaaagtgttgcgaacatgttggacaagctgatttctggaagcaaggatgatgctctccttgcataccaaactgctttcgatcttgctgaaaatgaaaatcaggctttcctcctgaatgtgcggaatcaccttgatgcactgagttcacatacttctgcccacgtggaccttgacagcggaccgactgtaccaagtaatcaaactaacgctgctacagaactgtctggggatgtccagatgagagatgacataaacatgccaaacggcagtgctaccactgtggattcaaatgcagcaacacatgctgacaggctgacaaaaatcaagggtatactgtcaggagaaacatctattcagttgacattgcagttcctatacagccataatagcccgtctttgttcttgagttatgaagtaatttatgtggatctagagtcttctcttagtatggggagacagggagggagggaggctgttgtgtcttccctcctccttgagtcgtag

SEQ ID NO: 97519 - DNA, 1391 bp, Zea Mays
cttgaaactaggattgggttaaaattggaaccgagtttagtgccatggatgaatgagtgtttcacattgttatcgcgtcaaaacggaaataagaggaggggattaagctaatgccttgtcatcactgggtggcaaactgtcgtattttcattgatgcggtgttttctttcccgtcaggtacttccagccgtgtgggcccggggcagtttggttggtggacgtgaagctacccacgcttccaccagccccaattggcgaggccacaccacaccacaccactcctccgtccagcctctccccctctcctctcctctcctcccaaaacaagagcagcgagacgcgcgcgcgcgcgccacgagctggtggaacctcgccgcctcccgcggcagatctcgcgccgagccctggtttcgacgcgagatccgcgcccgccgtccgccgctcgccgcctccgtcccggtgcgtctcccgcccttcttccctcagcctgcgcgctcgtcgaatgcagcgtgggaagatccctgtttttcttcttcttcttcttctcttactttggttcctgttgcgatcccatttgatctacgccatgccgctgccaacttgtcgttcacgaaaagaaaattctccctctctctctctctttccggctgtcatttgtgtgtcgattcacgtgagcgacgatggaatgggatcacggccggcggggagatcgcgttttggtgcgcccgctcttggcggtgatgtaaccggggattccgggcgattggagtgtggattggagctgatgcattttgctacctccaaccttaccttcctcccgtccctcctgcgcctactggaaggtcgaatctcgatagattctacctgtctgtttagctggccgcagtgctcaacttgaaacgtggtggtcgcgaattgcgatgggaatcagattctctcccgggcatgtttgattctctggttgctgtcaggacagggtgctggaaacggattcgtttctgaattcgcttgctcgctgtattctttttttattagcactgctgcgaaattagaggagcttgctcaaccgtactcagagttgccgcctcctttctggaatgaacaaatcacaaatgagctgtgtttcttgctgagaaagaaggtagaatctcatcatgaacaaatctcatggtagcagcatgtttgtacagccccgtcagtcgttccgtgtcttcttgtaaaagcaattcgagttctttccaaattctccgcgatctccccgttgcacaaaaaataccccccccccccccccccccgggactttctgaaatatctggtggttaggatttggtcaacgtgatgtgatcgttaagcacgtttgctatgcatctaatttttctggttatatgtct

SEQ ID NO: 97520 - DNA, 2048 bp, Zea Mays
ccacaccacaccacaccacgcgggagcggggcgggcaccagaagcagacggcgagcgagcgacacacctctcatctgcccgcccctctcctccgtccagcctctccccctctcctctcctctcctcccaaaacaagagcagcgagacgcgcgcgcgcgcgccacgagctggtggaacctcgccgcctcccgcggcagatctcgcgccgagccctggtttcgacgcgagatccgcgcccgccgtccgccgctcgccgcctccgtcccggagcattaccaggattatacttccaccttgaagatggcgatcggattactagcgtttgagagccaccaggggctctggaacagcggatactattcacagttgtttggaattggaggagttctcatcactcttaccattcttatgttatccacgggctactttgggggaattggtgccccatttgctccatatttctggccgtatctaggacaagttccaaagaagagggaacgcaaaaggcctgtgagagtgtacatggatggatgctttgatctcatgcactacggccatgcaaatgcattgcggcaggccaaattgctgggcgatcagcttgtagttggagtggttagtgatgaggagattgtggcaaacaaaggtccacctgtcctttctatggaagagaggttgactcttgttagtggtctcaagtgggtcgatgaggtcgttcccaatgcaccctatgagataacagaagaattcatgaatactctcttcaacaagtacagcattgattacattattcatggagatgatccttgtcttctacctgatggcactgatgcatatgcgctagcgaagaaggtcgggcgttacaagcaaatcaagcgaacagaaggtgtctcgagcactgacatagttgggaggatattgctaacattcaggcagaaagatgctgacactgatttaagtgttgtcgttgctgagaagtctggagagaaatcaaatgatgaagtgaaaagtcagctatctcatttccttccaacttctcgccggatcatgcagttttcaaatgggcaggctccttcgccaggtgctcgtgttgtctatgtagatggcacatttgatcttttccacgctggccatgttgagttcctcaggagtgccagacaacttggtgactttcttcttgtgggtatctatgacgacgagtcgatcagggatagaagaggctgtcgtcctataatgcatctccatgagcgtactcttggtgttcttgcctgccgttatgttgatgaagtcattattggtgcaccatgggaagtttctaaggacatgatcactacgtttaacatttcattggttgtccatgggactgtagctgagggcaattcagctggtgaaattgatccttatgctgttccaaagagcatggggattttccagacaatcaggagcccaaaatctataacaacattgtcagtggcgacaagaatagttgacaatcatgaagcttacaagaagaggaacctgaaaaagaaggctagcgaagaccggtactacacacaaaagaaattcgtttctggagactagtgctgcacaaggagtgtatatttctgccagcagtccgaggaaatgcatgtgccaccctgtattgatgttattctacagcagagactggaacagataatcagcaatagaaaggtcacaatgatagtttgagcaatggtgtggatggaccaagctagggaagagagagagagagagagagggagaaaactgtcacattcttctgctgtcgcccttttaggaacgctcacatgacatgaggagttcacataaacgattctttttctttctgactttgttatccccgtatggggatttatatatatctgtagctgaaggccttcagcaaaccgttgttgtatacttgtgtgttgttacttaacagcgtgtgtagtgattagcactgcacactccctgattgtaccatggtatattgaatgtttatactgctggaagaaaaaaagggggaccttgtgatggtcagatgtttaatt

SEQ ID NO: 97521 - DNA, 1824 bp, Zea Mays
gccgaacgcaaagcagaggccacgcatgcagaaagaaagaaagaaacaaagaaacacttctccattgcggcaattacctggttcccagtcccacgaacgcccgcgctcctccacctccactcgctcccccagccccccgtccccgccgcgcgcacagatcctgcgccgcttcatcgcatcgcatgcgtttcccccgggttcccggccggtggtggcttctcggatcgccgcacctcgccggctttccccacccgtagcagaagcacttatagaagcagaaggcaattgtttttccaattttcacgttgctggaagctccagtagggtagcatttgctttagtcaagaggaaagcaatgaaggcgaggcacatcaatgtgagtagccaaagggaatgaagtggtggtatcaggtgtgaaaactgggcttcagcgacatgaagggtactgcagttcctcgcacaagagcaagtccaagaagacgcatatggatatcagttgtcgtagtatttgtcgccattactgtgctgtgggcttatctctaccctccccaggattacacctaccctgtcagggactggtttccctcggaacctacgcgggaacttactgatgcagagactgctgcacgtgttgttttcagacagatactctccacgcctcctttcatatcaaggaacccaaagattgcctttatgttcctgaccccgggcaagcttccattcgaaaaattgtgggagttgttctttaagggtcatgatgggagatacactatatatgtgcatgcttcacgggagaagcacgaacatgtcagtcccatatttattggtcgagacatacacagtgagaaggtagggtggggtatgattacaatggttgatgcagagaggaggctgttggcaaaagctctagaagatatagacaaccagcattttgtattgctttcagacagctgcgttcctcttcacaattttgactatgtgtacgactttctcatgggatcaagacacagttttctggactgttttcacgaccctgggccacatggagtttacagatactcaaagaatatgttacctgaggttcgagagtcggagttcaggaaaggttctcagtggttctcaatgaagcgacaacatgcaatggtggtgattgcagacagtctttattactcaaaattcaggctttactgcaggcccggaatggaagaaggtcgcaattgctatgcagatgagcattatctgccgaccctattccacatgatggaccctgctggcattgcaaactggtcagtcacctacgttgactggtctgaaggaaagtggcatcccagatcttttcgtgctaaggatgtcacttatgaacgcctgaagaatatgacttcgattgatgtgagctaccacatcaccagtgatgacaagaaagatctattgcagaggccttgcatgtggaatggactgaagagaccatgctacttgtttgcaaggaaattttaccctgaagcattagacaatcttgtgaacttattctcaaactacacaattttctgagttctacagctggaagcataaacatttttggaagcattggtgttcatgttaattctttgtagattgctggaggggcagatatattgacactaactcagtatatgcatgatagtgaacaagtattagacaactgtgtcaccgataaactgttttaggattatattattttatataggttttcagtgttactctttttttttgtgtctcctggcaatagctaattatgtcaaaactgtcatttataccaccttttccattaatcattcctcaaaagaa

SEQ ID NO: 97522 - DNA, 1419 bp, Zea Mays
acggcccgaaggaccgtgcctgggccttttgtaaggcacgcagaactgtgcaggcccgacccggtaggcccgtgggtctggtcatgccgtgcctaattgggccgtgccgtgcggagcggcccaattgctcatctacagtgcctacgttgctttcagcctttcacggtttcactttcgcctcgatcgcatgagatccttctccctcgcgagtcgcgatcgccagtttgtcgaaagttgaaacatgccactgacggtgtgggcggatccaatcgccggtgacgcgcggcaacaaggcgcgcacatgctggaggtcataaggtacagtactctccacaggcgcaggggcgtcggcaccggcggccgcaggtgcgtcgagtccgtcggcttcaccgtcggtgggtaccagtgggcaatcctcttctaccccgacggcgacgacgcgcccggcagctcggggtacgtctccgtctccctcgcgctcctcacccgtcccgcccgggtgagggcgtccttcaacctgggcctggtcaaccgcgccacggggctgccgtcgttccagcccaaggacacgacggcggtgttcgacaacgccgcctgctgctgccgcatgtaccccattcccacctgccgccacgaacggaagcgctcctgccacggcatgccgaggctcgtgaaacggtgcgatctggaggcgtacctccgcgacgacgccgtcaccgtcgcgtgcgtcgtgacggccgtcaccgggacggcgctgacgtcccgtggcgcgccggagatccgggtgcccgggggcaacctgcacctgcacatcggcgagctgctcgtgtccaaggaaggcgcggacgtgaccttcggtgtggatggcgaggcatttgcagctcacaggatcatcctcgccgcacggtcgccggtctttgaggcggagctctacagctccacttgcactgcggagacgacagacgcgcgcactgtcgtggtaggtgacatgcggcctgacactttcagggcgttgctccatttcatctacaccgactccttgccggccatgagccatatgggcatggacgagacgagagagttggtccagcatttgctagcggccgcggatcgatatgccattgacaggctcaaggcgatgtgcgagcacatccttgcaaggacactccatgtggacaacgcggctagcacattggttctagccgatcggcatggctgcgacacgcttaaacatgcttccatctatttcatagcatcttccgataatagtgaaatgggtcatgatgatgtgtccgtagaagcattggagaagacagtgtaaatttcggccaaattttaaatgtagtgtctcaattttaacataatctggttgattgtttgtaacttcttcaatcatatcaacagcttgaaagtagtttc

SEQ ID NO: 97523 - DNA, 615 bp, Zea Mays
aaacaaccgaaccgaggaatgggtttcacaagcaagctaaagcgctcgaggcatggtgtgtccatgaagctccgagtccgtgatccgaggccaacgcagacagtccaagatggactcagtttcgtggcgagcttgaagcgcgtgttcgcctgcgagcctgacaagtacgacgagatcatcgccaccatgcgccagttcaagtccgggagcattcgtagtgcggttgtggttgagcgtgtgaaggtgcttctggaaggtcaccctggtctcctccgccacttcaaccagttcctgccatggggttacataagggctcatggaccagtcgggaggatcagcgtctgatgcagccagggcagggaagcgcgtgtggctacctaaacaagcctaaacctactagctggtgctttccatcgcatgaatggcagaatgggacaagagtatctggttggcccgtcatgactgctattctgcattggcagtaccattaagaacatgtaatgctaaacatcagaccggccgtatctttcttgcattatgtcatgtctgttccataatggtgaagccacctgactggcatcttctatatatcatgtatatatgcatgttcttgtc

SEQ ID NO: 97524 - DNA, 173 bp, Zea Mays
ccccacccgccatgacgaaggtcctcccggcacccacgtggacccgactaatggcatcggtaaggaatgacgtcgacggtcatctcctcgcggcattcactctctcctctaccaattttggctacggcgtttccgcatttctccttgtggcgatggaaggggagatggctaag

SEQ ID NO: 97525 - DNA, 505 bp, Zea Mays
cacatttgaggaaatcgaggaaaggtgcaactcaaactgatgatgaagaaagctgattcgtttgtgctatgttgcaaggggctcctacaagaaaacacagtgcagagttggatgactgccaagatcaatgtagatatggatgcaaggagcctattgctggtaaaccatggcacctgctacggttgatgctgcctcatccgtcttggaagataaatctgtaaattcggtctgaatctcaggcggttgttgtatcaacaagtcctggcacaaagccttcgttgtaataatataagcattgcatggagctgtgtgctgaatgtgtgctacggtactttcaatactgggctcagcatcaatccagaagatgtactctaaacaaagattctggatggcttcttgtgccaactaggaacaatgtaaaatttatgcaagcatttctgctcactcctgatctatgtaatactaagctaaaagcttaaagggcttaagggcttgttcgttttaa

SEQ ID NO: 97526 - DNA, 775 bp, Zea Mays
tgccatctggctgggttagcgtggggtggcagggtccctttccctttttctttctgtaatgggtgttttgctagtgtgtgtgttttcgccctcctgggcttgtactttggtccattttggttcctctctccataatataatgatgctcagctgtcctgcctgttcgagagagaaaaaaaacagaaaattaactgggcagaagataaagaaactttatatcgaccagatgctgactgtttacgtagttattacgtatgcgtagttaagattttctgcacaagaagaatcgtatttgatatcgtgatgccctgttggtcaggctcctacaagaaaacacagtgcagagttggatgactgccaagatcaatgtagatatggatgcaaggagcctattgctggtaaaccatggcacctgctacggttgatgctgcctcatccgtcttggaagataaatctgtaaattcggtctgaatctcaggcggttgttgtatcaacaagtcctggcacaaagccttcgttgtaataatataagcattgcatggagctgtgtgctgaatgtgtgctacggtactttcaatactgggctcagcatcaatccagaagatgtactctaaacaaagattctggatggcttcttgtgccaactaggaacaatgtaaaatttatgcaagcatttctgctcactcctgatctatgtaatactaagctaaaagcttaaagggcttaagggcttgttcgttttaacgttaatccacgtgtattgcgtggtattgag

SEQ ID NO: 97527 - DNA, 891 bp, Zea Mays
atggctttctcggcaagaacgatttcaagggagatggaggtgcaaatggggaaggccccaccatgtttgaatcccttcctaatggtaaaccctcttttgccccctcagcatgtctctccctggtcatccaagtctgtaccagtttttcaatttggcatgaccaatggtcatggagctttagatctatgtgaagaaagcaaaagggccaggaaggttgttcacttggagtacttgttcagcaaggttttaactccaagcgatgttggtaaactaaatcgtctactgataccaaggcaatgtgcagaggggttctttcctatgatttcagaggtaaagagtggtggagatgacattttcctcaattttgaggacacctccacagggttagtctggcgcttccgcttttgcctctggaataatagcaagacctatgtcctgaccaagggttggtctgtctttatcaaggagaagaatctcaagaaaggtgatattttatccttttatcgtgatgccagtaagtcgataagaacaaaccacttatttattcatatcaagccccacaccggtaccatgcctctaccacatcatgtgccaagtccggtcttctctccatctggcatggtgattgatgatcaggtccacgatagtcttaacatcggtaaaagccatggaattgctccatcttggaagcctttgtcctttggatctggggagttaatgccctcaactaatccgacgccacaacaaacaacatttccggaatcgacgtcactagcaaatagtattgtaatggcagaaaagcatttgcgactatttggggtcgacattgacatccctactcatcgttatggagatgagtcttccgatggattcatcaagaatatagcttga

SEQ ID NO: 97528 - DNA, 258 bp, Zea Mays
tctcaacaatccccgccccatcgccgtgcgtctcggctgtcatcttccctaccggaagcagcggctgggggcaagatggtgcggtggctcacctaccggaagcggcacagctacgccaccaaatcgaaccagacctgcgtcgtcaagacacctggtgggaaacttgtgtaccagtacaccaagaagcgagcgagcggaccgaagtgcccggtcaccgggaaaaagatccaaggagtatgtgctgcccacctttctatt

SEQ ID NO: 97529 - DNA, 597 bp, Zea Mays
atgacggcgccagtgagggtaacagcaacaaggcaacaacgagggagcgacaacgagcgacgcaaggggctcggacaggggaatcagctgcacgatgaagtcgtggtgctgatgagcgggaaggcagcaacggtgccggaatcacggcatcgcgggaggaaggatgctggagcagtatgcaggacgcaaagctcccgcgacattatggcgatgaacttcggcgagcagtgcaagatgcagaggaacgacgcaaacaaggagagtcgactagactccagcggtgtcatgacggtgtctgggcgcagatgctgcgatgaacaggcgcggtgcgaggcgttgcgtaggagtagagcgagaagcagtagaggagagagggaattgctggcgtgttcaatggccattgaagctgataaacggccgccattaatggaggagaaaatgccaacagttatagcggtggggaaaaggaaacggacggacgcagtattccatgtcgccgagacgacagcggcatgggctcgaatgtgggcgtacgcgacggcgaggtgctgtgtgcggcagctgcatagacgaagagagtacaacagcatcgcctga

SEQ ID NO: 97530 - DNA, 546 bp, Zea Mays
cttcggattgcggatagaaaacaaatcgtcgcggagcggaacagagaatgacgatgacggttggcgccacaagttgggcgtagaggttctagtgacaccgtgacagtgaactccagtgatgtgcaggcgccagtgagggtaacagcaacaaggcaacgacgagggagcgacaacgagcgacgcagggggctcggacaggggaatcagctgcacgatgaagtcgtggtgctgatgtgcgggaaggcagcaacggtgccggaatcacggcatcgcgggaggaaggatgctggagcagtaagcaggacgcagagctcccgcgacattatggcgacgaactccggcgagcggtgcaagatgcagaggaatgactcaaacaaggagagtcgactagactccagcggtgtcatgacggtgtctgggcgcggatgctgcgatgaacaggcgcggtgcgaggcgttgcgtaggagtagagcgagaagcagcagaggagtatgtaaaagaggaagagagagtagtgtgcggaggagaggaaggaaaggccgggat

SEQ ID NO: 97531 - DNA, 611 bp, Zea Mays
cctcgcttcccacaacctcaaagaaccttcttgctagctagccgttgaggtagaaataaacacacagagaaagagaggttcacacggcgaggcgaggacgacgtcgtatagctagcaggagaaggacataatatggcaaagtcgtcaatggcggcggcgtgctgcggcgtggcggaggagacggtgacggcggagcagaaggcgccgggggcgtgcccgcggtgcggcggcgcggtggtggccacggacgtggagagcgtgcggcgggtgctctgctgcctgccgctgtgcgtcaagaacaagcgcaggttctcctgcgcccgctgccgacgaagcctcgcctcgctctacacccacgcctagctatagcctagctagctcccgttaccattctgagattagcttgccctgctaattaattgagtattagcaacgcaaatcagcactactagctagattagtggagtatgtagtagcagtagtagcatcgtctgttcccgttcgttgagtttatttcgtcatgtctagctgttacttttgctttattgaatgaactgttgatgttgcattgggaggaataatgacgacactcatcaggtttcaagcaacta

SEQ ID NO: 97532 - DNA, 730 bp, Zea Mays
acgccaccccctaatcaaaggtccatcttgcggcccgcagtggacttcgatctggaacgggcccaaactcgtcattcctttttattttctttcattccatttccttctcgcccccctcccccctcactccgtcgaatacaacagcccgccaaaccacagccgttcgatcccccaacacgagcggttagaaaccctagtcaaaaccctcgccctcccaaaaactactcacgtctcgccgccccgccgtatcaccctttctcggcggccggcctcttctcttcacggactcgcaggtcatcgagatgtcgtcggcggaggcgaaggccgcggcgaaggcggtcccggagtctgtgctgcgcaagcgcaagcgggaggagcagtgggcagcggacaagaaggagaaggccctcgcagacaggaaggaggcgcttgacagccgcaagatcatatttgctcgcgccaagcagtacgcccaggagtacgacgcccaggtgagcacgatctgtgccaccctctccatctcgcagcttattgctacttcctgctctgcctagctgcgaccgctaggacgatgtcgcgtacgggatcgcgtacgtttgaaattggtgcgcgcatagcagtgttagttggaagtgcgatttgctgcactattattgactgttgtatctatcgccatgtcgatcgtgtccgttgatttcgtgcaaggaaaaaagaaatttagtttgccgtg

SEQ ID NO: 97533 - DNA, 1452 bp, Zea Mays
acgccaccccctaatcaaaggtccatcttgcggcccgcagtggacttcgatctggaacgggcccaaactcgtcattcctttttattttctttcattccatttccttctcgcccccctcccccctcactccgtcgaatacaacagcccgccaaaccacagccgttcgatcccccaacacgagcggttagaaaccctagtcaaaaccctcgccctcccaaaaactactcacgtctcgccgccccgccgtatcaccctttctcggcggccggcctcttctcttcacggactcgcaggtcatcgagatgtcgtcggcggaggcgaaggccgcggcgaaggcggtcccggagtctgtgctgcgcaagcgcaagcgggaggagcagtgggcagcggacaagaaggagaaggccctcgcagacaggaaggaggcgcttgacagccgcaagatcatatttgctcgcgccaagcagtacgcccaggagtacgacgcccaggagaaggagcttgtgcagctcaagcgtgaggctcggttgaagggtgggttctatgtgagcccagaggccaagcttctgtttgtggtccgcatccgtggtatcaatgccatgcaccccaagacccgcaagatcttgcagctcctgcgtttgaggcagatcttcaatggtgtctttctcaaggttaacaaggcaactattaacatgctacggagggtggagccatatgttgcgtatggatacccgaacctgaagagtgttagggaattgatctacaaaagaggttatgggaagctgaacaagcagaggattccgcttagcaacaacaatgtcatcgaggagggccttgggaagcataatatcatctgcatcgaggaccttgttcacgagatcatgacggttggcccacacttcaaagaggccaacaacttcctctggccattcaagctgaaagcgccccttggtggcctcaagaagaagaggaaccactatgtggagggtggcgacgctggcaaccgtgagaactacatcaacgagctcatcaagaggatgaactaggctctcttgtatcctgtgagaatgcattcgatgtcggcatggatatgcaattttgttccatggctgtcatacgtcacgacttcaactaggaaatgggtcctgtttatgtttgcagttgcctctgtaggttttaatacatcaagacataaaccaacacgtgccccaagtgtcactcgctagggctaccaagattgttgcaaaaaagatagcactttttcccgtcactgattatatatttagttctagtttgacaacctcatttttccatagaatttttatttttctaaaaaaataaattatttttctttggaaaaaatagagtttccaaactaacccttatactgacaatgctattgaaccatcgtaaatgttcaacgtgtcataatcgtaaatgcagtcattttat

SEQ ID NO: 97534 - DNA, 1463 bp, Zea Mays
attttctttcattccatttccttctcgcccccctcccccctcactccgtcgaatacaacagcccgccaaaccacagccgttcgatcccccaacacgagcggttagaaaccctagtcaaaaccctcgccctcccaaaaactactcacgtctcgccgccccgccgtatcaccctttctcggcggccggcctcttctcttcacggactcgcaggtcatcgagatgtcgtcggcggaggcgaaggccgcggcgaaggcggtcccggagtctgtgctgcgcaagcgcaagcgggaggagcagtgggcagcggacaagaaggagaaggccctcgcagacaggaaggaggcgcttgacagccgcaagatcatatttgctcgcgccaagcagtacgcccaggagtacgacgcccaggagaaggagcttgtgcagctcaagcgtgaggctcggttgaagggtgggttctatgtgagcccagaggccaagcttctgtttgtggtccgcatccgtggtatcaatgccatgcaccccaagacccgcaagatcttgcagctcctgcgtttgaggcagatcttcaatggtgtctttctcaaggttaacaaggcaactattaacatgctacggagggtggagccatatgttgcgtatggatacccgaacctgaagagtgttagggaattgatctacaaaagaggttatgggaagctgaacaagcagaggattccgcttagcaacaacaatgtcatcgaggaggtttttccatccacaactaccgtgctgaatctgattacatccacattccaatttccgccttatgtatattttgcttaccttctgttcattatagggccttgggaagcataatatcatctgcatcgaggaccttgttcacgagatcatgacggttggcccacacttcaaagaggccaacaacttcctctggccattcaagctgaaagcgccccttggtggcctcaagaagaagaggaaccactatgtggagggtggcgacgctggcaaccgtgagaactacatcaacgagctcatcaagaggatgaactaggctctcttgtatcctgtgagaatgcattcgatgtcggcatggatatgcaattttgttccatggctgtcatacgtcacgacttcaactaggaaatgggtcctgtttatgtttgcagttgcctctgtaggttttaatacatcaagacataaaccaacacgtgccccaagtgtcactcgctagggctaccaagattgttgcaaaaaagatagcactttttcccgtcactgattatatatttagttctagtttgacaacctcatttttccatagaatttttatttttctaaaaaaataaattatttttctttggaaaaaatagagtttccaaactaacccttatactgacaatgctattgaaccatcgtaaatgttcaacgtgtcataatcgtaaatgcagtcattttat

SEQ ID NO: 97535 - DNA, 258 bp, Zea Mays
atggaggacgtcgtctgggatcaccgggcacagcatatgcccatgaccactgcgaggcttcggcgaggagggcttccggcgcagcgcgagcgcggtccgatgagtgcgaccctggcgaggctccgtgcgaggcgtgcttccggcgcgacacgagtgcaaccccagcgttggcacaccgttgctgaccttccactcttgtcttcctacgctgccttctcaacgaggaacaagagtgcctcggccagcgccagatcatag

SEQ ID NO: 97536 - DNA, 1162 bp, Zea Mays
cgcgcaaaccttatctccccagccgaactcgctttctgcgttcttcttcctccccgtacacgtctctctctctcctccagctcccagccggcgtcctcctctaccgtggatctcccctgcgtgctggactttcctccgcttctccatccatggcgctcggctgctccaaatctctctcctattcgctcatagaaaccacgcgccagctctctgctcagctgccgcgtccttggccccaagctcctgcgcgcgtgtccctggccctctgctcgagctcgcctggtcgcgttccagctcggtcgctcccatggctcggctctgcgcgcgcggtgctctgtccctgcgcacgtccagcaccctggaatctcggatttcgccgcgcgcgagtctctctagcgaccgtcgagcctcgctgcccatcacgaagttctctgctcgccacgacgtgtcgagctttcgcgtcaagtttctctgttccgtgccggttgtccgtctttgatcctcgcctcgatgtcatcttgcccgtgcaacgcttgcttggtgctcaacaaaacgcctgaatcaggaccatcgtcgttctcgcgatcatcgaattggtttaggtcggtaagctgatctatgattcctgttagctaaattgttagatggatgaaacgaatgatgtgtttagtgggatccgtcggtgtcgcttgtgcttagctgatttttgattgtgtggtaaaaattagctctagcgtaggactcttcggatgttcggtaaaatgggtgaactgcagatcgtcgtcgatatcgtgaatttgagttcagtttagtgtggtaagccaattcattatcattggtcctatgcccgaagtagttatatatacaagtcgataatgatcttgtatgtagcatgcgtgttgtggtgtattagatgtttgtgaagtgcttgtgatcacggtcgtagattagtcgtcatgcgaaggttaggtttagatgtttattatgcgataaatatgtgggtaaacctaagtgaaataggattgaatcgtttctatatttgcgacctggtgtattagtaagacgaaggataagtttcgtgtttcgaaagttttactggtaggcgtggtcagtattgcctatgatgaatgatgtttgtttaaagaagtcgatgttatgctct

SEQ ID NO: 97537 - DNA, 178 bp, Zea Mays
aattgagttttgattctctcgtaaattactgtgaccatggaatcatgtgttttgatcgcagctctaatttatcaggttacgaatcaaatcaaaccatgtcaccaatattgttgaccctgtagttatcgctaaaaatctggatataagaatatctatgattttctgtaagaaaaagaag

SEQ ID NO: 97538 - DNA, 1156 bp, Zea Mays
acctttatctccccagccgaactcgctttctgcgttcttcttcctccccgtacacgtctctctctctcctccagctcccagccggcgtcctcctctaccgtggatctcccctgcgtgctggactttcctccgcttctccatccatggcgctcggctgctccaaatccctctcctattcgctcatagaaaccacgcgccagctctctgctcagctgccgcgtccttggccccaagctcctgcgcgcgtgtccctggccctctgctcgagctcgcctggtcgcgttccagctcggtcgctcccttggctcggctctgcgcgcgcggtgctctgtccctgcgcacgtccagcaccctggaatctcggatttcgccgcgcgcgagtctctctagcaaccgtcgagcctcgctgtccatcacgaagttttctgctcgccacgacgtgtcgagctttcgcgtcaagtttctctcttccgtgccggttgtccgtctttgatcctcgcctcgatgtcatcttgcgcgtgcaacgcttgcttggtgctcaacaaaacgcctgaatcaggaccatcgtcgttctcgcgatcatcgaattggtttaggtcggtaagctgatctatgattcctgttagctaaattgttagatggatgaaacgaatgatgtgtttagtgggatccgtcggtgtcgcttgtgcttagctgatttttgattgtgtggtaaaaattagctctagcgtaggactcttcggatgttcggtaaaatgggtgaactgcagatcgtcgtcgatatcgtgaatttgagttcagtttagtgtggtaagccaattcattatcattggtcctatgcccgaagtagttatatatacaagtcgataatgatcttgtctgtagcatgcgtgttgtggtgtattagatgtttgtgaagtgcttgtgatcacggtcgtagattagtcgtcatgcgaaggttaggtttagatgtttattatgcgataaatatgtgggtaaacctaagtgaaataggattgaatcgtttctatatttgcgacctggtgtattagtaagacgaaggataagtttcgtgtttcgaaagctttactggtaggcgtggtcagtattgcctatgatgaatgatgtttgtttaaagaagtcgatgttatgctct

SEQ ID NO: 97539 - DNA, 942 bp, Zea Mays
gcaaggataccagaagctgattctttggccttggtcgattggattgcagagccaattagctaggtagcagtgatggcggcgcatttgccgtctttctgttctcgtcatgccagcatggcggtggcggcggcgctgatgattgtaatggcgacggaggctccggcaggcgtggcgctgctgaaggacgacattggattcatgtggggcccggaccacagcttcttctacgacgacggcaacgcgctcgcgctgtgcctggagaagtcccacggctcggggttccgctccaacgccgccaacctctacgcccgctacgacatcgacgtgaagctcgtcgccaacgactcggccggcaccgtcaccacggtctacctgacgacggacgacgtgcggccggggtaccatgacgaggtggacatggagttcctgggcaacgtcaccggcgagccgtacacgctgcacacgaacatcttcgtgaacagcgtcggcaaccgcgagcagcaattccggctctggttcgaccccaccaaggaattccacacctactccgtcgaatggacgcccaagaacatcatattcctcatcgacggcacgccgatccgcgtgtacaagcacgagccctcgctcggcgggacgttcccgacgcagcggcacatgcggctggacgggagcctgtggaacgccgacgactgggcgacgcagggcggccgcgtcaagacggactggacgcgtgctcccttctacgcctactaccgcaacttccgagtcacgccgtgcgcgccgtcgtccccgtctggcgtcgcgtcgtgtagcgatgagccgccggcgccagcggtgctgcaaaaggtgcgagcggagcatctgctctacgactactgcgaggatcagaaccggttcaaggacacggggctccctaaggaatgtaccgcagactagatgaag

SEQ ID NO: 97540 - DNA, 1045 bp, Zea Mays
gtaacggatactacaacgttgccttcccttttgttttcacggtgtatgtagtacagtagaattcacgttattatctttatgaactccctttcagtaacaaatctcacaaaccgtaaagaaaaacacagagagaaagaagaaaacattcaagggcactagtagtgtataaatgtgcggcaaaatgtacatggaatggaaggcaacaacatctgtcctgccctgtcctgtgcatccatccatcaagaacagcggtgacgaacaaacaccattgatgattaattagatgaggaacaggaagcaagaaatcgtcgggggggcagggcagggcactgtgtgggacggacggcgaccgcgcgaacggatcggggataacaaacaaaccaatgaatcagttgcgggagcactcggcggggaagccctgcgggaagcgccagccgtcgtcgcagtagttgtagtgcatgtagttctgcctggcccaggcgacggtgccccactcggcggcgtcgagctggcggctcatccagcggtcggtgccggcggggcaggagagcgggcggccgtcgccgtcgggcacgcaggcgtcggcggagtagccgcggtaggagacggcgaagggcgcggcggaccagtccaccttcaccttcccctgctgcgtggcccagtagctgccgtcccacagcgtggcgtgcaccgacatgggcttcccgcccgggtacgccaggtccgggtaccgcttgaagcaccgcacgaagaggtcgtccaccttgaagatgacgttcttgtcgttccagatgatggtgtaggtgtggaagtcggcggccgggtcgaaccacaggtagaactggtgctccttcttgccgtcgccgttggcccacacgttggtgttcagcaccacgggctgcccgctggcgttgcccatgaactccatgtcgatctcgtcgtgcccgggcccgtcgcccgacgacaggtagaaggaggcggctagctgtaggccagtagctgactggctagtggagtgatgatgaagccgtgaagcaactggtgc

SEQ ID NO: 97541 - DNA, 360 bp, Zea Mays
atggagggagtgcggctgagcctgaggtgtggccgatccgccgccgccgatggcctaggttatagaatagagatgaagtatcgtgtgcggctgaccggctgtgcctatgcaggggcgcgcccgagcgaggcgggcggagctcagtgcctcggctgggggcgggttcacgccttcgcgggaggagctcagctgctcagtgtccgcggagatgaccttggtcatccagagcaggcgggcggcctaggcagatcttgggtcggcggcggctccgtctgggtgtgggtaggtccagaaggagctaggaggcagacgagggcactgccgcctagcgtcgacggctcggagcgatggaactcatag

SEQ ID NO: 97542 - DNA, 406 bp, Zea Mays
ggtggacttccagatcgtacttagggatttgcccaaacttccggtgaaggcacctgatctttgctttgggaaataagggatgtagcagcacggccaccacacttttaaataagggaaccactgcttaataatgatgttaaacatggagggtcaagtctaggggattattacattctaatcattcatggtagttgaactgtttagtttggtgggttgagttgtctatcttttgtctggtcatgaatgttcatttctaccattgcatttcgattatactatgtcaattatctttcttttatatcctgtataaactctatgtttcccttgttatgctacttttcaagggaggtgctgccggattttgcaatactttctttctctgtgttgcataagttttgtaggaagg

SEQ ID NO: 97543 - DNA, 607 bp, Zea Mays
tggaacttattgaacattatttttattctgcatgtcacattcggtggtattattaataaaaccaatgctattactgcaaatgatgctatggctaacagctagcagcctagcactaacacctcaccaccaaaccatgtactactacaatctttgtcctctcattcagtgcagcagttctttgccaaataacccaacaatggctcgtccagggcactcttgcttcaccagggattccccaaccaaaacctacagcaacaacaggcacactccaattaacttcagttcaagcacgcacggggaattgtaaagtgagaaaacatcacgaacaaggatttccatccttccgtaaatgcatcattatctacatagttaagcatttgagttcaagcaggctgtgtgtattccaatagtgtgtattccaatagtctacattcggggacaaaaactgaagtgaattgaagataagctgagaaaatctgtaaacagtacagtaagagaagataagggcataaggcgaaacaatactaatggggtgtttggtttgaagaatgaactagtccatcgtcttgtcactcctcactatttttatttggtttatgaaatagaa

SEQ ID NO: 97544 - DNA, 572 bp, Zea Mays
tggaggcatagtgggaggaggcgatgtcggcggcgacggatctgatgttgtggcacaaggtggcctccgtctccggggttgccactttggggctcggtacctacggcgctcacatgttccgccccaagaaccccgcgtacaaagaggtttgccacacggcatccctgtaccatctcgtccacaccgcggcgctgctaggggcgcccatcaccaagcgccccaacgttttcggagggctcctcaccgctggaatcgtgctcttctctggaacgtgctacaccgtggcttatcttgaagacatgaagttttcttcaccggcaccattggggggctttgcgtttattgctgcttgggctagcctcctcttctaattaaattgtgattttccaagaaaacaaaaaaatcataaacctctctatctggtgttttattagattgtgaaaaatatacttgaaagtgtatacagtggacagtatgcgcctctggttaataattcaatctgtgattcctgtgtttctatgatatgcttgctgctcatgatatgttttcagttggacatgccagtgaaattg

SEQ ID NO: 97545 - DNA, 171 bp, Zea Mays
atggcggccgcggagcagctgaaggagctgggggagaagctgcaagcggtggcgccggctcctgcggacgaactcgccaagctcctcgaggtaataccgatagcactatggaaccaggatttaaccgtggaatgctcacttctaatagagcagtcaccaatgttagtgtag

SEQ ID NO: 97546 - DNA, 1020 bp, Zea Mays
atggggagagcgaggcccggttcccgccgacgctgcgagtctcgcattgcagagcagaacctggagttcaagaccaagaatgatgtgaccaagaatgatgtaatcgaaacactgaatatgattgtcaaggaaaagtcacaaaagattactactatgcagaatgaagccaaagggtctttagctgcagaggagcaggcaagcaaggccaatgcactggccattgagctcgagaagcagaccgagaagctcaagaaggatattacaaaacaaaaaataaaaaaagaagctctagaggctagggctggcaatgctgataagaaggtgcaagagctaaatatgaagctggagaagctccagaggacaagcagtgatcaaaagcgcaggattcagaagactggacatgctcttaaagctgctgaggacgagctgatgaaggctcagttggaaacaacaacaaaagtaaaacagcttagagaggtcgaaattgtcgatggaagatcagaaagtcgtgacaatgacatgatgacaacacatggcactaaagatagatttgtggtcatgggactccacactgagcagcggcggctggagcactgcgcactggctggtggctgcttcactgtgcactggctggtggctggcggctcgctggagcacaggagcagtgcgcaccgtgttttggatacgaacagcagcagaatacgaacagcggctggacctgccgacctgggcggttgtgcactggcggctcgctggagtaggagcactgggcggttgcgcctggacctggagcactgcgcactagcggcggctgtaggtggagggaggaccggaggagggaggaggggggcggcggcgtacctggagggcggaggacggccgacggcggcagcgtctggctctggcggctccgcggttgtgcttgtgggcagtttggcggctagggctgtgcgtgtgggcagtttggcggctggagcaagcttgctggttaaaggcccattaaggcccaagaactcatag

SEQ ID NO: 97547 - DNA, 369 bp, Zea Mays
ttgcagttaccaacaattattcagtattgccacatctccatacaaatgcatgcacttacaactttgagtattgttttatataccaggcaactgtacctaaaacttgtccataaggtatttgacaggcaacatcgcaatagactcaccggagccaaggatgatgagacaacgcaatctggtgttgcgcggtctcgatgctgattggccactgtgccacaacacgtagaagaagcggactgaagtaaagcaagctccggagcctggagcctgaaggggaccaatcgatttggccagcaaggagaggggagcgcgcgtgcagtgctgagctccgaagcctagagcctggcggcgggtgcgcggctggcaggt

SEQ ID NO: 97548 - DNA, 519 bp, Zea Mays
atggcagagggagcgaggtcggaacaaacctgtagcgctcggcgcgaagaggaagaggcggcggagggagcgacgacgccgaggagaagcccccaagcggggccaaagcgagctgacgtgagggagagtgccgccgaagtatccagaggcatagtgagctgggattacaagaagctaagagacgatatagtaccctgtatccgttaccaagttggtgtaccccaaaaccaagatgagacacattaccaggaggggtacagaaatggctacaatgatggtttggcatctggaaaggaagaggggaggcagaatgccttcacagctcgggtcaggaagaatatcgagcaactggctgcactggtgggcagctatccgctgtccgatccggagaatgaacaaattcaagacatgatggagaagataaggctgaaattcagggtcatcactgcaagcttaggggtgaagttagagtatgaagggcaccccaaatcatctaaacaggatgctgaggatctgtga

SEQ ID NO: 97549 - DNA, 1126 bp, Zea Mays
atgaacaactagctgtctattgactaatttactaactactagctgtcaaaatgtgttgcagccttgcaggagctaggaacatgcaagagtaagctcagctaggaatcagatatgtctactggccttctttttatacttactatgactcatatcgtcatatatagtagttaattagttatatacataatatatatatatatatatatataatttatggctatattgccaaaacgcctagaaaagcgcctagaagcgcctaagaccgagtactcccgactaggcgctaggcaatgggtcaccgcctagattccgcctagcgcctagctgaaccttgctcgctgacacaagagacttctagaggcaacagagacttctagaggcatcacagacagatagggtgagaatgtgaaatacgaagggacccttctgccttctccgtcaacgacggcgaccatggtagcagtctgtgccccatgcccttctcacatactccgctcctccgcaggatctcctcctccccacgccatgcgcttcttctagtgagccctcacgccatggatagggagcaacatgagaagtttggaggtccacgttgacgagagcaacagtggtgagcctcgtcgtgttgtgtcccgtcttcaatccgtgggcttgaagatttcctgttcgactgctgttctcgacagcacagtcattcctcaacgtgcctctaattgatgcaggattatcaacaactagtttggaagtcttgcaagttgtatttaccacaggcttttcaacatcatcaacagctggtttggaaaccttgcaagttcaatctgcgacagcaattggtttggaaatcttgcaagttctatctaccaccaactttatcaacatcatcaacaactgctttgaaaaccttgcaagttctatctacgacagcaggttcgttactttccaagaaagggacaaaaagaagactgcaaccaacattttccatcccctttcccctcttcttcttcgctcatttttgttgcatttcctttgggaaacaacctccagatatctgatctgctgggtttgtgttctattcttttcttttcttttcccccttcttttatagtttcctcatattaggttgtgc

SEQ ID NO: 97550 - DNA, 104 bp, Zea Mays
aaagattactaccaacatgaatcgatcaaaggaaagcttatagtacaagtgagagaacaaggattttggaacccttgcattgagtaaatcaagcagttagtcag

SEQ ID NO: 97551 - DNA, 727 bp, Zea Mays
accccgccgaccgcaacgaacgaaacccaccggataaaaccgccttgcctgcgcactggtgcctgcggaaactgcgactcctcctcggtcctcgcagacgattcaccccgcaccgcgagcgaggagaggagcctggccgcgagggcgtcgacgctgatggcggcgtggtggcggaggaaggtggtgccctgcgcgcgccgcgcctgggccgccctcgccgcgcggctccgcgcgcgtaagcctggcagtggtggcattctgaagctcaacgaggacgtgcagacttgcggctacaaggacgtccaggtcatgttcgacatgttgacatcggaactcgaggcagccgctcaagcccagaagccaccgacgtcgccgccccgcaaaggaggagcgctaccgcctgcatggcccggccggtcctcgtcggcgatcactgctgcacagtaggtacctgcgaacagtaccattagagaggcgtccgccgccccctgcccttcttccgtcagaaagagcgaaaaattgcagcgagaacaataagatgaggagtaagcgcgagagatagagaggctcccaaacatcgtgtttaggtgtgtagatagaggatgatatgaaccagtgctgaacactttttttcgcccatcggaagaagagagagcaagaggggttactttcaatcccaaggtgtatttttattttgtttcaatatgatccatgctggtttctggtt

SEQ ID NO: 97552 - DNA, 760 bp, Zea Mays
accccgccgaccgcaacgaacgaaacccaccggataaaaccgccttgcctgcgcactggtgcctgcggaaactgcgactcctcctcggtcctcgcagacgattcaccccgcaccgcgagcgaggagaggagcctggccgcgagggcgtcgacgctgatggcggcgtggtggcggaggaaggtggtgccctgcgcgcgccgcgcctgggccgccctcgccgcgcggctccgcgcgcgtaagcctggatatcacctggacaccgtggatcatgtgccaggcagtggtggcattctgaagctcaacgaggacgtgcagacttgcggctacaaggacgtccaggtcatgttcgacatgttgacatcggaactcgaggcagccgctcaagcccagaagccaccgacgtcgccgccccgcaaaggaggagcgctaccgcctgcatggcccggccggtcctcgtcggcgatcactgctgcacagtaggtacctgcgaacagtaccattagagaggcgtccgccgccccctgcccttcttccgtcagaaagagcgaaaaattgcagcgagaacaataagatgaggagtaagcgcgagagatagagaggctcccaaacatcgtgtttaggtgtgtagatagaggatgatatgaaccagtgctgaacactttttttcgcccatcggaagaagagagagcaagaggggttactttcaatcccaaggtgtatttttattttgtttcaatatgatccatgctggtttctggtt

SEQ ID NO: 97553 - DNA, 1531 bp, Zea Mays
gcgggaaggaagacgcctctctagattggatcgaattccttcgtttctctcctcaccgaggacggcggagagagacgaggaggaaaggcccggcgcgacggagaaggcgtcaacgtcaatttggttgtgctggttcagttttgtcagagctctttttcattcttgcaagcaaatttccgcagctgaatatctgatatgggtgaaaccatgggaaggagaacagtcagtggccttcttgtcaccaaaggaggctcaattcttgtcttcagggaggaaagcccacgccacaaggccaccgcatgttgtacccgcctctggtgcagcagtaagcttttcccgaacaaagacacgaatacacgcagggcatccagggaaacatcggctcttcagagatcacaagtgtctaggaaatccaactggatgtcccatcaaggaagtatttcttatgatcgaagcaccagtaggaatacagcaagtacttttggtgagactcacaacaaaccaagagaaaaagaaaatctcgggtgtgatctaccggctcggttgaaagaaaggatcaatacatccaggaaaagctcattgggtggactgggaagtcctaacaaatcatcaacaaacacatcaagcagtagccgatcggtttcaagatcagtatgtcggccagcatcgagaatgagaaaggatggaggaaggggcgcagaatctatgaggatgcatagagccagagatagtggtggtagctcttggggagatgtgttgacaagaaattctgaccaagattcttcacacaggtctctatctcgaaacgtgttgaggcataggagcagatctcagcaagggccaatatcatcattggaggataatttagatgattccagtgaatactggcattttgatacagatgacagtgaagaggttgaggatgactatgcctttaatgatcagcataggggaatgagaatggacattgataacatgtcttatgaggacctacttgcgcttggggagagaataggtactgtaagcactggtctttcagatgatgcgctttctgagtgtctgaagagaaacctctatgtgcccacaacttcaagcagcaatgaagatggtgacatcaaatgcatcatatgtctggaggagtactcttctggtgtggaggtggccaagatggcatgcgagcattactaccataccacttgtatccaacagtggcttcagcaaaagaactggtgcccgatttgtaaatgtgacgcttctgccattagctcatagtgttcttgacagtaacagaagtatcagttcattgtaatcaaataggattacacaagtttttttggttctagaacaaattattcacttcaatcctatactgctcttcaattcacactacacttgtcataggaagcaggaaaataagtcctagaagaaaggattttctcagttttgatgttgaagttgaagagtagatgatagtgttgccattctttacatacaaaagcgtcaaaaattcagcattaatagtgcagttttt

SEQ ID NO: 97554 - DNA, 1475 bp, Zea Mays
gcgggaaggaagacgcctctctagattggatcgaattccttcgtttctctcctcaccgaggacggcggagagagacgaggaggaaaggcccggcgcgacggagaagctgaatatctgatatgggtgaaaccatgggaaggagaacagtcagtggccttcttgtcaccaaaggaggctcaattcttgtcttcagggaggaaagcccacgccacaaggccaccgcatgttgtacccgcctctggtgcagcagtaagcttttcccgaacaaagacacgaatacacgcagggcatccagggaaacatcggctcttcagagatcacaagtgtctaggaaatccaactggatgtcccatcaaggaagtatttcttatgatcgaagcaccagtaggaatacagcaagtacttttggtgagactcacaacaaaccaagagaaaaagaaaatctcgggtgtgatctaccggctcggttgaaagaaaggatcaatacatccaggaaaagctcattgggtggactgggaagtcctaacaaatcatcaacaaacacatcaagcagtagccgatcggtttcaagatcagtatgtcggccagcatcgagaatgagaaaggatggaggaaggggcgcagaatctatgaggatgcatagagccagagatagtggtggtagctcttggggagatgtgttgacaagaaattctgaccaagattcttcacacaggtctctatctcgaaacgtgttgaggcataggagcagatctcagcaagggccaatatcatcattggaggataatttagatgattccagtgaatactggcattttgatacagatgacagtgaagaggttgaggatgactatgcctttaatgatcagcataggggaatgagaatggacattgataacatgtcttatgaggacctacttgcgcttggggagagaataggtactgtaagcactggtctttcagatgatgcgctttctgagtgtctgaagagaaacctctatgtgcccacaacttcaagcagcaatgaagatggtgacatcaaatgcatcatatgtctggaggagtactcttctggtgtggaggtggccaagatggcatgcgagcattactaccataccacttgtatccaacagtggcttcagcaaaagaactggtgcccgatttgtaaatgtgacgcttctgccattagctcatagtgttcttgacagtaacagaagtatcagttcattgtaatcaaataggattacacaagtttttttggttctagaacaaattattcacttcaatcctatactgctcttcaattcacactacacttgtcataggaagcaggaaaataagtcctagaagaaaggattttctcagttttgatgttgaagttgaagagtagatgatagtgttgccattctttacatacaaaagcgtcaaaaattcagcattaatagtgcagtttttgtttgccatcgttttcacta

SEQ ID NO: 97555 - DNA, 1813 bp, Zea Mays
gtagagcaaacatatatgaagagacaattttgtactacaggaagctcaagggtgctggcttccgaccaaatgcatccaacttttacactatgatcaacctactagcaagacatgatgacaatgaaactgcagctgaaattctacaggacatgagggcagcaggctgtcagtgttcatcaattgttactttttcttgttcgggcttatggagcagtaggaagaatgcataaggttcttccaattctacaatcttgtttcgacaagattttgcttgatgccacctcatgctctattttagtaacatcgttggttcaaaattctttactggaagaagctttgtatattctgcgtgaaaagaagtggaaagattctgcttttgaagacaacttataccatatattgatatgttcttgcaaagagggtggcaattacaatgatgctgttaggatatacaatcagatgcctaagtctgaaacacatccgaatccccgtatctcttgcactatgattgatgttttcagcacgatggaaaggtttgccgatgctgaaactattttgcttgaactgaaggcttcagcttctgtacttgatatgattgcttacagtgtcattgtgaggatgtacattaaagcacgacgactaaaggatgcttgttcagttttggcagaaatggagaaacaaaaagaaataattcctgataaatacctttttctcgacatgcttcggacttaccaaaaatgtggtctgctggagaagttggctgatacatattactggatacgtaagagtcaagttaaatgtgatgaagccatgtataactgcattattaattgctgtgggcgggctatacctgttgacgagctgtccagaatttttgacgaaatgcttcaacagggacacttagcaaacactgttaccttcaatgtgttgctagatatatatggaaaagccgggctttttaacagggctgaaaaggtctttatcatggctcgcaagcagggcctggcggatatcatatcatacaatacgattattgctgcatatgcaaaaggcggcaattttctgagtatgaattattttgtccaaatgatgcaggacgcagggtttcctgtttctcttgaggcatacaactgcatgctggatgcttacggaaaggcagggcgattggaagagttcgcttctgttttgcagaagatgaagagagcgaaatgcaagtttgatcactacacttacaatataatgatcaatatctatggtagaagaggttggatacaagatgtttcgaatgttcttgcggagctaaaggaccgaggtgtggagccagatctgtacagctacaataccttgataaaagcatatgggatagcgagaatgcctgaagatgccgtcaaactgatgcaagagatgagggttaaaggcatcagccctgatcgagtgacatatgctaacctcattgctgccctgcaaaggaacgaaaatttcctagaagctgttaaatggtctctctggatgaagcaaacaggagttgcagggtgtggagcacgaacctgaactcctgaaacgttgggttttgtttcgagattatccagatcggactgttgtcttcatgttgcaattaaatacatactttttttactgtatagatgagtgtatctgattgttctgcaagtgatacagacattcagaaacttgtacgttcttatacaaagacgaattcaatcatgcggataggaagtttttgtcatacctatcatactgttgtaaatttacaataacagtgcacaatcgaagtcaaacaaggcatacagcaatt

SEQ ID NO: 97556 - DNA, 1184 bp, Zea Mays
aattatgcctccactccattaggttcgccctgtgtcggtcatccctctccccttctcttctattcctgcgtccctttccacaacgctgtctcgttctctagctcactagctttgaccgttttccaggctctagccacccctgtgtcccccagcgatcccccaccatgggctcccactcccacctcggccaagcactacaagcccaccaccaccaccaccaccaccaccgcggcggcgagtgcgagccagcgacggcggcggcggcgaggtcgcggtgggcgcccaagccggagcagatcctgatcctggagtccatcttcaacagcggcatggtgaacccggccaaggacgagacggcgcgcatccgccgcctgctcgagcgcttcggcgccgtccgcgacgccaacgtcttctactggttccagaaccgccggtcccggtcgcggcgccgcgcccgccagctgcagcagcagcaggccggctcgggcccgcagcacccaaccgccgccgcagccgccggccacgtccacggcgccaacgccaacgacggcgtgtcactctacgccatgcacgggcacgctggccagcagcagcaggcgcgcgccgccggcctgcccgcggtcgcgccggtggtgctgccgcctgccgccgtcgcgtcgtcgccccgcttcttcggcgacgaaatcgatactgacggcggggacgacctcttcgccatctcccggcaaatggggctcatgtcgcgcggcggcgagcagcatggttgcggctacgtggctaacaacgacgcctcccagtcccacctgctgagctaccaaccaactgggacggcgacgacggcggcggcggcgtatatccaggtgtccatcaacggcgtggtgtacgaggtgccaggcgccggggcattgctggacttggcaggcacgttcgggcgcgatgcgatgctggtccactcctccggcgagatcctaccggtgaacgagaacggcgtcctcatgaagagcttgcagatgggggaatgctactacctggtttcgaaatctacttaataaccagctgctgcttgttgcctgctgctgcgtattatgatgatttgagtaatgtgctagtaagaagcatgtaacgacaattgatgagtagattgttaagtcgtccatatgttatactatcttagttctcgaata

SEQ ID NO: 97557 - DNA, 2539 bp, Zea Mays
gttttcatcgggtttgactgaccgcgtcgcgccaaccccaccgccggcgccccggccacctatataagccccggtacgtcccacgcctcgccggcagcagcgttccagaagctgttgtgattacgtaccccgcgttcaccatccattcactgcccggcgcggccttctcctgccgagtgacgtgacgatggactcggcgacgtcgggggcgatggagctggtggcggcgctgctgcgcggccgtgtgccgcccgagctaggcggggagggcgccgagggccgggcggtcgtcgccacgctcgccgccgcggtgctcggcgccgcgctcttcgtgctccggaggcgcgccgccgccgggaagaagcgcaagacggagggcgctgccgccacggagaccacgcgggccaaggccaggggcgttaaggtgagcgccgaggaggaggaggagaagccggccgacgacggcaggaagaaggtcaccgtcttcttcggcacgcagaccggcaccgccgaggggttcgccaaggcgcttgctgaggaggcgaaggcaagatatgacaaggcgatcttcaaagtcgtggacttggatgattatgcagcagaggatgaggaatatgaggagaagttgaagaaggagaagctagcgttgttcttcgtcgcaacgtatggagatggtgagccgactgacaatgctgttaggttctacaaatggttcactgagggaaatgagaggggtgtctggttacatgattttgagtatgctgtgttcggtctgggcaatcgacagtacgagcatttcaacaaggttgccaaggtggtcgatgagatcctaacagaacaaggcggaaagcgccttgttccagttggtcttggagatgatgacaaatgcattgaggatgacttcaacacatggaaagaaactctctggccagagttggatcgattacttggggatggaaatgatatctctacaggcactacatacacagctgctattcctgaataccgggttgaattcatgggtcctgaggaggcagctcatctggagagaaactccagccttgcaaatggccatgcagtccatgatgcccagcatccttgccaggctgatgtggcggtgcggcgggagctccacacccctgcttctgatcgttcgtgcactcatctggagttcgacattgctggaactggtctcacgtatgaaacaggcgaccatgtgggtgtgtgcaccgagaactgccctgaggttgtagaggaggcagagaggttgctgggctactcgccagacacatctttcaccatccacgcagacagagacgacggcagtcctcctccattcccgtccccaaccacactgaggaatgcgctcgctagatacgccgaccttctgaattccccgaagaaggcttctctggttgcgttagctacgtatgcttcagatcctgccgaggctgaccgcctgacgttcttggcctccgccgctgggaaggatgagtacgctcaatgggttgtggcgagccagaggagcctgctggaagtcatggcagagttcccttcggcaaagcctccactaggagtcttctttgcggctgttgcccctcgccttcaaccaagatactattctatttcatcttcaccaagtatggcaccaaccaggattcatgtcacgtgtgcgctcgtgcacgaaacgacacccgctggaagggtacacaagggagtctgctcaacctggattaagaacgctgttccatcggaagggagcgaggattgcagcagctgggctccgatatttgtgaggcaatcaaacttcaaactgcccgctgatccttcagtgccgattatcatgattggccctgggaccggtcttgcacccttccgtggcttcttgcaggagagactggctcggaaagaatctggagctgagctcggtcgctctgtgttcttctttggatgcaggaacagcaacatggacttcatctacgaggatgagctgagcaatttcctcgagcagggagcgctgtttgagctggttctcgccttctcgcgtcagggccctacaaaggaatatgtgcagcacaaaatggcacagaaagcatctgaaatctgggacatgatctcccaaggtgcttacatctatgtctgtggtgatgccaaaggcatggccagagatgtacatagagttctccacaccattgttcaggagcagggctccctcgacagttctaaggccgagagctttgtgaagaatctccaaatggagggcagatatctgagggacgtgtggtaaaagacgattgtgaaatataaacgggcaaaaaaataccctagtattcaggggataaacatccagtcgtattatacatgtgtacaactattgccagaagagtaatgataatggattagatcagatatttttatttggttctctattttgtttattctctctcgttttcttttctttttgaggttctctctagagcattttttgtagctatgtatgataaatcctggatatgtataagataagaagaattttggc

SEQ ID NO: 97558 - DNA, 612 bp, Zea Mays
tacacacacctcgagctcacatacactcccatctccccctctatctggagagagagagagaaagagacatggggtcatctctctccccgtcatccgtcgccgcgctcaccaccgcagcccatgggcaccgctaccacctgtcctcctcctcctcctccgactactacgaagacgacggcttcgagttcacgccactcctacccaggccgcggcgccggcacagcgcgcgcacggagcgtccaagaaccgtcgcccaggctgcggccacgacggcggcccagccgcagcctccccagctgcgcgcgcgccgcggagcgccaagcgtcgtggccgcgacgccggcggcgccaccaacaccaaggaagcagcaggtgcggtggcacgacatggcgttcgggtccgcgcgcgtgccggcggccatggacatgggcgagatcaggaggcgcctgagggcgcggcagctggctctggccggtggccccgccgggaacgagcggccgccatcctccgccgcggggtgggcgccgtggaggctcatacggtcgctcagctgcaagggcctcgagcccgtggcggctgccgcggcgccggtgaggctggtgtagtgtaggc

SEQ ID NO: 97559 - DNA, 2043 bp, Zea Mays
atcctgttctcgaagccgtctgaccttgcccctaccccgctcattatcgttgcgacgttggcccgtccgacatgtccgatctcgctcgtcgtgacaacgcgacccatcctcgacggccagtgagcccatgcactcaaccaatgagatgatattggaaaaaaggaacctatcttgtgagattcagattcctgttgcatgttctgctgtcgatgccctcaaattactggatcacattattgaagctgctagagtagtgtacatggacgagctagaactttattttgcaggagatgatgtcggtccattctctgcgaggaatgaacttgaatctctaaatcttttgttgaaaacaatgaaaaaattgcttctaacttccaacacggctgccaaggaagtactgcagatactacatgatgagatagttgttaagctcaaatctgttggaaagtctgacaatgcttggatggttgttcaaacacagaaccatgatgctgaggattctcttctgaaatggggggagcatcttggtattaaatctagattgcagatagcctattttcagggagctggaagaggaatgatagcttctgaaagtataggtgtgggggatattgctcttgaaattccagagtccctcattatatctgatgaacttctttgtcaatctgaagtgtttctttcattaaaagattttaataacatcacatctgagactatgttattattgtggagcatgagagagcggtataatctaggttcaaagtttaaaccatattttgatacgctcccggcaaattttaatacaggtttgagttttggaatcgatgcacttgctgcattagaaggaacccttctttttgatgagataatacaggctaggcagcacttgcgccagcagtatgatgaattatttcccttgctatgcacaaatttccctgagatattccggaaggatgtgtgcacatgggacgattttctgtgggcatgtgaactatggtattcgaacagtatgatgattgttctaagcagtgggaaattatcgacttgcctggttcctgtcgctggacttctgaaccactcggtatcccctcatatcttgaactatggtcgagtagatgaagctacaaaatcgttgaagtttcccttgtctcgaccctgtgatgcaggggagcaatgctttctcagttatgggaaacatccagggtcgcatcttcttacgttctatggattcctaccaagaggagacaacccttatgatgttatacctttagatcttgacacatccgcggatgacgaggacatcacagctcagtcttcggcgactacaagccaaacaactcatatggttcgtgggacatggctgtcgacatccggaggattccccacgtatggcctgccccagcccttgctgacctatctccgtgctgctctaggctgtgaggtagacgaacccgctgcagaggctgatatgaaggaaagcgacaaggtggtgctggagacaatcctgtccatattcagtcccatgcttgaagcgttgttgcctgagcaagatgatcccaaccgggagagcgccagttgggatgtgaagcttgcatcggactacaaagacctgcagaggaagatagtatcgtccatcgtcacttcctgtacctcagccttggaaaatctgtagctcttgctggatggaagtgcttcactgatgaattgcaagagcacacgccctgggggccctgttggaatgcctctgctggcgtgtagatggccaagctattgcagcaactgcaatctgtgaccatctctacaaaccgaagctgctcgtcgtgagttgcttcatccgaggaatgcggagacacggggtcgtgctcccgaggctggcttgtgtgattttatccgcacctgattgttaccgcatactgtagttgcgtttggtgaaagaaagctacttttgagctagttcattgggagccaaacttgctttttggtgaacgaaagctactttggaactaatttcgtcgcaatgtggttgtggtccatgtgctcctg

SEQ ID NO: 97560 - DNA, 1991 bp, Zea Mays
cttctcagttctcacgtccattcaggttctacatcgactgatcacgtttcaaacgaaccttcccccatccaccagctccagaatctccgtcgcccgccgcccaactcaaaagtggattccaaaatccttcgtccagctgctgactagcgcagtcccgtcgctctcccactccttttcctccttaaatttccacacgaaaaattctcggtggacagaaaaaacaaggcaaagatcagaagagaacgcggaagtgatggccatggatccaagcgtcgcggcgcgccagagcgaggaggcggcggaggccttcttccgcgcggcgccgccgctccgtgaccgcgaccgtctcgccgccagcctcgccgatttcctcgcccgccactccgccgggggtggtggagtggtgtgcgtcacctccggcggcactacggtgcccctggagcagcgttgcgtgcgctacatcgacaattttagctccggccagcgcggtgccgcctccaccgagtattttcttaaggccggctacgctgtcatcttcatccatcgccggtgagtccttcgaacccggcattttctgttcaatttcaacagagacggggtggaactgaactagccgcatgctaaaaaagtttaaatgaaattgccggtgtagttctgttttgtgtagctaggctcggcttgtgaaacctttcagaaccaaatgtcacaggtggctcggtgtagttagccgcaagctgtttatgttcagttctgaataccaatataaggcagaagttgtgagtgacacttccctctttgcagtgggagcaagcagccttactgtaggtttcttccagaggattcctttctcgatctttttgagctcggggaagactcagagatccaaggtttggagactgtaaacctgaattatgtatgtcatgcgaactgacccaaaatctgtttggtccagcagctccttacttgtatggttttatgttgattgcctttttcttctttgtttatctcctttgcttggatgttcaaccttctcagctcattcctttactgtaatttcaagtaatgttcaaattagtatatgcatttgacttctgaaacatctgtttgtatctttgttatgcatctcagttccacagtctcattcatcggtggtcaaggcagcaattagcaattaccggaaggcaatcgatgaatgccttcttctcaaactgcctttcacaacaatttttgagtaccttcagttactacaaatggtggctacttctatgaattgcttggggcaccgtggaatgttttatcttgctgctgcagtttccgacttctatgttccatgggaaagtatggctaaacataaaattgagtcagcaggcggccctttgaacatgcaactcaaccaagtccctaagatgcttttcatcctccggaaaaactgggctcctgctgcattttgtgtatccttcaagctcgaaacagatcctaacattctcctacagaaggcagagatggctttgaagaagtacggtatgaacgtcgtggtggcaaatgaactcgcaaactacaaagatgtagtggtgatggtcacaagcaacggggggaggacgaccgtgagcaggacgagcaaggcggaagaccttgaagtgcagctaaccgacctcctggtgaagatgcactcggagcacattgcacagcccaattcgtaggaccatcgagcgagcgagatggttaaatcaggggagtatgggcgattctacttctactcgcctagcaaattgtgatatacagagttcaccgggtttgtcataaagatgctcatcaatgtgctgcagcagattaattcaaaaaaaaaatatagctgaatagctcacaccagtacatgcaagtttttgaaaataacctaggtaaagcaggtgatgtgatgccactgttcatgtggcgaagccgccagcctagctatcgagctttttaacaaatttgccgctctcaagtcaaac

SEQ ID NO: 97561 - DNA, 1525 bp, Zea Mays
cttctcagttctcacgtccattcaggttctacatcgactgatcacgtttcaaacgaaccttcccccatccaccagctccagaatctccgtcgcccgccgcccaactcaaaagtggattccaaaatccttcgtccagctgctgactagcgcagtcccgtcgctctcccactccttttcctccttaaatttccacacgaaaaattctcggtggacagaaaaaacaaggcaaagatcagaagagaacgcggaagtgatggccatggatccaagcgtcgcggcgcgccagagcgaggaggcggcggaggccttcttccgcgcggcgccgccgctccgtgaccgcgaccgtctcgccgccagcctcgccgatttcctcgcccgccactccgccgggggtggtggagtggtgtgcgtcacctccggcggcactacggtgcccctggagcagcgttgcgtgcgctacatcgacaattttagctccggccagcgcggtgccgcctccaccgagtattttcttaaggccggctacgctgtcatcttcatccatcgccgtgggagcaagcagccttactgtaggtttcttccagaggattcctttctcgatctttttgagctcggggaagactcagagatccaagttccacagtctcattcatcggtggtcaaggcagcaattagcaattaccggaaggcaatcgatgaatgccttcttctcaaactgcctttcacaacaatttttgagtaccttcagttactacaaatggtggctacttctatgaattgcttggggcaccgtggaatgttttatcttgctgctgcagtttccgacttctatgttccatgggaaagtatggctaaacataaaattgagtcagcaggcggccctttgaacatgcaactcaaccaagtccctaagatgcttttcatcctccggaaaaactgggctcctgctgcattttgtgtatccttcaagctcgaaacagatcctaacattctcctacagaaggcagagatggctttgaagaagtacggtatgaacgtcgtggtggcaaatgaactcgcaaactacaaagatgtagtggtgatggtcacaagcaacggggggaggacgaccgtgagcaggacgagcaaggcggaagaccttgaagtgcagctaaccgacctcctggtgaagatgcactcggagcacattgcacagcccaattcgtaggaccatcgagcgagcgagatggttaaatcaggggagtatgggcgattctacttctactcgcctagcaaattgtgatatacagagttcaccgggtttgtcataaagatgctcatcaatgtgctgcagcagattaattcaaaaaaaaaatatagctgaatagctcacaccagtacatgcaagtttttgaaaataacctaggtaaagcaggtgatgtgatgccactgttcatgtggcgaagccgccagcctagctatcgagctttttaacaaatttgccgctctcaagtcaaacttttatggtggaatagcctttttgatc

SEQ ID NO: 97562 - DNA, 1536 bp, Zea Mays
gtccattcaggttctacatcgactgatcacgtttcaaacgaaccttcccccatccaccagctccagaatctccgtcgcccgccgcccaactcaaaagtggattccaaaatccttcgtccagctgctgactagcgcagtcccgtcgctctcccactccttttcctccttaaatttccacacgaaaaattctcggtggacagaaaaaacaaggcaaagatcagaagagaacgcggaagtgatggccatggatccaagcgtcgcggcgcgccagagcgaggaggcggcggaggccttcttccgcgcggcgccgccgctccgtgaccgcgaccgtctcgccgccagcctcgccgatttcctcgcccgccactccgccgggggtggtggagtggtgtgcgtcacctccggcggcactacggtgcccctggagcagcgttgcgtgcgctacatcgacaattttagctccggccagcgcggtgccgcctccaccgagtattttcttaaggccggctacgctgtcatcttcatccatcgccgtgggagcaagcagccttactgtaggtttcttccagaggattcctttctcgatctttttgagctcggggaagactcagagatccaaggtttggagactgtaaacctgaattatttccacagtctcattcatcggtggtcaaggcagcaattagcaattaccggaaggcaatcgatgaatgccttcttctcaaactgcctttcacaacaatttttgagtaccttcagttactacaaatggtggctacttctatgaattgcttggggcaccgtggaatgttttatcttgctgctgcagtttccgacttctatgttccatgggaaagtatggctaaacataaaattgagtcagcaggcggccctttgaacatgcaactcaaccaagtccctaagatgcttttcatcctccggaaaaactgggctcctgctgcattttgtgtatccttcaagctcgaaacagatcctaacattctcctacagaaggcagagatggctttgaagaagtacggtatgaacgtcgtggtggcaaatgaactcgcaaactacaaagatgtagtggtgatggtcacaagcaacggggggaggacgaccgtgagcaggacgagcaaggcggaagaccttgaagtgcagctaaccgacctcctggtgaagatgcactcggagcacattgcacagcccaattcgtaggaccatcgagcgagcgagatggttaaatcaggggagtatgggcgattctacttctactcgcctagcaaattgtgatatacagagttcaccgggtttgtcataaagatgctcatcaatgtgctgcagcagattaattcaaaaaaaaaatatagctgaatagctcacaccagtacatgcaagtttttgaaaataacctaggtaaagcaggtgatgtgatgccactgttcatgtggcgaagccgccagcctagctatcgagctttttaacaaatttgccgctctcaagtcaaacttttatggtggaatagcctttttgatc

SEQ ID NO: 97563 - DNA, 1883 bp, Zea Mays
gtccattcaggttctacatcgactgatcacgtttcaaacgaaccttcccccatccaccagctccagaatctccgtcgcccgccgcccaactcaaaagtggattccaaaatccttcgtccagctgctgactagcgcagtcccgtcgctctcccactccttttcctccttaaatttccacacgaaaaattctcggtggacagaaaaaacaaggcaaagatcagaagagaacgcggaagtgatggccatggatccaagcgtcgcggcgcgccagagcgaggaggcggcggaggccttcttccgcgcggcgccgccgctccgtgaccgcgaccgtctcgccgccagcctcgccgatttcctcgcccgccactccgccgggggtggtggagtggtgtgcgtcacctccggcggcactacggtgcccctggagcagcgttgcgtgcgctacatcgacaattttagctccggccagcgcggtgccgcctccaccgagtattttcttaaggccggctacgctgtcatcttcatccatcgccgtgggagcaagcagccttactgtaggtttcttccagaggattcctttctcgatctttttgagctcggggaagactcagagatccaaggtttggagactgtaaacctgaattatgtatgtcatgcgaactgacccaaaatctgtttggtccagcagctccttacttgtatggttttatgttgattgcctttttcttctttgtttatctcctttgcttggatgttcaaccttctcagctcattcctttactgtaatttcaagtaatgttcaaattagtatatgcatttgacttctgaaacatctgtttgtatctttgttatgcatctcagttccacagtctcattcatcggtggtcaaggcagcaattagcaattaccggaaggcaatcgatgaatgccttcttctcaaactgcctttcacaacaatttttgagtaccttcagttactacaaatggtggctacttctatgaattgcttggggcaccgtggaatgttttatcttgctgctgcagtttccgacttctatgttccatgggaaagtatggctaaacataaaattgagtcagcaggcggccctttgaacatgcaactcaaccaagtccctaagatgcttttcatcctccggaaaaactgggctcctgctgcattttgtgtatccttcaagctcgaaacagatcctaacattctcctacagaaggcagagatggctttgaagaagtacggtatgaacgtcgtggtggcaaatgaactcgcaaactacaaagatgtagtggtgatggtcacaagcaacggggggaggacgaccgtgagcaggacgagcaaggcggaagaccttgaagtgcagctaaccgacctcctggtgaagatgcactcggagcacattgcacagcccaattcgtaggaccatcgagcgagcgagatggttaaatcaggggagtatgggcgattctacttctactcgcctagcaaattgtgatatacagagttcaccgggtttgtcataaagatgctcatcaatgtgctgcagcagattaattcaaaaaaaaaatatagctgaatagctcacaccagtacatgcaagtttttgaaaataacctaggtaaagcaggtgatgtgatgccactgttcatgtggaatgtattgagtctatttgagttgcttcttagcgatgaatctggtaaaacgagtcaatgtatcttacgagattcggtttaggcgtagtctgggttgcaatcagtgttacttctgactacacaaactagatagatagtctattgaagtgagatgctacatataaaatgtaatctttattaaaaaataaatagattttagctaattgacagtaaaataa

SEQ ID NO: 97564 - DNA, 1054 bp, Zea Mays
aaaccctcgtccccctttcctcctcttcccccaaaccccgctctcctccgccggtccgcccccgccatcgcctgcactcccccggcctccacaataagccgcatcttgcatcacaccgacgccctaatgctctcgccggcctcctctcgctaggccgcgccgcggacgagcgtcccctgcacctgcacacccgcgcgaccgtgctcgcgcctgctccgcgagaaaacggcgcccctcggtttctgcttgtccttgtccgccggcggcgctgcggggaggagaggagccgggtacaacctgaggcggtccgcacggtcgatggtggcggcgcaggtgacgccggcgccactgctgcggcgccacggctcggcgcccccgtggctgtcgtcgtcgccgcccttcctccttcgccgccgcgcctcgtcgcccttctccctgcaccgccgcgcctcgccgccactggcgatttccgggtgcaggaggcaggactattcccattgctcagatatggctgttcgaggaagcagtgctttcaagctacgtttctatcccaacttagaagtacaaaatattgcacaagaatgggttaaagagagccggaggctgttctatctaagaactgccaacaatgtcacaaataacatctataagggaaacactcctctatggactggaatggtacaaaatgaactctctgaagattgcaggggtttgaactacacttatttgaataatttgagggaacgcgtatcgtccaaatcaattgtaaatagacatggtaataaccgagaactgatcgggcatagtacgataaatcagcatgtgaaatcagtgccagctccagtacgtgttgttaatgatagtgtcaagtgtttcagcatgcctagagcctctaaggtggagattccttggcctgcctattcaccagcggaggatcctttgcttgataaatctaatacagaggtaattttggagcttgaggataaagttcatgatggtgatgacaaaaagaaaaaaactgttgtaaaaaaggtggtttcacctttcccaacta

SEQ ID NO: 97565 - DNA, 2665 bp, Zea Mays
agttatttgagtataatgtctctgcaggtagcaaatattaatgccaaagaagagacaccagttggtcatggagaagtaatatgctttagcatctattcagcaaattctgatgtacaggcagctgattttggaaatggcaaaacttgcatttgggttgatgttctagatggtggaaggggtgtcctgatggagtttgctcctttctttgaagattcatcgatcaagaaggtttggcataactatagttttgatagccatgtcattgagaattatggaatcaaaattgctgggtttcatgctgatacaatgcatcttgcacgcctttgggattcatcaaggaaaattgatggtggatattcacttgaaggacttacaaatgaccgtagagtcatggatactgttccagaggatttacctaagcctggaaagacatcaatgaaaaccatctttggcaggaaaaatattagaaaagatggatctgaagggaaagttgtatctgttgagccagtcaagaagttacaaagggaagacagagagttatggatttgttattcttctctagattccatgagcacattgagactttatgacagcttaaaaagcaagcttacaacaaggagatggatcttggatggttgtcctaggggcaccatgtatgatttctatgaacagtactggcgtccttttggtgccctacttgtgaaaatggagacagagggaatgcttgttgaccgtggttacctttcagagatagaaaaggctgctattgctgaacggaaacttgctgcagataagtttcggaaatgggcatctaaatattgtcctgatgccaagtacatgaatgtgaatagcgatattcaaattcgccaacttctctttggtggcattgaaaatagacacaaatctggtgaaacttggccacatagtaaaacttttaaagtgctaaatgaagaaagtgttgctacagagggtaagaagacgtcaaagtatcgtacaatcaaactttgcagtattgttgaagatctgaaaatcgatatgttcaccccgagtggctggccaacagtcagcggggatgcattgagaagtttggctggtaaaatacctacagaatatatttacacaatagatgatattcaagatgatgatgaatataccagtggttcagaaaacccagatgggaattcctcttatggaacagcatatgaagcatttggtggaggaaagaatggaaaagaagcatgccatgcaattgcagctttatgtgaaatatgttctattgattctttgatatccaatttcattcttccgttgcagggagatcacatatcatgtgcagaggggcgcattcactgttcattgaatatcaatactgagacagggcgcttgtcagcaagaacaccaaatctacagaaccaacctgcccttgagaaggataggtataggattcgccaagcttttgttgcagccccgggaaattctcttatcgttgcagattatggtcagctggagcttaggattttagctcaccttactaattgtaaaagcatgctgcatgctttcaaggcgggtggtgatttccattctaggacagccatgaatatgtatcagcatatccgtgatgctgtccaagaaaagaaagttcttcttgagtggcaccctcaacctggtcaagagaaacctccagtgccgctattgaaggtttctgttaaagaggcaagagatacactgaagctctggtacagggatagaaaagaagtgttagcttggcaaaaaagtcagaagaagcttgcaagcgagaagggtgaagtctacactttgcttgggcggtcgcgccattttccttacctgactcagtatggtcctggccaacgaggtcatattgagcgtgctgctataaatgcaccagtgcagggaagtgcagcagatgttgctatgtgtgccatgcttgagatcgaaaggaatgtccgccttaaggagcttggttggaggctcttattgcaggtgcatgatgaagtgatactggaagggccttcagagtctgctgaggtggccaaggctatagtggtggagtgtatgtccaaacctttctacggaaccaacatcttgaacgtcgacctggctgtcgacgccaagtgtgcaaagagctggtatgctgccaaatagactgaggagacgctgtcacctgccacaaggttgatgacaccagtgcaatcgagaccccactgttcggataaaaaatggtggacccgtcgtcatgcagactgcggttccaggaccttgagtttgttgtggtggtaacccaggccctgacaagacaacacgcccatttcttggctgcagcagaacagcggaagacacggaggactctgctgccagcacctggagttgcgcggtgccaaagcataccagacagaattcgagatggcttggatctcgagtgaactagcgcggtgccaaagcatgctgttttgttcataatctcacttgttcagcgtgctggtgcgttaggttagtttacagatttgttctggtgcagtgaggccaattatggtccctgcggttggtatcgatcttggattgtgcattgcatgtagtaccatactgcatctacactgggaccatttttcagataacagaaacattcagcttcatcctcgaaagagaa

SEQ ID NO: 97566 - DNA, 899 bp, Zea Mays
catcagccgtccacgtgtccgaaccgaacggcgtggagcaggtggcccccgtcgcttgctacgcgcacaccgacctgacggacgtcgccgcgaccgcggctgggctccatcccatcgctatcgtctgcatcgtcaccccccggcccccccccccccccccctctccactctcctccaaccagatcgaaccccacacgccgcataaatcccccgctggcacccaatcaagcaaatcctcgcttccctcccccacgtcgcgtccgatcggcgacggtgcgccatgtcgatgctggacaccttcttcagcaagggcggcggcggcggcttccgcggcgccaagtgcaagacgctgctgaagctgtcgatcccgcggataaagctgctgcggaaccggcgggagctgcagctgcgccagatgcgccgggacatcgccaagctcctagaggccggccaggaggccactgcccggatcagggtggagcacatcatccgggaggagaacatgatggccgcgcaggagatcctcgagctcttctgcgagctcatcgcggttcgcctgcccatcatcgaggcccaaaaggagtgtcctattgatctcaaagaagcaatatcaagtgtctgttttgccgctccaagatgtgcagatctacctgaactgatgcaagttcaaatgatgtttgcaactaaatatgggaaggaatttgtcgctgcagcttcagagttgatgcctgattgtggggtcaatcgtcaggttatatgacacttctaaatcaaattagtttagccatgttatctggtggtttggttattcataacatattagaattaatgcttctgcagataattgaattgctttctattcgtcctcctcctgttgatgcaaagttgaaactgctgaa

SEQ ID NO: 97567 - DNA, 2121 bp, Zea Mays
catcagccgtccacgtgtccgaaccgaacggcgtggagcaggtggcccccgtcgcttgctacgcgcacaccgacctgacggacgtcgccgcgaccgcggctgggctccatcccatcgctatcgtctgcatcgtcaccccccggcccccccccccccccccctctccactctcctccaaccagatcgaaccccacacgccgcataaatcccccgctggcacccaatcaagcaaatcctcgcttccctcccccacgtcgcgtccgatcggcgacggtgcgccatgtcgatgctggacaccttcttcagcaagggcggcggcggcggcttccgcggcgccaagtgcaagacgctgctgaagctgtcgatcccgcggataaagctgctgcggaaccggcgggagctgcagctgcgccagatgcgccgggacatcgccaagctcctagaggccggccaggaggccactgcccggatcagggtggagcacatcatccgggaggagaacatgatggccgcgcaggagatcctcgagctcttctgcgagctcatcgcggttcgcctgcccatcatcgaggcccaaaaggagtgtcctattgatctcaaagaagcaatatcaagtgtctgttttgccgctccaagatgtgcagatctacctgaactgatgcaagttcaaatgatgtttgcaactaaatatgggaaggaatttgtcgctgcagcttcagagttgatgcctgattgtggggtcaatcgtcagataattgaattgctttctattcgtcctcctcctgttgatgcaaagttgaaactgctgaaggagatagctgaggaacatgaagttgattgggatccatcagagacagagacagaatttctcaaacctcatgaagatctattgaatggaccgacctacttcaatgtatccacactacctcttcccaaggagaaacatgaggaaacagtagttgcaagtgctgccgagcagcctgatgaagactatgagtcagataccggtcttgactcactggatttgcctgaagtcccaaaagctgcaattcgtccaccttctgacgcaccattgaccccagatatttgcccacatgttcagggctctcagtcacttcctcatgagttctcagatcctggtaacttggaggagaatccaacagctggtggtgcttttaatgttattcagatgaaaagcttggagcatcttgtttatgcaccatctgatcagtcaaacataccggatttgccaaatgaaaagaagcagtttattccttttgcatctccaccgcccgttctttctccttcggtgggaaaagccgagacagttccctcaccttctctgtctcctccagtgaagccgacagagccagaaccagaaatcctcacaaagaaaattgatgaagtgaccacacctccagtacttccctcagattatattttcacaaaacagccagaacaagtgcggacaatctctccttctgagagtggggcaaatattgacttggacgacgttttatctgctgcgcagacagctgctgaatcagctgagcgagctgcatcagcagcccgtgctgctgcaaaccttgcacaactgcgcatttcagacctgaagaagaattccaaggtttatagcaattacggtgatagcgtccaaaaggaaagccatcatcagactgaggcgacacaggaaccggtatttgatcaccaggactccttcaccaatgatacacaggactatgtgtcatcccatgtgccgcagaggtcgtcatctttggaggacgatccatatttctcgtatcccaacttgttctcagcgccaaagccctgaaggcggaaactagtggtctgcaagtagttgttcagaatagtctgaaacatgagatatcactttttcagctctgtccggtcctcttatgtttggtcttttctgatgcctccgaaaattctgtgtatgttgagttggtacatagcggacaaaagggagactatgaaacctctgtctagttttgtctctgtaaattgtacatgtgcggtgtttgtatcagttgtctgaaacatttctgcagtctactggtaataacagaaattgaatctcagcatctagtctcttccttgtga

SEQ ID NO: 97568 - DNA, 1625 bp, Zea Mays
aatcgttttgtgactaaaaattctgtaagagatgcagatgagtctcactcatttgtgtttccttgttttgttggcttcagggagtgtcctattgatctcaaagaagcaatatcaagtgtctgttttgccgctccaagatgtgcagatctacctgaactgatgcaagttcaaatgatgtttgcaactaaatatgggaaggaatttgtcgctgcagcttcagagttgatgcctgattgtggggtcaatcgtcagataattgaattgctttctattcgtcctcctcctgttgatgcaaagttgaaactgctgaaggagatagctgaggaacatgaagttgattgggatccatcagagacagagacagaatttctcaaacctcatgaagatctattgaatggaccgacctacttcaatgtatccacactacctcttcccaaggagaaacatgaggaaacagtagttgcaagtgctgccgagcagcctgatgaagactatgagtcagataccggtcttgactcactggatttgcctgaagtcccaaaagctgcaattcgtccaccttctgacgcaccattgaccccagatatttgcccacatgttcagggctctcagtcacttcctcatgagttctcagatcctggtaacttggaggagaatccaacagctggtggtgcttttaatgttattcagatgaaaagcttggagcatcttgtttatgcaccatctgatcagtcaaacataccggatttgccaaatgaaaagaagcagtttattccttttgcatctccaccgcccgttctttctccttcggtgggaaaagccgagacagttccctcaccttctctgtctcctccagtgaagccgacagagccagaaccagaaatcctcacaaagaaaattgatgaagtgaccacacctccagtacttccctcagattatattttcacaaaacagccagaacaagtgcggacaatctctccttctgagagtggggcaaatattgacttggacgacgttttatctgctgcgcagacagctgctgaatcagctgagcgagctgcatcagcagcccgtgctgctgcaaaccttgcacaactgcgcatttcagacctgaagaagaattccaaggtttatagcaattacggtgatagcgtccaaaaggaaagccatcatcagactgaggcgacacaggaaccggtatttgatcaccaggactccttcaccaatgatacacaggactatgtgtcatcccatgtgccgcagaggtcgtcatctttggaggacgatccatatttctcgtatcccaacttgttctcagcgccaaagccctgaaggcggaaactagtggtctgcaagtagttgttcagaatagtctgaaacatgagatatcactttttcagctctgtccggtcctcttatgtttggtcttttctgatgcctccgaaaattctgtgtatgttgagttggtacatagcggacaaaagggagactatgaaacctctgtctagttttgtctctgtaaattgtacatgtgcggtgtttgtatcagttgtctgaaacatttctgcagtctactggtaataacagaaattgaatctcagcatctagtctcttccttgtgattc

SEQ ID NO: 97569 - DNA, 456 bp, Zea Mays
accttggaggcagtcgcagttcttggcctccttgcgcacgacgtcgagcacggagtcgatgagctcagcgccctcggtgtagtggcccttggcccagttgttgccggcgccggactagccgaagacaaaattgtcgaggcagaagatctagccgaaggggcccgagcgcacggagtccatggtgctgggcttgaggtccatgaggacggcgcgcgggatgaagcggctgccgctggcctcgttgtagtagatgttgatgcgctcgagctgaaggtcggagtcgccagcgtactttccggtgtggtcgatgccgtgctcgtcgcatatcaggcatcacggaggggcgcggacgcgcggaacagaggaggtggcggcgcagtgagggggagaggagggggaggaggaggtggcataggggcgcggacgcgcggtgcaagattttggggcgcagggagt

SEQ ID NO: 97570 - DNA, 1876 bp, Zea Mays
gttgaagtggcaaatccatatttctggttaattttgccagccagaacaggttcataagacacctatactatccgatcctttagttccaacattttcatttgatacacaaaatagtagttagatatcaactatcagtacaattaacttatcgcggacccagatgatagccgcagcacctcagctccgacctttacaaacacaggagcattggcgcatgcggcaactgcacatgacataagctcctccagctctgctgccctggcatagaagaactcaaaaggcatggctgaccacatcaagcaatatacatccaaagccatggctgccaatcttcgcttcacccactgactggtatattaacaaattggtggattttttttttactaggatgattgatacacatctctattgtgcccttgcaaaatactcctccgtaccagaattagtgggagtctgatctcaagcttgccttcacctcggccctgacagctgttcagcgtggaggttgtcggtggagtcgagaatccattccgaggttcgatgagggcctagctcaacctcttgccgtaccacttctaccttctgccactcctcccacctctcggcgagaccatcgccttcaagcatcctcacaacctccgacatcttaggacgttccatggggttgctctgagtgcagaggagcgccacctggatcagagattccacctcgacatcgatgtagttgtggtctagatcttcgtcgaccagactctccagtttcttctccttgagcaaccccttgacctaatcaagaagcatgacatcatcatcattagcaagacgagctagatcgaaggcacgttgtcctgtaataagctctaaaagagtaattccatagccaaatacatcagttttctcagaggattttcctgttgaaaggtattcaggtgcaatgtgcccaattgttcctcgaacagcagtagttacatgggtatccttgtaatccattagtttggccaaaccgaaatcccccaccacagcttcgaagtcttcatctaacaaaatatttgcagctttgacatcacgatgaataatctttggatcacaatgatcatgtaaataagacaggcccctagcagaacccaatgcaatcctttgtcttgtttgccaatctagcggaggttcagctggtggtcggtctacagaataaaaccaaagtaataaaaagttcagagtttgatgctgttgttagagaggtgtaacatgaaagatacaaattaaaatacgtgaacagcactatactaaaaaaatacctcttaaacgtgacgcaacacttccattagccatgtatggatacacaagcaacctttctgttggtgtcatacagaatccacgaagacgcaatagatttctgtgtacagccatactaatcatctcaacttctgtttgaaactgtaattctccaccaggcgtgcgctcctcctttagtctcttaacagcaactaaagatccatctgccagccgtcctttgtagactttgccaaatccacctcttccaagaatgttcttattgctgaagccatctgttgcaacttgtaattctcgtagtgaaaatcttttaagctggccaagatgcacctctggatcttcctcggctgccacattcgaagtctcacattaagttaattcaaattcaatgttgttccctaagttattctcctgttgaatacttaccaggtacatcaaagaaatgttcttgtggtttcctgcgccgccaataggcaaaactaattgcaggaatagcaaatagcaaggctgcaccagcagccactccaccagcaattgctccagtactggaagagctacttcctgcaaaaaataagatgtcagtaac

SEQ ID NO: 97571 - DNA, 437 bp, Zea Mays
caagaaccgcagcttcaatagcttccccaatgaatctggtatgggaccagtgaagttgttcaagtacaaatccaaactgaccaagtttgtaagattcccaagttcactaggtatagtgccactgatattattactgtagagctccctgtactgcaagtttttgagctggccaagttgcggaaccaaagttcctgatagtgcagcatttccaagatcactgcaaatgaggaaaaactttcagtacgaaacacagaatatgtgcaactcactgatgaaatatagtggaggaaaaggtgaacctacactctgataacactgttgtcattattgcaggtaacatgaaaccaagtgcaggggttgaccagagtgggatcccaactttgtagaacattattaggatcatttaagttagtcctcaagctatgcaaggcatcacc

SEQ ID NO: 97572 - DNA, 594 bp, Zea Mays
acgtcgtcgagtggctgctggcaatggcggaccaggcggtggcagcgacgaccgcgcacgaccagcaccagcaacagcagcggaggcggcgctcgcgggcgtcgagcgagtacctgggcgtgcggcggcggccgtggggcaggtacgccgcggagatccggaacccggtgaccaaggagcgccactggctcggcaccttcgacacagccgaggacgccgccgtcgcctacgacctctcagcgatctccatctccggccccgccgccgcgcgcaccaacttctgctacccgcgcggggccgcccgcgggctcccctcggcgcacgcgctcccgcggcaggggctgcagctgctgcctcactctccggcggtgccatccccggcggcgccgccatcggcgttgttgcccgcgggtggcggcggcggcggtggaacggtggatggctgtgattatgattgtgaatggcgccacctcaaggcggtggaggaggccgatgccgacgacgagtccatgacgatcgcggccattctgcagagcttccagcatctgaacgctccatcggcaccccctgcctcgctgtattagctgtactgta

SEQ ID NO: 97573 - DNA, 98 bp, Zea Mays
gtgaaatcactgtctggctactgaacattatatttcaggcactactatatagtacttactcccaaaccacagctatatccagaggtacaagggcgtgc

SEQ ID NO: 97574 - DNA, 955 bp, Zea Mays
ctttcttcctatactcgattcatgcaaatcataatgagcagcagacattgcttagcagattattgttactgctatattttagagtgaatcaagcacacaacatcatctactattagtattctattccttgcatatcatagtgatgttgttattctctatctatgttttatattaatttttaactctcgtggcaacgcacgggcacatacctatatggttatgaaaaaagaagagctcgaaaaaataggcttcttctcttctctttgtggggggaggaaaaggacgtcaaaatataagaagagctcggaaaagaagaagtcacatacattatagaggaagggattgaaggtatcatcgagttctgtacaagtatttaatcttgaagatatagaggaagggattgaaggttctcaatttgatgatgagaaatagctgattatgtctcaaatgagcctggagaagagattatagctaaatatgtctcaaatgagcttggagaagagatttggccagtccagtttttgtagtctctactctaatggaatatggtggtgttccacaatctgcaactctagagtctcttctaaaagaagttattcatgtcatcagctatagctatgaggacaaaactgtctatgcactgcggattgggtggatctatggttctattacaaaagacattctcactggaatcaaggttcatgctcgaggctggcgatcaatctaccacttgcctaagcaaccaactttcaagggatctgctcctatcaacctttcgtatcgtttgaatcaagtgcttcggtgggcccttgtttccattgaaattcttttcagcaggcattgtcccatatggtatggctatggaggacggcttaaattcctggagatatttgcttagattaacaaaacaatttatccactcacatcaatcccgctcctcctgtacttcatattg

SEQ ID NO: 97575 - DNA, 255 bp, Zea Mays
atggcaggcatcataataaagatgttggttttgtgtgctgggtgggagatcgcacggggaattgttttttcatccctgggttctcccgccctttgtgtccccgtgccgtgcttcgtgttgtttggcttctcgttctatgcttcatcaccggtgctgctgcaaattgaacggatcttctcgtctcgcggcgtgctgcaaattgaacggggctacatcgcaacgcaacacaacacgcaaggtacaaatcggatctaa

SEQ ID NO: 97576 - DNA, 435 bp, Zea Mays
atgggaggcgacgtggagagggaggttggcgacgaagatggtttggaccggaaggcaggacggcggttgggaacgcagacgagcaaggatggtgggcacgataactttggtgcatgtgtcgaacgagggctggtgagggtggagggtgtgataaggctattgggtgagcgcaaaatgcgtaaacagcgggtggtcgagaatggcgggtgcggcatgcacggacgcggttggagcagacacggcaagaacgaagcatggcgtggattttgtgaggccgcggatggagcacccgcggttacttgtgggttcatggcgagcggaggggttgcgagatttctaaggcgctcgggtcggttggaagctccacgacaatggaggcgtggtagaggcggcgtggggagggaggtcgcaaggaggcgaaaggcggagcattga

SEQ ID NO: 97577 - DNA, 237 bp, Zea Mays
atggcccccctgaggtgcgcacaacggcgaggtgggagcggctgcgacatcggatcccgagggcacaaacgcgacagcggccccatgaggtgcgcacgacggcgaggtgggagcggccgcgtggcagatcccgaggggcacaagcgcggtagcgtctccttgaggtgcacgcggcagcgactgcttaaggtgcgcacgacggtgacgtgggagcggctgcggcggcgcgacggctga

SEQ ID NO: 97578 - DNA, 316 bp, Zea Mays
gaaatttgatgctaatctcttcttatattatgaagcacattattataaataagaataaaattttgtataaattatttcatacattatttactccatacaacaaaaaaggtaaaaaaatatttgtatccgtattcgatttgtatccaaaatttatatttattatttgagaagatatatgatagatttgaggtttacctttcatgaatctttataagctcaatactaaaaacaagaatataaatttgcatagcagattctatattctattaattcacaatcaaagaaaaaagaccaaaaaactgttatctgaataaga

SEQ ID NO: 97579 - DNA, 119 bp, Zea Mays
ctaataaatatggtttaaaccctcaaaaatgcatacttttaggatatttttatatttaaacgtcatatattgttatgggctcgttaggcctgacgggccgtgggccggcctggcacgat

SEQ ID NO: 97580 - DNA, 436 bp, Zea Mays
gggtgaagacgaagctagcagcgcgatattcaccaagcgctcgacaaattgcctaatccagaaaatcgctaccaatctcgtggattcgtgtgagttgtggaaacggtaagctgataaattattcagaatagttcgatcgatgaataaattaatgtgctagtgcgatgctcattaaggtgctcgataaattgcataagtcacgaaactctcgtcgacttcgcagttcttgcgattatcgagccaggttcagttatagcgagttatttcgctattccggccaattagcggaattaatgtaccgaatagaatattaataggcctgtgtgatgaggaaatagtttaatctcttatacagatgtgtatatatttacgataaagaaatatttaagtaattgttgacatgaaaacatgtgaggagtaaaataaaattgaaata

SEQ ID NO: 97581 - DNA, 824 bp, Zea Mays
tttgaagaaaagtcgccgcgttcctcttgcctgatgaaatccacttctcgtctagatctaagcctccgcgtggcttccggatcagatgcttggtccgatcaaacaacgctcgaagcgagacgaggctgcatggtttttgtgcctggaggtttctaatccgcgtggttaaggaaactgggtactacaatttgttgctacaagtgcccgatccgtcgaattgatgtctgccgaccttcagagctgcgacgttccgggaatctggggggatctggatcttggcggactggacaattgggaggcgtctaaagcatggctggacaattgtgagatgtgacatcttgaaggcctttgccatgttgggtgcgctcgcatggcaggcatcataataaagatgttggttttgtgtgctgggtgggagatcgcacggggaattgttttttcatccctgggttctcccgccctttgtgtccccgtgccctgcttcgtgttgtttggcttctcgttctacgcttcatcaccggtgctgctgcaaattgaacggatcttctcgtctcgctgcgtgctgcaaattgaacggggctacatcgcaacgcaacacaacacgcaagatctactgctgagccatatgaagacctgctgcctcatcatggtgtttgtatatgaagatcaactgccagtgcctacacgctggacggagtatttatatgatgtgaaggtcaactgttcggcatcgtcggtatgaaatggctatggccttcaaagcttccttggtcactggacagggaagaaattttctgctcaagctaaaaattagatacaagctt

SEQ ID NO: 97582 - DNA, 789 bp, Zea Mays
tttggttctgcctccgcctccgcgcgtccctgcacgccgaaatctcccaccgcgcccctacgccacctcctcctcctcctctcccctcactgcgccgccacctcctcggatccgcgcgtccgtgcccttggctgcctgactactcatagcaactgtcgtcctctctctcgcccccatcccaacgaataccacctccgcgatgcctgatatgcgacgaccacggcatcgaccacaccggaaagtacgccggcgactccgacctccagctcgagcgtgcgctcgtctactacaacgaggccagcggtggccgcttcgtcccacgcgccgtcctcatggacctcgagcccgacaccatggactccatgcgctcgggccccttcggccagatcttccgccccggcatggtcgccgccgccgaagccgagcgacgacggcagcggggcgaagcagcgagagatgggaggcgacgacgacggtgctccgtgcccgggcccggtcgtcgggcgggtcctgcaagcgccgaagctgagggagttcacgctcgccgagctgcgggccgccacgcgcgggttcaagccggagatggtgctcagggagggcagctttggccgcccctacaagggctgggtcgacgagcgcacgcggccatggcaccaaggcgagtgttttcctccgccaagcgtcgccgccttcgtattcgctacctttttctcttctaccgtttctaccatccctgtgtttcgttgtgctgtgttctccctcgacactgtctcggcgctgccagtttga

SEQ ID NO: 97583 - DNA, 183 bp, Zea Mays
ttgatctttaggggaccaagttatggttatcgaggtagagtgatgcttgcttttgaagataatgggtcctcaaaaattggagtccggtttgacaagcagatccctgatggtaatgatcttggtggtttgtgcgaggaagatcatggcttcttctgctctggttagctcaaactttcgaattcc

SEQ ID NO: 97584 - DNA, 895 bp, Zea Mays
ttcattcacttttgatttttacaataccaactgttactgaaaattttggtacgattcaccgtcaaaaacttggaccaccaggctaagacgtcgaaggaaaaatagcagcctcaatctgaagaatcaagaagcgatagcgtggatgcttccaccacggccgccggcgccttctgccgggtgaccaggcggtgcgggccctcgcataagcacgcttgcgctcgacatcgccgccggggacacgacatgaacctttccgccgctgccttccttagggcgggccggcggagcaggtcctcgcataaccgcgcgcgctttcgccgccgccggtgcgccatgcgttttgccaccgccgccttgtgccgggagaccaggccgggcgggtcctcgcgtcaccacgtgcgtggtcgccgccgtcagggcgttcgtgggcggcgtaactacgcttgctatcgtcgccatcgccggagctgcgtggtggacttgcccgccgctcccctgcctcggggctccggggcgccctttcggtgacggagcgggccagagccgctggtggtgagacgccgccagggccacgtcgtccgctccccgcggcgcgcttggcagactgatggctggagctgggcggtggaaggcggcggcgaccaggccggacgacacgtggcgcagcagctggcgcgcgagcgggcttgtcgcttgcgcagacggcgacaacgccatggccgggctggcttggagagttgttggtgatatgcgtccgaagaacagggtctgtctcggtgacgatcgatgtgatcgctcccttgcggcgttgcgagggtagatgaaccggagctgctgcccaagtgccgatgccgatgcgttggcggcgtcggtggatgtctctgcggtctgcgct

SEQ ID NO: 97585 - DNA, 593 bp, Zea Mays
ggaccttggtgaagaaaagtcgccgcgttcctcttgcctgatgaaatcctcttctcgtctagatctgagcctccgcgtggcttcaggatcagatgcttggtccgatcgaacaacgagctatgacgttccgggggaatctggatcttgacggactggacaaatgggaggcgtcgacgggcttctaaagcatggttgaacaattgtgagatgtgacatcttgaaggcctttgccatgttgggtgcgctcgcatggcaggcatcataataaagatgttggttttgtgtgctgggtgggagatcgcacggggaattgttttttcatccctgggttcttccgccctttgtgtccccatgccctgcttcgtgttgtttggcttctcgttctacgcttcatcaccggtgctgctgcaaatttgtaacatccggccaatgttagagatcacacatatcagtactagtgagtacgtatttgaatttgtaatggtggtgggccgtactgggccgtagtgggctatacccatgacattagtataagtatgttgtaagacttgaggaaggggtatggaatgaataacagaaacctttccagaata

SEQ ID NO: 97586 - DNA, 1182 bp, Zea Mays
atgaaggggacactggagtggttcaacgctaccacgggttccggattcgtcacttcagtcgaccatggcgagttcctgtattttctacaaccgtccctcaagtcccacgagatctcaggtgaccagaaccttaaggtcggtgaggcagtcgagttcggcatcatgggtgacaggtatggctgtctcagagcctttgacattacacctcttggaggtggcgtgctctctggtggttttgatgtctctaccagttggaacaacaacctgggttgggctattgataacaacgacgacgactatggtggccacaactgcgttccagttctgtttgaaagtatggaccctccagtgtttgatgaaatgtctcacccctgcagtgaggtgggtggtgctgttccgatgttctctgaaggttcggtgtttgatgaaatgtctcacccctgcagtgaggtgggtggtgctgttccgatgttctctgaagattcagtgtttgatgaaatgccgatggagagcgtgatttgggatgaggaagccaagcatggagatatggtgaacctggaaaggaagggtgaccagacgcacaacaagtgcgagcagggtgttgttcctgatgctccatggaagttgggtgatccgttgttcagtaaagtgggtctaaaagtggcatgggatggggagatgcaatttgaatctcatacgtatgaagggttactgcagcagcttgctcaaggtggagaagtcttagatgaatcggctgagaaggagggtgaggtggtagatgagaccagcaggtctgacgtactgagtgaggcagctactatggttatgcatggtggaagcatgaaggagcttcttcttgctcgtgctggcagtgtgatagaggatagcctggagaaggagcagaatgctaccaatgaagaagaggggaaatatcttgcagtacggcgaggagctcacgtctcggcgacgatcgccggtggccaggggcgtgacaaaattgaacggatcttctcgtctcgcggcgtgctgcaaattgaacggggctacatcgcaacgcaacacaacacgcaaggtcaactgttcggcatcgtcggtatgaaatggctatggccttcaaagctttctttcttggtcaccggacagagaagcaattttctgctcaagctcacaattagatactag

SEQ ID NO: 97587 - DNA, 2032 bp, Zea Mays
accccggctttgccttggtgaagaaaagtcgctgcgttcctcttgcctgatgaaatcctcttcccgtctagatctgagcctccgcgtggcttccggatcagatggttggtccgatcgaacaacggtgagtcttgctctgttacttgattgttcgaaacgcatggttttgttttgtgatgatgtgcaggttccgatctgtttcgtttgattgatgagttgacgacgcatcggctcgaagcgagacgaggctgcatggtttttgtgcctggaggtttctgatccgcgtggttaaggaaactgggtgctacaatttgttgctacaagtgcccgatccttcgaattgatatctgccgaccttcagagttgggacgttccgggggatctggatcttggcggactggacaaattgggaggcgtcgacgggcttctaaagcgtggctggacaattgtgagatgtgacatcttgaaggcctttgccatgttgggtgcgctcgcatggcaggcatcataataaagatgttggttttgtgtgctgggtgggagatcgcacggggaattgttttttcatccctgggttctcccgccctttgtgtccccgtgccctgcttcgtgttgtttggcttctcgttctacgcttcatcaccggtgctgctgcaaattgaacggatcttctcgtctcgaggcgtgctgcaaattgaacggggctacatcgcaacgcaacacaacacgcaagatctactgctgagccatatgaagacctgctgcctcatcatggtgtttgtatatgaagatcaactgcagtgcctacacgctggacggagtatttatatgatgtgaaggtcaactgttcggcatcgtcggtatgaaatggctatggccttcaaagcttccttggtcactggacagggaagaaattttctgctcaagctaaaaattagatacaagcttgttcaacttgcactatagttcatttgagtacttacctgttattgatctctattgagttgaagctaggtttcaagtatctcctaaggtttcgtataggtgaaaaccagtgattctctctttttttttagcactacaatctgtgacgtttcatgcccttagtttgagctttctccttagtgagtttattaatttttcttcttttccaaatcaaaagatgttttgactttccatattttgctatgcatttagttaaatctacactgtagataaacaaatgtttgtggataagtaaaaatgccttatttggtcgtcatggtaaatggctgcggtggacacatgagcagtctctggcagctgatgtgtcagtgatcttgctgtttcattgttggtatatattactgtcggattgttactattgaggagccattttttgcaaaaaaattttggaggcttcactacatccattatcaataactggattttgctctacgaaggtacatgtccattatcaataactcgatttttttaattgttcttcgatagtctttgcattgtgaataccaataattgctgccatttataactaatactgttaaccaaggcgcgtagaaaattgtttcaggtgatctaatcttacataattttgttataaacaaaatttgaaaaattattttagattttgatcagcgttgaaacgtacacacgccattaggcctgtctgtctcctaactgtggatcttgtctcaacacggtgaggtcctcacatgactgtccattacagtctttgacggaaggtggttcgattccacccagatcctttagtctgtattttgtgattcaacccatttaaataaatatacgaggtattattgagaaattgaatagaactggctcaattagctgctgtatataggggtgataatgggctttaaattttacactaaaatttaaggatcgaattaggataggatcctatttctattcattttggaactaaaattaatttagggctctaacaaattgtgaagaaacatttggaccattgttgtccctcacatttatatgataaaaagctaaaattata

SEQ ID NO: 97588 - DNA, 1445 bp, Zea Mays
ggggtcttctattgaccattgaagataaacttttgaatatatgaatcagctgtgtattatttgttgtagcttcaaatgcgagacctatggttgcagtcatttttattgtagttagtttatatgatacatcgtcgtcaccgcatgagatctactgctgagccatatgaagacctgctgcctcatcatggtgtttgtatatgaagatcaactgcagtgcctacacgctggacggagtatttatatgatgtgaaggtcaactgttcggcatcgtcggtatgaaatggctatggccttcaaagcttccttggtcactggacagggaagaaattttctgctcaagctaaaaattagatacaagcttgttcaacttgcactatagttcatttgagtacttacctgttattgatctctattgagttgaagctaggtttcaagtatctcctaaggtttcgtataggtgaaaaccagtgattctctctttttttttagcactacaatctgtgacgtttcatgcccttagtttgagctttctccttagtgagtttattaatttttcttcttttccaaatcaaaagatgttttgactttccatattttgctatgcatttagttaaatctacactgtagataaacaaatgtttgtggataagtaaaaatgccttatttggtcgtcatggtaaatggctgcggtggacacatgagcagtctctggcagctgatgtgtcagtgatcttgctgtttcattgttggtatatattactgtcggattgttactattgaggagccattttttgcaaaaaaattttggaggcttcactacatccattatcaataactggattttgctctacgaaggtacatgtccattatcaataactcgatttttttaattgttcttcgatagtctttgcattgtgaataccaataattgctgccatttataactaatactgttaaccaaggcgcgtagaaaattgtttcaggtgatctaatcttacataattttgttataaacaaaatttgaaaaattattttagattttgatcagcgttgaaacgtacacacgccattaggcctgtctgtctcctaactgtggatcttgtctcaacacggtgaggtcctcacatgactgtccattacagtctttgacggaaggtggttcgattccacccagatcctttagtctgtattttgtgattcaacccatttaaataaatatacgaggtattattgagaaattgaatagaactggctcaattagctgctgtatataggggtgataatgggctttaaattttacactaaaatttaaggatcgaattaggataggatcctatttctattcattttggaactaaaattaatttagggctctaacaaattgtgaagaaacatttggaccattgttgtccctcacatttatatgataaaaagctaaaattata

SEQ ID NO: 97589 - DNA, 700 bp, Zea Mays
acagaacaactttctccttcttccgcgctgtcgccgtcctcctctcaccccaatctgctcggactctgatcgcagcggacgcgcatccaaccagctcggattctacctctctcccggggaaaggatggagttcgggaggaagcccttgagccttgtggagctctgcgtgcggaaggccatcgacaacctccgctacatgggcagcgtcgacggcgtcgagatggatctgctcaagcgcatcctgccgcactgcacgatggagcagctcacccgcgtagagaacagcaccgagatggatcttagcttggtaactgatccgctgtggaggcgattctaccagcgagaattcggtcaggagcatacgagcaaagtcatcgcaaggctgaaggagcttgggcaaaaaacgccgtacacatggagggagctcttcgcggcgaaaaaagagaaacagaaggaagttgaggataagatgcttgacaaattcacaaagaagtttcaggcagagagagctggtaactctaacattactgtggagttaaattagttgcactttgtggagaaaacactaatactttcttcgtctaaatccatcctatgcagagaaacaaagcaagcaaatcaaactctgtacaaaggtgcctccaagcagcaaaaggagtttctttggaggtaatttcctgtttctgcctctgctgaactt

SEQ ID NO: 97590 - DNA, 1315 bp, Zea Mays
acagaacaactttctccttcttccgcgctgtcgccgtcctcctctcaccccaatctgctcggactctgatcgcagcggacgcgcatccaaccagctcggattctacctctctcccgggtaagacgccgggcctcgcttcggcggatgtgggttaccctattttttccccccttcctctactcgacgaattccgttccataggatatataggatctcttaatctttcccagccgccgcgagccgaggagtcagatcgaaacctttcttttttcggcggaataagtcattcgtcttcggccgattgaattactaaggtaggtgggtgctccttgtttcgccagggaaaggatggagttcgggaggaagcccttgagccttgtggagctctgcgtgcggaaggccatcgacaacctccgctacatgggcagcgtcgacggcgtcgagatggatctgctcaagcgcatcctgccgcactgcacgatggagcagctcacccgcgtagagaacagcaccgagatggatcttagcttggtaactgatccgctgtggaggcgattctaccagcgagaattcggtcaggagcatacgagcaaagtcatcgcaaggctgaaggagcttgggcaaaaaacgccgtacacatggagggagctcttcgcggcgaaaaaagagaaacagaaggaagttgaggataagatgcttgacaaattcacaaagaagtttcaggcagagagagctgagaaacaaagcaagcaaatcaaactctgtacaaaggtgcctccaagcagcaaaaggagtttctttggaggaagtggacctagcagtgtatccagttccagctacaagagccctatactgaagaaggctaggatagaggttaacagtcgagcaagattgcagtctgctatgcaaaagaatacttttgcgaggtcatctcagccaataaggacgacctctgttagtggacagccagtgagaacaactaccattcataggcccaattcaaccgtcaccatcaccaaaccgatgggaaaaagcaggcaaattcagaacagcaggcccaaattctaggaaacggtttgctgcgatatcgcaatttcaactccagagctcatatgtcctctgaagaaagcgcctcctttgtacaaaaggagtagcacaccgtactcatttttttttttggcaaaggagagacgtgccaattgtaacgtaaaaggcgttaccaatgtttgtaacaaacgatttcttgtattaaagaaaaaagggtttgtttcttggtttctctctttattatcatgcaaatggttaatgaattata

SEQ ID NO: 97591 - DNA, 1107 bp, Zea Mays
acagaacaactttctccttcttccgcgctgtcgccgtcctcctctcaccccaatctgctcggactctgatcgcagcggacgcgcatccaaccagctcggattctacctctctcccggggaaaggatggagttcgggaggaagcccttgagccttgtggagctctgcgtgcggaaggccatcgacaacctccgctacatgggcagcgtcgacggcgtcgagatggatctgctcaagcgcatcctgccgcactgcacgatggagcagctcacccgcgtagagaacagcaccgagatggatcttagcttggtaactgatccgctgtggaggcgattctaccagcgagaattcggtcaggagcatacgagcaaagtcatcgcaaggctgaaggagcttgggcaaaaaacgccgtacacatggagggagctcttcgcggcgaaaaaagagaaacagaaggaagttgaggataagatgcttgacaaattcacaaagaagtttcaggcagagagagctgagaaacaaagcaagcaaatcaaactctgtacaaaggtgcctccaagcagcaaaaggagtttctttggaggaagtggacctagcagtgtatccagttccagctacaagagccctatactgaagaaggctaggatagaggttaacagtcgagcaagattgcagtctgctatgcaaaagaatacttttgcgaggtcatctcagccaataaggacgacctctgttagtggacagccagtgagaacaactaccattcataggcccaattcaaccgtcaccatcaccaaaccgatgggaaaaagcaggcaaattcagaacagcaggcccaaattctaggaaacggtttgctgcgatatcgcaatttcaactccagagctcatatgtcctctgaagaaagcgcctcctttgtacaaaaggagtagcacaccgtactcatttttttttttggcaaaggagagacgtgccaattgtaacgtaaaaggcgttaccaatgtttgtaacaaacgatttcttgtattaaagaaaaaagggtttgtttcttggtttctctctttattatcatgcaaatggttaatgaattatagaaaataccaggcaaa

SEQ ID NO: 97592 - DNA, 1149 bp, Zea Mays
ccgttccataggatatataggatctcttaatctttcccagccgccgcgagccgaggaggaaaggatggagttcgggaggaagcccttgagccttgtggagctctgcgtgcggaaggccatcgacaacctccgctacatgggcagcgtcgacggcgtcgagatggatctgctcaagcgcatcctgccgcactgcacgatggagcagctcacccgcgtagagaacagcaccgagatggatcttagcttggtaactgatccgctgtggaggcgattctaccagcgagaattcggtcaggagcatacgagcaaagtcatcgcaaggctgaaggagcttgggcaaaaaacgccgtacacatggagggagctcttcgcggcgaaaaaagagaaacagaaggaagttgaggataagatgcttgacaaattcacaaagaagtttcaggcagagagagctgagaaacaaagcaagcaaatcaaactctgtacaaaggtgcctccaagcagcaaaaggagtttctttggaggaagtggacctagcagtgtatccagttccagctacaagagccctatactgaagaaggctaggatagaggttaacaggtaaatggttgctcttggtattacgatcatagatagaaattgctgtttctgaaactgtctgattctgtgttgcagtcgagcaagattgcagtctgctatgcaaaagaatacttttgcgaggtttgcccccgctactatgctatcagtccatatcgacaatgaatggtttcagcaaaatgcaatttcaatctctcatgttgttgcaggtcatctcagccaataaggacgacctctgttagtggacagccagtgagaacaactaccattcataggcccaattcaaccgtcaccatcaccaaaccgatgggaaaaagcaggcaaattcagaacagcaggcccaaattctaggaaacggtttgctgcgatatcgcaatttcaactccagagctcatatgtcctctgaagaaagcgcctcctttgtacaaaaggagtagcacaccgtactcatttttttttttggcaaaggagagacgtgccaattgtaacgtaaaaggcgttaccaatgtttgtaacaaacgatttcttgtattaaagaaaaaagggtttgtttct

SEQ ID NO: 97593 - DNA, 897 bp, Zea Mays
gcacacccctcctgtgctttgagattcgcgcgtcgcgcctgccgacctcgtgcctcccgcggactcgccggcgaacgcctcttggagatgccgcccgccgcggcggcgctcctccggtgcgctccggcggtcccattcgcggcccgcagtagcgctgtttcccgctcaggcatggcgcggcgtctggtggcagcgagcgctgcggccggcaggctggcaccggcgtaccgcgggctgctgctcgacgccggtggcacgctgctgcaggttgcgcggccggtagccgagacgtatgcctccatcggccgacgttacggtgtgacgaagactaagaagagaatcatggaggggttcaagcgggcattctccgcgccatggccgaagacactcaggtaccagggagatgggcggccattctggagaattgtcgtggcagaagcgaccgactgcactgatggtgattatttcgaagaagtgtatcaggtagtatacctcatgttctcgctaaggttgttcgattgaatacttcttggtgaatcagggttggttgaagaatttgagtatgcattgaagtgtttcagtgtttggtatctgattatcttttattaccttactatagttactacaatgacgaaattgaacaagaacaaatgttctgactatactgttagtcaacagaagcccaggcgatgaagttcaccgctctcaaatatatttagtttttctaagttgaaggatgcattccgcttccggtttatcggtatgtcgaatgttcgtaaccataccatgtggctcatggatggatcattgtttcttccagtattatgcgcatggagatgcttggcgattgcctactggagcagacgcagcactgcgtgagctgaaggatgctggagg

SEQ ID NO: 97594 - DNA, 1108 bp, Zea Mays
gcacacccctcctgtgctttgagattcgcgcgtcgcgcctgccgacctcgtgcctcccgcggactcgccggcgaacgcctcttggagatgccgcccgccgcggcggcgctcctccggtgcgctccggcggtcccattcgcggcccgcagtagcgctgtttcccgctcaggcatggcgcggcgtctggtggcagcgagcgctgcggccggcaggctggcaccggcgtaccgcgggctgctgctcgacgccggtggcacgctgctgcaggttgcgcggccggtagccgagacgtatgcctccatcggccgacgttacggtgtgacgaagactaagaagagaatcatggaggggttcaagcgggcattctccgcgccatggccgaagacactcaggtaccagggagatgggcggccattctggagaattgtcgtggcagaagcgaccgactgcactgatggtgattatttcgaagaagtgtatcagtattatgcgcatggagatgcttggcgattgcctactggagcagacgcagcactgcgtgagctgaaggatgctggagttaagctcgctgttgtatctaacttcgataccaggctacggaaattgcttaaagaccttaatgtctccgagatgtttgatgccattgtggtgtcatccgaggtcggatatgagaaaccttccccagagatcttcaatatagcattggatcaaattggcgtggaagccagcaaggcaatccatgttggagacgatgaaactgcagacatggcaggtgccaatgctacaggacttgagtgctggctgtggggtaaggatgtgacgacgttttcggaaatacaggagcggattctgacaacagatggtcctcaatgagtgaatttggaatgttgcaaaaaaatgatagttgttttttttccctcagttccttcttttttgtttccttccaactcgtgtgttggcattttcattgtgctttcgtgaaataagctcatgccatggctaggtactgatgttccttcacattcttctcacatatgaacatttaataagaagcacaaggactcttgataattggtataagacagtttctacaaaatcctaatatcaa

SEQ ID NO: 97595 - DNA, 1309 bp, Zea Mays
gcacacccctcctgtgctttgagattcgcgcgtcgcgcctgccgacctcgtgcctcccgcggactcgccggcgaacgcctcttggagatgccgcccgccgcggcggcgctcctccggtgcgctccggcggtcccattcgcggcccgcagtagcgctgtttcccgctcaggcatggcgcggcgtctggtggcagcgagcgctgcggccggcaggctggcaccggcgtaccgcgggctgctgctcgacgccggtggcacgctgctgcaggttgcgcggccggtagccgagacgtatgcctccatcggccgacgttacggtgtgacgaagactaagaagagaatcatggaggggttcaagcgggcattctccgcgccatggccgaagacactcaggtaccagggagatgggcggccattctggagaattgtcgtggcagaagcgaccgactgcactgatggtgattatttcgaagaagtgtatcagttactacaatgacgaaattgaacaagaacaaatgttctgactatactgttagtcaacagaagcccaggcgatgaagttcaccgctctcaaatatatttagtttttctaagttgaaggatgcattccgcttccggtttatcggtatgtcgaatgttcgtaaccataccatgtggctcatggatggatcattgtttcttccagtattatgcgcatggagatgcttggcgattgcctactggagcagacgcagcactgcgtgagctgaaggatgctggagttaagctcgctgttgtatctaacttcgataccaggctacggaaattgcttaaagaccttaatgtctccgagatgtttgatgccattgtggtgtcatccgaggtcggatatgagaaaccttccccagagatcttcaatatagcattggatcaaattggcgtggaagccagcaaggcaatccatgttggagacgatgaaactgcagacatggcaggtgccaatgctacaggacttgagtgctggctgtggggtaaggatgtgacgacgttttcggaaatacaggagcggattctgacaacagatggtcctcaatgagtgaatttggaatgttgcaaaaaaatgatagttgttttttttccctcagttccttcttttttgtttccttccaactcgtgtgttggcattttcattgtgctttcgtgaaataagctcatgccatggctaggtactgatgttccttcacattcttctcacatatgaacatttaataagaagcacaaggactcttgataattggtataagacagtttctacaaaatcctaatatcaa

SEQ ID NO: 97596 - DNA, 1124 bp, Zea Mays
gcacacccctcctgtgctttgagattcgcgcgtcgcgcctgccgacctcgtgcctcccgcggactcgccggcgaacgcctcttggagatgccgcccgccgcggcggcgctcctccggtgcgctccggcggtcccattcgcggcccgcagtagcgctgtttcccgctcaggcatggcgcggcgtctggtggcagcgagcgctgcggccggcaggctggcaccggcgtaccgcgggctgctgctcgacgccggtggcacgctgctgcaggttgcgcggccggtagccgagacgtatgcctccatcggccgacgttacggtgtgacgaagactaagaagagaatcatggaggggttcaagcgggcattctccgcgccatggccgaagacactcaggtaccagggagatgggcggccattctggagaattgtcgtggcagaagcgaccgactgcactgatggtgattatttcgaagaagtgtatcagtattatgcgcatggagatgcttggcgattgcctactggagcagacgcagcactgcgtgagctgaaggatgctggagttaagctcgctgttgtatctaacttcgataccaggctacggaaattgcttaaagaccttaatgtctccgagataccttgagctcttcaggtttgatgccattgtggtgtcatccgaggtcggatatgagaaaccttccccagagatcttcaatatagcattggatcaaattggcgtggaagccagcaaggcaatccatgttggagacgatgaaactgcagacatggcaggtgccaatgctacaggacttgagtgctggctgtggggtaaggatgtgacgacgttttcggaaatacaggagcggattctgacaacagatggtcctcaatgagtgaatttggaatgttgcaaaaaaatgatagttgttttttttccctcagttccttcttttttgtttccttccaactcgtgtgttggcattttcattgtgctttcgtgaaataagctcatgccatggctaggtactgatgttccttcacattcttctcacatatgaacatttaataagaagcacaaggactcttgataattggtataagacagtttctacaaaatcctaatatcaa

SEQ ID NO: 97597 - DNA, 1273 bp, Zea Mays
tcgcgctcgtcccggaccggacctgcactccatccatctccagggaccagaactagggtttgcgaaatcgtgacgcgagcacttgaagattcgcgaaagacagcgcgaccgacccacggcgatggccaccgtccaccctcaatccccggcgggtcccacccatctcccgcaggaggagcgacacggggacgccccggtaccgcccgccgtctccggcgaacccgccgccgcagcggaggcgggcggcgagatcgccgcgctcgacaagcagctcgccgtcgtcggcggcggcgaggagaggaggccggccggggccggggccggggccgccagcgcaggcgggggagggaagctggtggcggaggccatgcgcaagtacgctgccccgcggtcgtcgcgcttccacggcgtcaccaggctcaagtggagcggcaagtacgaggcgcacctttgggacaacaccagccaggtcgaaggccgcaagcgcaagggcaagcacgtgtacttaggcagctatgtcgatgaagagcaggctgcaaaggcacatgatttggctgcccttaaatattggggcacagggccaaacaccaaactgaacttcaatatttctgattatgagaaagaaattgaggttatgaagaccatgtcccaagatgaatttgtggcctacataaggagacaaagcagttgtttctcaagaggtacttcatcataccggggtgtaaccagacggaaggatggtaaatggcaagcaagaattggtaggatcggtgagagtagagacaccaaagacatttaccttgggacctttgaaactgaagaagaggcagcagaagcttatgacattgcagcgatcgagcttcggggtgttcatgcagtcaccaactttgacattagtaattactgtgaagatggtttgagaaaattagaaggcccatcagaggtggctaagcttggaagtccgtcggaggttgtgaagctcgctgggcaatagatactagattagcaacgtgtaaattagtttctatttcgtttcttttgtcttcatattctcccccttttgtattcctgattttttttgccgttttgtgagttccctccttgccttattggcaagccagtatttacccgactcgaaaggacaatgtgatgttgtattttagcctcacagaaaggtattactaacctttgatgtcactgcagaagtcgacaccatgttagaaatttagttcattcgtcgatgagcatgtgcagtgttattatataattgaaa

SEQ ID NO: 97598 - DNA, 132 bp, Zea Mays
caaacttaatatttaaaaaatacccaattttaaagaataaatattttagtcaaaagtctattattttaattgattgggctcagtagaaaagaaattaataaaataaaattttgacaaatacttacaaatgac

SEQ ID NO: 97599 - DNA, 273 bp, Zea Mays
atggcggcggatgcggcctccttcctgctccagcttctgtgggaggtgctgttgtgctgttgcccccgccggccaggtcaagatgcagcgcccagccaaggtgacatgcgcgagagtactcctacggagcaaccggtggacgacgtggtccagttgcagcgagatcttacaagccccagctccccatcccaacccaaggaaacagacaaacaattcaggcatcacggccaaccaccgactgcgcatggcggtggtggcagccatcaccactga

SEQ ID NO: 97600 - DNA, 168 bp, Zea Mays
atgaggagatctacaaaggtgcagggtgtttatgtgtataaggtcaaggttcaagcaatagccaaagagccaagaagtcaccaacatatatatggagttccaggattaggaattcacaatgccacacatcaaaggtacattgcactcatgaatcatgtatcttggtaa

SEQ ID NO: 97601 - DNA, 268 bp, Zea Mays
gtgtaatttacatgagacttaccatacacacataaaactagtcattgcagctgcagcagtttaaacaccactaccttacaatttatgaagacaggacaaaccgaaggggttgtattaatatgattaaacgccctccttgcactgcgctcccaactgaacagatgttccgttccaggcgaatcatctgcttaaaattgtcgaacgacacatgcaggagagagaggcatggtgtgtggtgacattattgccgttgttctcggaatctgtc

SEQ ID NO: 97602 - DNA, 318 bp, Zea Mays
gctcaattctcaatcaccactcgcccatcgtgggcgccgcccttctccccaatcctcatcctcgtactaccgccgccaagaacgctaccgccgccaagagcagcacaagcacccgtcgcatcaccgtcttcaatgaattcctctgtctactcgcctaccccgacttcacttgatagcccgccagacgcatctcgatgcttctgctccctggttcttagggcctgtggatgagaccgtgtccctgccgtccaaaaatcagcaggccctcatgctcatagcgttcatggatccaggaaaaggagacgccggtgatacttc

SEQ ID NO: 97603 - DNA, 528 bp, Zea Mays
atgggagctctgcggcagaggaggacgccgaccagcgcgcaggggagcaggatgggggcaatcggcgccatggaggtggagctcgaagacgacggcgacttgggcgagctccagggagaaactgggagccgcggcacggaggagcaggggctagccaccatggggaaaagcttcgggagaagggagacgaccgagcagagagcttcgcgagctgggatccggcacgtgcgcatggaggaattcgagcgcgctgactggggacagggagagagacgggctgaggaaggagatggatgcgcaggggaggcacgcgccaaagaagctccaccggcgagtagggaagacgccgagcagaggagcacggactcgaccgagacacagagacaacgtagaggtgctgtggcgatggaagaacctggtggcgcgtacgatggctggaatcagagaatatctaggcagaggagataacgaatgggacagttgtgaacctggacgtcggcgtgaggagatgagcatgccacgtaaacg

SEQ ID NO: 97604 - DNA, 288 bp, Zea Mays
atggccggctgcgcaaggggacagggaccaaccggcaacgaaggcgaaggcaggcaaatgatgaggaactatagcttcaatcgtttcaaccagtgtggtcgcggatccaggcgcaaccgcggacgtggtcgtggccgaggtcctgaaggtcgtgggcatgctgctgaagggcgtggcttcaacaactccatgccgccacctgcctccatagggagccgaggtatatctggtgggcgaacaggggcatcaaagcaaccaacaagtgctgattggaagaacctaggttaa

SEQ ID NO: 97605 - DNA, 273 bp, Zea Mays
atgcaatgggatggagaagatgctgaaggtaccgcaaaagactatgaaactgattcttcacaagaacaaggcagcccaatttatgctgagtcaggtgacagtagttccaatgatgaaggtgatggcaataatgatgttggtgccgatggaagtggtggcactagggctgctgatggtcctgccaaaggttcgagacatggggaaccaactcctttgcgtccaagatcaacaagaaaaaggaagccaactctcaagagcattactgaattataa

SEQ ID NO: 97606 - DNA, 304 bp, Zea Mays
cttcccgtgaccgagaaagcaggcccgagaaagaggtccactgtcggtgctccgtgcttgcaccgatgattggtggccagggttgggtcgtgggcgttcggcagcgtgcgtggatcatgtgtgtgaagtatcaagctcagggatcggtccgagcacctggaattcctcgttgaacctcgtcgctgctgcacctctgctccgcatcgtggaccgaccccgacgtgtctttcgcgctgatgggcaagcaactgaggacccaagtgctcagcaggtggaaagtgccgagcagaagctcgttgaaggc

SEQ ID NO: 97607 - DNA, 1134 bp, Zea Mays
ttgttgcgacagattgagaagaagcgtaatgagaatccagaattggttagcgaaggactgtgggcactgtcatgtggcccagctcggcgagttaagactagtacaacttgcaagattaatggagtgcggtttagcacagtggatcgtgagaagttcatgcagacacaaaatagtggtgtaatgactgaaggtgaacataatggggagaacatagatttttatggtgtccttaaagaggtaattgagttacaatataactcgaattgtcaagttcgtcggacggtggttctatttcgatgcgattggtacaaccaagtaggcaagactgtgggcattcgagatgacaaacatttcaaatccatcaatgtgcagtcattttggtacaagtctgatccttttatcttggcagaccaagcgaaaaagatattttacctggaagacacaactccacaatgtaaagatttccgagttgtgcagaaatttgaacatatgaatatttatgatgtggctgaaaaatatgagggccgtaatgatgtgcatcaggatgattattgttctgatactgagcatatagtgcaagaaggtgatgataatcaggttctacacaatgttgaaggtggagaagccactctaattgaaggcaatttagaggaactaataagaaaaaagaaggaagctactattattcttgaagatagtgaggatgaggaggaagatgatacaatgcttcaatattttaatgatggtggcgacgacaacaatgatgacatgtccatagaagatgaagatgaggatttctagtattgatagttgatttatgaacaagcctattctttagactaatacaacatatttctgatactgaccatggcttgattgaatgaattgaactcatgagcggtgtatgccagggaagacatcaacttcatgaactcgcgaccatcagcatcgacagtgaaaatattggatatctattgcactgtgcagtttgacaaaaaggtttataatggcgtgatggtggctgtctggacaatttgtttattatttccttcactagttataacgtcagaggcagatgttcttttgaactttgttacttggcagagttaaactgaagattctttcttttccttg

SEQ ID NO: 97608 - DNA, 194 bp, Zea Mays
tttctcttctcaataatcaagatgagtcgtggtggtagtgccggtggtggtcaaagttctctgggttatctctttggaagcggtgagccccccaaaccagcagtggcaccagctgcaagtgctctacctgttgagaaaccatctgctgcaaagactgatgcgaccaagcaggttgttgctggggttaccagctg

SEQ ID NO: 97609 - DNA, 944 bp, Zea Mays
gctctccggcatctgtctcagaatctttgcgcccgctgccgtccgccgctcctcctcccacaccggcgacctccgcccggtgttccatcctcccgcaccgcctcccgacgtccgcgtcgcccccacgcatccttaccttttgtcgattgcgcggtaccgtctaccccactaggcaaggcggtaccctccgcccagcgtagaggcgcgcctaagcgagcgcgtaagagctcctttttgaacacccttcctactgccgacggcagcggcgcatagaagagccaatccgccggtttgatctgaagcatggacaaacaatctgatgcccaggggtcggagaaggttgctgaggagaagcaacttgatgagaaagagttagaaaggaagctgaaaaaagatcaaaaggcaaaagagaaagaagagaaaaaacttaaggcaaagcaaaaggaggcggctaggctccaggcacaagcaacctcagacggaacaaagaaggctgagagaaaacaaaggaagaaagctgtggaggatgaaaatccacaggatttcatagacccaaacactcctaatgggcggaagaaattgctcgcgcctcagatggccaaacaatacagtccaagtgcagttgagagatcatggtatgcttggtgggaatcatcaggatattttggggcagattctgcaagcacaaaaccaccatttgtcatagttctgccacctccaaatgtgactggagctcttcacatcggccatgcacttacagtggctatagaggatgctatgatacgctggcgtaggatgtcaggctacaatgctctgtgggtccctggagtggaccatgctggcattgctacacaggttgttgtagaaaagaagcttatgcgtgaaaggaagctcacaaggcatgacatagggcgtgaaaattttgtttctgaagtaagtatttc

SEQ ID NO: 97610 - DNA, 225 bp, Zea Mays
ctcgggagagacactggagcggtggaactcagggtggacagccagtccgttctggcattggccaagaaccccgtgttccatgaatggagcaagcacatccggctgagataccacttcatccgagactgcttggcagaagggagcatcaaggcgcgctacatcaacaccaaggatcagcttgcagacctgcacaccaagccccttgggaagatcaaatttgttgag

SEQ ID NO: 97611 - DNA, 2890 bp, Zea Mays
gtttggtgtttgcttattccatttctttgtcatcttacaaacaggtactcaaatggaaagatcaatatggtggtacaatattgaatcaattgcgccggcttggggcttcacttgattggtcccgtgaggcttttacaatggatgagcaaagatcaaaagctgtaactgaagcttttgtcaggttacacaaggaaagcctgatatatagagattatcgccttgtgaattgggattgcacacttcgaactgcaatttctgacattgaggttgatcatattgatcttaaagaagacactatgttaaaggtccctggttatgccaatcctgtacagtttggtgtattgatatcttttgcctatcctcttgaggaaggactcggtgagattgttgtagcaaccaccagaatagaaacaatgctgggcgatacagcaatagctgttcaccctgaggatgaaaggtataagcatctgcatggaagatatgcagtccaccccttcaatggacgaaaactcaaaataatctgtgacgcggagttagttgatcccactttcggtactggggctgtcaagattactcctgctcatgatccaaatgactttgaggttggaaagcgtcataatcttgaattcatcaacatattcacagatgatggaaaaataaatagcaatggaggtgcacaattcgatggaatgccaagattcaccgctagagttgctgttatcgaggcactgaaggaaaaggggttgtataaggacacaaagaagaatgaaatgagcttgggtgtttgttcaagaactaatgatgtagtggaacctatgataaaaccacagtggtttgttaattgcagcaccatggccaaggcaggccttgacgctgtaaggtcaaaaaagattgaaattatcccccagcagtatgagcaagactggtacagatggcttgaaaatatacgtgattggtgtgtctcaaggcaactttggtggggtcatcgtatacctgcatggtatgtgacactagaagatgacctggataaaaaccttggttctaacaatgaccgctggatagttgcaagaaatgaaagcgatgcaaaacttgaggcacagaaaaagtatgtaggaatgaaattacgtctagatcaagaccctgatgtactggacacatggttttcatctggtcttttccccttaacagtacttggttggccgtctgataccactgacctccgtgctttctaccctacatcggtactagaaactggacttgatattctcttcttttgggtagcaaggatggtgatgatgggaatgcaacttggtggtgacgtgccatttcagaaggtttatttacatcctatgattcgggatgcacatggccgaaagatgtcaaaatcacttggtaacgttgttgaccctcttgaggtgataaatggcatgtcactggatggtcttctgaaacgtttggaagaaggcaatctggatccaaatgaattaaacattgcaagagatgggaagacgaaggattttcctgatggcatagcagaatgtggtaccgatgcgctccgcttcgcactgatatcgtacacctcccagtctgacaggataaatcttgatatcaagagggtggttggatatagacaatggtgcaacaaattatggaatgccattcgttttgcgatgggcaaactgggtgatgattacattccgccggcaactgttgatgtgtctcttatgccaccaatatgcaagtggatactctcagtgcttaacaaggctgttggaaaaactgttacttctttagaagcatacaaattgtctgatgcaacatctgctatatactcgtggtggcagtatgagctatgcgatgtatttatagaagctatcaaaccttacttcagcgattctcaagagtttgaatcagcaagagctgcctccagagataccctgtggatttgcctggagacaggtctgcgtctgctccatccgttcatgccctatgtaacagaagagctctggcaacgtcttccacagcccaaagattctagtaggaggaaagattcgattatgatttcagagtatccatctcttgttgaggaatggagtaatggcggggttgaaaatgaaatggacattgtcttggatgctgtcaacaaaataaggtctctgaagcctccaacagattcaaatgaaagacggcctgcttttgcactttgccgaggccaagaggtcgctgctactatccaatgctatcaatctctaatcgtgtgtctttcttccatatcacatctcaagatcctgacagagagtgatgaaactccagccgattgtgcaactgctgttgtcaacaaagacttgtctgtgtaccttcagctccaaggagatttaaatgaagatgctgagcgtgaaaagctaaggaagaaaaaagatgaaattcaaaagctacaaaatgcactggcacagaaaatggacgcctctgggtatcgcgagaaggctccacagagcgtgcaggaggaggacatgagaaagctcaccgctttgttggaacaactagaggtcatcagtgaagctgagaagaaattagactcaaactgagcctgtaccgaagttggtccccacatttttcttgtttgcaaaaagctcctgtttgctcaggttttcaattgatggttcagatggaagccacacttttgcagcgtgtaagaatattcactggctgtacagaaccatatttttgggtgttcgattttttcaagttagaaacttctgatgatgcatatgggaagtctgtcagaatatgcagcagccgaaatctgttaatcaaatttattagaatggtctcaattgtctcattcctcatgctacacaatttagcttgcttattctttctacgaaaaaaa

SEQ ID NO: 97612 - DNA, 453 bp, Zea Mays
cgcggccgtcgaggacatggcggagaggcggctgggcgtggggcggaaggcgtcggcgcggcggcgcgtctgcgagggagtcgggcgcacgagcgccgccagcgcgcgcctgatgtggtcgccgccctccaccgcggcgatgcgcaccagcgggttggccatggacgcgcgccgcggggcgctgagcctgctggacaccagcgccgccgaggccgaggccgggagcgggccttggccacccctgtgtagggcgcagcggaaggagcccgggtgcgtggtgggcgagcacgcgcacgacgcccgcttcggccgtgccggcgcgacgacgggcagcgtggcgcgccggtgctggtgaggctgggaccgcgaggaggcgccgcgggcggtcgcgcggcgctgggggacgagcgacgctgctgcggacgccgccgtcgccgcggcagcagcagcagc

SEQ ID NO: 97613 - DNA, 784 bp, Zea Mays
cgcttttgccgggaaacggaaggaacgaggaggcgaccacaagggttccagagcggcggcgcgttgcagcgatttgactgcgacgacggcacgaccccaagcgtcctcagctaactatcttcgacgcacagttgccgggagacggaaggggcgaggaggtctgcggcaaggttccggcgattcaaagtgacggcgcagccctaagcaatagcatcctccacgcatccttcagccaactggcttccctggagaataatggagcagcaaggaaatgatggtgtgaattcctcccggtcctcacctttctttcacaatgatcagtggacttacacgctagtcactgagcttgatcatctacagcatggccagaacacacatttccataacccaagttcatcacacatgagtatgcccccatcgtttcaacaattgttagaggtttacaacccatttctagagcgagccgaacaaccaaattcacaggaaacaactaaagaaacacattcaccactacctcaagttggttcaaagcaaaagaaggtttctagaagagggggtggattcactaaagaagaggatagagtaatttgttctgcgtttttgaatgtcagcaaagacccaattacgggtgtgaaccagtcttctggaggtactacaagcgcattttttgagtattttgatgctagaaagcccacaggttccaatagaagccagattgtaatagaacacaggtggagggggtatccaaaaggcaattaattggtttgttgggtgcaaatcttta

SEQ ID NO: 97614 - DNA, 222 bp, Zea Mays
atggcggaggagggcgcgggcgggcgcgcagaggaggagggcgtcagcgcgggaggacggacgatggaggagggcgggtgggggcgcgtggaggagggcgccgacagtggtgcgtgggcaggcgacagaggagggcaccagcgacggtgcgcgggcgggcgggggcgcgaggaggacggcgccgacggtggagggcgtgacagagcggaagggtggcggtga

SEQ ID NO: 97615 - DNA, 1002 bp, Zea Mays
ggcgtgcggaggggagataccaaacctttgcccgctacagcgcgaacgaactcctcctgcgctgggcaacggccacgtcgccgccactcgccgagcgcccacgtaaggcggccgccacgccgcacagcaccgcgcccaaggcaagctagctacactatatcggccccgccccccgccctgagctcgcctctctccttgatgctggcatgctgctggccatcgctgtagcctcccatgtcgtccaccagaatcgagccccctggcggcggcggcagccacgcggcccatgacccgcgcgcccgtgagcagcagagccccggccgccgcggcgctctccagccggcggaatggcagacgtggagggggcgcgaggaggaggagcctcagcgtccacgacggtacagcttcaggaggcaccggtcgggcgcggcggagtgggcggcggtagtgctgttcacggtgctggcggtcgtggtgctgctgggcgccgtggccgttcttgtggtggtgctgctgctgcagccccgcgcgccgtacttggcggtgcgggcggcgagcctgaacacgctggtgtacgggcagacgggggcgctggacgacgtgcagctcacggtccgggtggaggcccgcaacggcaacgcgcactcggcggcctacttctcgcgcctcgagtgccgcctcgcgttcgccggcgcgacgctggcggtgctccgcgccgacccgttccgcgtgcccgccaggggcgtcctcccgctggcgtacgtggcgcgcgcgcagggcgtcccgctgggcgacgccggcagcgctgccatggaggccgcgctccgcgacggcgtggtgccgttccgggtggagggggaggcccggacgcgatggaaggtcgcggggatcgtcgccatcgaccagtggacgcgcctggcgtgccagctccgcttcttctggcccaacggcaccgcgctccccttcagatgcagctccaagtccaagttcttgttcttctga

SEQ ID NO: 97616 - DNA, 399 bp, Zea Mays
atggctctccagaggctccggaagcgagagttcatggtgtgcaggccagaggccgaaccgagggaggcggaggaggatggatcggccggtgctgagaactcgacaagggagagcggagcggggagcagccacaactacgtcggtcgagctcttggttgcgttgaccgagtccctaactacttagcacttggtcgcatcgaccgatcccttgatggcaccaggtccatctttagttaccacaaaatcgagagttcaaatccatacattgaagaagtgttgcgtaaagtaaatattcccgtatttgatgatgaatatcaggactttgtagtccgctatgggaatcatctggttgcccatattgacttggtcaaggatcatgatcaattggagatggtgtag

SEQ ID NO: 97617 - DNA, 426 bp, Zea Mays
atgcctgaagcagcacctatcgcttccagtaaaccaattagcatgaactgtggcttcggaagcgctaacatttctctagtgacaatcccagcgcgaaatcttatgaagagaattgagaaatacacatactcaggcgccctggcattgtcgccaccctcgccgcggatccacaatcgaaatccgaagcagtatagtccttcccacagaactgaagactggaaactggttaaagaacgtgatcaagatatggaacacacaatttatgtgcagcgtccacagtttcttgagggatgcaaagacgcacttggaatgccatcagagcttccacttcctccttgctcagctctccatcagctacaaactgctgaagcttctgtctgtaaatttctgaagtttgaagaggaattagtaagcatgatgttctga

SEQ ID NO: 97618 - DNA, 904 bp, Zea Mays
caaatccaccaagcccactcctctgctgccgcattccaagtttccaacccattcccatcctcttcaacggtcaacccagcgccaccagcagcgccatcagcaggagagagatcgccggagccatgacgaggggcggcggaggcgacatgaagtccttcttccgtcagcagaagacgcacgccgccgccgccactaccaagcccactggcggcgtctccaagaaggcggcggcgcatcaccacaagaaggccgcactcgccaccaacgtccacccggccccatgtaccgatcccgatcacggcgccggcagccgccagcaggaggaggcggaggcggagcagcgggagagggcgggccgcgagttcgacatggacacgcgctacgggccatgcctcggcgtcacccgcgcccagcggtggcgccgcgccgccgcgctcggcctcgcaccgccgccggcgctcctcgccctctgcgccgacgaacagccctgcctctgggagggccgcgtctaggctactggcggcggcggggtgcacattccccgcgtttcgccgacatgctccatcagtgttcagtactagctctgtgttggagatgcggtgtcgcgtccatccgttctgctcccgtctaccgcatctcgtggtagcagtggcaccagtagtagtaccatctgtgcctgtcacgtgttgtgttgcctctagtatccacatgatgatgaacccttcatgtctggtgtgttgtttgtgatcagagcagaaatggcatgtcttccagcaacatggcatttctttcgtgtgttcttctgttgcagtttcattggattgttctagtactgctgaatactgcccagcatagtttgttctacattatacgacgaattaagtttgtactaagtttgaccaaa

SEQ ID NO: 97619 - DNA, 892 bp, Zea Mays
caaatccaccaagcccactcctctgctgccgcattccaagtttccaacccattcccatcctcttcaacggtcaacccagcgccaccagcagcgccatcagcaggagagagatcgccggagccatgacgaggggcggcggaggcgacatgaagtccttcttccgtcagcagaagacgcacgccgccgccgccactaccaagcccactggcggcgtctccaagaaggcggcggcgcatcaccacaagaaggccgcactcgccaccaacgtccacccggccccatatcacggcgccggcagccgccagcaggaggaggcggaggcggagcagcgggagagggcgggccgcgagttcgacatggacacgcgctacgggccatgcctcggcgtcacccgcgcccagcggtggcgccgcgccgccgcgctcggcctcgcaccgccgccggcgctcctcgccctctgcgccgacgaacagccctgcctctgggagggccgcgtctaggctactggcggcggcggggtgcacattccccgcgtttcgccgacatgctccatcagtgttcagtactagctctgtgttggagatgcggtgtcgcgtccatccgttctgctcccgtctaccgcatctcgtggtagcagtggcaccagtagtagtaccatctgtgcctgtcacgtgttgtgttgcctctagtatccacatgatgatgaacccttcatgtctggtgtgttgtttgtgatcagagcagaaatggcatgtcttccagcaacatggcatttctttcgtgtgttcttctgttgcagtttcattggattgttctagtactgctgaatactgcccagcatagtttgttctacattatacgacgaattaagtttgtactaagtttgaccaaa

SEQ ID NO: 97620 - DNA, 812 bp, Zea Mays
cccagcctgaaggcgcatatccaaaccctacccggcgccccagctataaattcctccgctccccttcgccgcttcctgtcgcgccgccgctcccctcccaacccactagctcaaaaccctagagctctcgcctgctcgcctccgccgccggagcgagctccccatcttcatccgtcaaccatggcgacccagatcagcaagaagaagaagttcgtcagcgacggtgttttctacgccgagctcaatgagatgctgacgcgggagctggcggaggacggctactctggcgtggaggtgcgcgtcacgccgatgcgcacggagatcatcatccgcgccacgcgcacgcagaacgtgctcggcgagaagggccgtaggatcagggagctcacctccgtcgtccagaagaggttcaacttccctgagaatggcgttgagctttatgccgagaaggtcgtcaaccgtgggctctgtgccatcgcgcaggccgagtccctccgttacaagctcctcggtggccttgccgtccgcaggtacaacatgacaagaccccgttccttctgctagctgtaatttgctaattttgatgtggttgctagttcatatatgcttgcgtttagttgcatccaggtggcgcctaggcaggtgaaaattgatttgtagctagcgaatattacctgtaaatatcaaacattggtattattaggagatgataagcctataaatcgtttataatctggttataagatggctttctactcgactcatacttccaaatcgagacattgcacctgtgatttatgttctgccttcag

SEQ ID NO: 97621 - DNA, 1170 bp, Zea Mays
cccagcctgaaggcgcatatccaaaccctacccggcgccccagctataaattcctccgctccccttcgccgcttcctgtcgcgccgccgctcccctcccaacccactagctcaaaaccctagagctctcgcctgctcgcctccgccgccggagcgagctccccatcttcatccgtcaaccatggcgacccagatcagcaagaagaagaagttcgtcagcgacggtgttttctacgccgagctcaatgagatgctgacgcgggagctggcggaggacggctactctggcgtggaggtgcgcgtcacgccgatgcgcacggagatcatcatccgcgccacgcgcacgcagaacgtgctcggcgagaagggccgtaggatcagggagctcacctccgtcgtccagaagaggttcaacttccctgagaatggcgttgagctttatgccgagaaggtcgtcaaccgtgggctctgtgccatcgcgcaggccgagtccctccgttacaagctcctcggtggccttgccgtccgcagggcttgctacggtgttcttcgttatgttatggagagtggtgccaagggttgtgaggtgatcgtgagtggaaagctcagggcccaaagagccaagtccatgaagttcaaggatggctacatgatctcatctggtcagccagtgaacgagtacattgactcggctgtgagacacgttcttctcagacagggtgttcttggcatcaaggtgaagatcatgcttgactgggacccgaagggcaaggttggcccgatcactcctcttccggacctggtgaccatccacaccccgaaggacgaggacgagccgcgccctccggtcttggcacctcctgaggtgtaaggtcccaactgtgtccttgaaatggcagtttgatcgggtcctagataggtttctatcttacgataaggacaatgctaaggcagttggttaccttaatctttatggacagatgctatgtgttgcttctgtggcacttttgtttaagctaagttttgcggagacaagatacttatatatgttcccgatgaaattatggttccttgtatgctctggaaattttattttctgtatgttcaattttgcttgtcgtttagcacgtttggacaacatatcttgtcgaaccgtctgcattttttttgg

SEQ ID NO: 97622 - DNA, 1325 bp, Zea Mays
cccagcctgaaggcgcatatccaaaccctacccggcgccccagctataaattcctccgctccccttcgccgcttcctgtcgcgccgccgctcccctcccaacccactagctcaaaaccctagagctctcgcctgctcgcctccgccgccggagcgagctccccatcttcatccgtcaaccatggcgacccagatcagcaagaagaagaagttcgtcagcgacggtgttttctacgccgagctcaatgagatgctgacgcgggagctggcggaggacggctactctggcgtggaggtgcgcgtcacgccgatgcgcacggagatcatcatccgcgccacgcgcacgcagaacgtgctcggcgagaagggccgtaggatcagggagctcacctccgtcgtccagaagaggttcaacttccctgagaatggcgttgagctttatgccgagaaggtcgtcaaccgtgggctctgtgccatcgcgcaggccgagtccctccgttacaagctcctcggtggccttgccgtccgcagggcttgctacggtgttcttcgttatgttatggagagtggtgccaagggttgtgaggtgagtgttcctttgtacttcctgagaacatgttcatttgttagtgaatgcatctcgacagcctttgtctcttttaaaataacaggtgatcgtgagtggaaagctcagggcccaaagagccaagtccatgaagttcaaggatggctacatgatctcatctggtcagccagtgaacgagtacattgactcggctgtgagacacgttcttctcagacagggtgttcttggcatcaaggtgaagatcatgcttgactgggacccgaagggcaaggttggcccgatcactcctcttccggacctggtgaccatccacaccccgaaggacgaggacgagccgcgccctccggtcttggcacctcctgaggtgtaaggtcccaactgtgtccttgaaatggcagtttgatcgggtcctagataggtttctatcttacgataaggacaatgctaaggcagttggttaccttaatctttatggacagatgctatgtgttgcttctgtggcacttttgtttaagctaagttttgcggagacaagatacttatatatgttcccgatgaaattatggttccttgtatgctctggaaattttattttctgtatgttcaattttgcttgtcgtttagcacgtttggacaacatatcttgtcgaaccgtctgcattttttttggcgattaggacaaaatgtaaatgtaaaaaggacaaattatgtaagcaatatcaattcaagcttaccttttt

SEQ ID NO: 97623 - DNA, 813 bp, Zea Mays
gtcgcgccgccgctcccctcccaacccactagctcaaaaccctagagctctcgcctgctcgcctccgccgccggagcgagctccccatcttcatccgtcaaccgtgggctctgtgccatcgcgcaggccgagtccctccgttacaagctcctcggtggccttgccgtccgcagggcttgctacggtgttcttcgttatgttatggagagtggtgccaagggttgtgaggtgatcgtgagtggaaagctcagggcccaaagagccaagtccatgaagttcaaggatggctacatgatctcatctggtcagccagtgaacgagtacattgactcggctgtgagacacgttcttctcagacagggtgttcttggcatcaaggtgaagatcatgcttgactgggacccgaagggcaaggttggcccgatcactcctcttccggacctggtgaccatccacaccccgaaggacgaggacgagccgcgccctccggtcttggcacctcctgaggtgtaaggtcccaactgtgtccttgaaatggcagtttgatcgggtcctagataggtttctatcttacgataaggacaatgctaaggcagttggttaccttaatctttatggacagatgctatgtgttgcttctgtggcacttttgtttaagctaagttttgcggagacaagatacttatatatgttcccgatgaaattatggttccttgtatgctctggaaattttattttctgtatgttcaattttgcttgtcgtttagcacgtttggacaacatatcttgtcgaaccgtctgcattttttttgg

SEQ ID NO: 97624 - DNA, 892 bp, Zea Mays
attaattttcttctctcctttgtctttctttatatgctatcgatttgtggcttccgctaatatgcttttcttggataatagaatgatgcctaggattttaatatgtgagttgtcaagttttacagttagtccagttcccgctactgacacgcgtgtttcctggccagggcttgctacggtgttcttcgttatgttatggagagtggtgccaagggttgtgaggtgagtgttcctttgtacttcctgagaacatgttcatttgttagtgaatgcatctcgacagcctttgtctcttttaaaataacaggtgatcgtgagtggaaagctcagggcccaaagagccaagtccatgaagttcaaggatggctacatgatctcatctggtcagccagtgaacgagtacattgactcggctgtgagacacgttcttctcagacagggtgttcttggcatcaaggtgaagatcatgcttgactgggacccgaagggcaaggttggcccgatcactcctcttccggacctggtgaccatccacaccccgaaggacgaggacgagccgcgccctccggtcttggcacctcctgaggtgtaaggtcccaactgtgtccttgaaatggcagtttgatcgggtcctagataggtttctatcttacgataaggacaatgctaaggcagttggttaccttaatctttatggacagatgctatgtgttgcttctgtggcacttttgtttaagctaagttttgcggagacaagatacttatatatgttcccgatgaaattatggttccttgtatgctctggaaattttattttctgtatgttcaattttgcttgtcgtttagcacgtttggacaacatatcttgtcgaaccgtctgcattttttttgg

SEQ ID NO: 97625 - DNA, 877 bp, Zea Mays
attaattttcttctctcctttgtctttctttatatgctatcgatttgtggcttccgctaatatgcttttcttggataatagaatgatgcctaggattttaatatgtgagttgtcaagttttacagttagtccagttcccgctactgacacgcgtgtttcctggccagggcttgctacggtgttcttcgttatgttatggagagtggtgccaagggttgtgaggtgatcgtgagtggaaagctcagggcccaaagagccaagtccatgaagttcaaggatggctacatgatctcatctggtcagccagtgaacgagtacattgactcggctgtgagacacgttcttctcagacagggtgttcttggcatcaaggtgaagatcatgcttgactgggacccgaagggcaaggttggcccgatcactcctcttccggacctggtgaccatccacaccccgaaggacgaggacgagccgcgccctccggtcttggcacctcctgaggtgtaaggtcccaactgtgtccttgaaatggcagtttgatcgggtcctagataggtttctatcttacgataaggacaatgctaaggcagttggttaccttaatctttatggacagatgctatgtgttgcttctgtggcacttttgtttaagctaagttttgcggagacaagatacttatatatgttcccgatgaaattatggttccttgtatgctctggaaattttattttctgtatgttcaattttgcttgtcgtttagcacgtttggacaacatatcttgtcgaaccgtctgcattttttttggcgattaggacaaaatgtaaatgtaaaaaggacaaattatgtaagcaatatcaattcaagcttaccttttt

SEQ ID NO: 97626 - DNA, 285 bp, Zea Mays
atgaatgaccccatatctgcagagcagaatcagaagggggggaaaaccaagagcgctcaccatctaccgcgcggcggcccgcatgctccgagtggatctcctttcctccgatggcgcgagcgagagcgcgagtccgtgttcgtcctcaccggccgcccaagaactaggaaggcggagtcgtgggtgaagaagaaggaatatcctagtcccactggtcagagtcctcagtggagaggagaggagatctggcagtggcatggttggtattcctacatccgtaggtga

SEQ ID NO: 97627 - DNA, 440 bp, Zea Mays
cataatgactccagtatcgctctatataacaagtggatccgatctagtcgccagtcgtcgtcgttaaaaccgagaagagaccaggccgaaggaaaacaatcctgaaaccaagccatgggtctgcaggaggaatttgaggagcatgctgagaaggcaaagaccttgcctgagagcacgagcaatgagaacaagctgatcctctacgggctctacaagcaagccacggttggagatgtgaataccgatcgtccgggcatattctaccaaaaggactgcgcacccatatattaaagtagagggaaaataaagggccataatgatgatatccatctatctatctatgtaactggtttatgtaccatgtacctgtttatgtaactggttaccagtgttatccatctatctatctatctgtgaagacttgagtcttctaaattatg

SEQ ID NO: 97628 - DNA, 862 bp, Zea Mays
cataatgactccagtatcgctctatataacaagtggatccgatctagtcgccagtcgtcgtcgttaaaaccgagaagagaccaggccgaaggaaaacaatcctgaaaccaagccatgggtctgcaggaggaatttgaggagcatgctgagaaggcaaagaccttgcctgagagcacgagcaatgagaacaagctgatcctctacgggctctacaagcaagccacggttggagatgtgaataccgatcgtccgggcatattctaccaaaaggacagggccaagtgggatgcctggaaggctgttgaaggcaaatcgaaggatgaggcgatgaatgactacatcaccaaggtgaagcagctccaggaggaggctgccgcctcttaaaagtctcttaatagtgttgccaaacagctatttgtcagatgagctttgtgccatttcctcattagaagtatatcattcgatccattggggatctgtgaaccatgtacctgtttatgtaacttttttttttttcgaaagagcgcaggaggactgcgcacccatatattaaagtagagggaaaataaagggccataatgatgatatccatctatctatctatgtaactggtttatgtaccatgtacctgtttatgtaactggttaccagtgttatccatctatctatctatctgtgaagacttgagtcttctaaattatgatatctgtctgtgtgatatctgaggctgtgtttcgttttacaggctagtttggcttctactgttttcacaatgtttttgtctctatagctttttgaaagtgtttctactgttaaaacgtggaaactcaaccaagcggttagaatccgaagctggtttttc

SEQ ID NO: 97629 - DNA, 667 bp, Zea Mays
atgggtctgcaggaggaatttgaggagcatgctgagaaggcaaagaccttgcctgagagcacgagcaatgagaacaagctgatcctctacgggctctacaagcaagccacggttggagatgtgaataccgatcgtccgggcatattctaccaaaaggacagggccaagtgggatgcctggaaggctgttgaagtgttctacatggatgtatctattccaatagcatcacaaggtattacagtacttcttgctcagactcttgagatcttggcaggcaaatcgaaggatgaggcgatgaatgactacatcaccaaggtgaagcagctccaggaggaggctgccgcctcttaaaagtctcttaatagtgttgccaaacagctatttgtcagatgagctttgtgccatttcctcattagaagtatatcattcgatccattggggatctgtgaaccatgtacctgtttatgtaacttttttttttttcgaaagagcgcaggaggactgcgcacccatatattaaagtagagggaaaataaagggccataatgatgatatccatctatctatctatgtaactggtttatgtaccatgtacctgtttatgtaactggttaccagtgttatccatctatctatctataagagaaagagaaagataaaagagata

SEQ ID NO: 97630 - DNA, 693 bp, Zea Mays
gtaccctttatgttcatgcttaagaggggatccaatgcttttgcgccgccctaactctcgagcggttcatcatgcctttggatgtaagatggaaaattccccgtttgttttaagtattttgcgacttatcggttttccatataattctatagagaaatagagtggcgaagcgcgtgggtcaaagtctggattgcttaaaatggtttgcatgaaagatttaccttgtgaaatagtttagcatagtattgcaatcgtggtcccctaggaatatgagctgtatctctgttgcaggaggaatttgaggagcatgctgagaaggcaaagaccttgcctgagagcacgagcaatgagaacaagctgatcctctacgggctctacaagcaagccacggttggagatgtgaataccggttagtatgtaatcacgcagctaattttgttctcttcttttcagttccctttctaagtttggtgtgtggatgaagctcttggtttgcagaaacctaattcaatttaagtgtcatggctcaaaactattcctagcatggatagtgtttaataactttatgtgtcataatacgaattccctgaaaggttgacgatttgcttcctctgtataaattaaacagcagggcctgctagtttgcttttgaagtttaacgatttaatttagaaatctgaacagtggtgaata

SEQ ID NO: 97631 - DNA, 1903 bp, Zea Mays
cacaagagaagtaaaaccaagtgtcagtctctgactccccctcccccccggttcctcactttctcctgtgccgtggtcttgacagtccgggcccactctcgagtctccgaccgcattgaactctgtgtgtactgtattaatcatttaatcggcgccagagcgactgggcgccgcgctgctgcgactgcgactacgcgggcatggcggggaaggaggcggcggagagcagcagggccaggaggcgcatggatctgaacctgtacgtgggcctcccgccgctgtcgccgcctcgactctggctcgacacctcggcgccttcccgaacgacgtgggtgtcccactcgggtcccggtgccgcgctggacgctccaaggacacgcgagcccgaggaaccgctcgccccggcggcggcggcggcggcggcctactcgccgtcgaacgcgctcttcgccccggacccggaggagcacccggtgtttgatcccttagtgtactcctggctcgacggcagcggtgaagagtacaccgatgctcctgcgctgtcggcgccggctccaacgccggtggatggtcatggtgtctctgggccgcagtttctgatggctgccactgggctggacggggacgatcttgcggtaccaaggcctgtgcaccctagccgggtggcggcggctgctgctgctgctggtggactggagatggtcggcacgagcgtacttgggcagtccactcaaggtgcgactgcaagtgaagcaggggagctccggttcctgagggcgatacggatcagccagcagcacaacatcgtgaggtcaggaccagcgagccacactcaagtggcagctagcacggatgcgggtagcctggtcatggcaatgcaacacacacaaagcgctttcgaagcagcagcagatccggatggcggcggcgacaaggtgcgtggaagcgacgccgcagagaaggacgggtcctgtgactgcaactgcgactccagcttcgagtgcaacatctgcctcgagcgggccaagcagccggtggtcacgtcctgcggccacctcttctgctggccgtgcctgtaccggtggctgcacgcgcagtcgcccttctgcgactgccccgtctgcaagggcgaggtgttgctaacgagcatcacaccgatctacgggagaggcggcgacgaagaaggggactccggctcctccgccgtccccgacctgccgcccaggccgcaagcgaaccggagggacagcctgaggcagcagctgcagacggcgacggacgccagagggatcgccgcggtgctgagggagatgatccagaaccagggcatcgtgacctcggttcccgcaggccggcaacgggctggtagcgctcggaggcagcgaaggcagggtagcaacgcgtcgcgctccgcggtggtgaacgcgggcaatgctgcccctgagggcagcgatccgatccagccgccacactccaatggcggcaacggtgagcaggttgttcatgcagctcctcaacaaccaccaccggctgttgtgctgggcgagcctgggccaagtaggcggtcgaggcattcggagtccgcagccataagaaggacaaggaggaggccacagcagtagggagcagagtgttggcactcccttcagtaagaaaaaaagagagctacagatcatgcatcaaaatgttagttatcaccatgattaacatctcatggttaataatatactaggaatgtagtacatgccatcgctcgtttgccaggcaaaacgagtcgaaatgtcagtcccagtcccagcatgttgggaatatattttctgattgagcctctgtttctgttctgatatgccattataacttatctgatgtcgctattcccgagtttccaacatagttacattac

SEQ ID NO: 97632 - DNA, 1230 bp, Zea Mays
cggagcctataaaacagctcgagtgagagaccagtgagtgaactcatcactcccgcttccagcttcccgcagcgagcatcaaaaggagaagagcgagagagagcagcaggcatggaaatgggcgacagcttcgagtactactgggagatgcagcagtacctggagtcagaggagctcagcctctacatgggcacccaggacgatgccctgtcctgctacgactccagctcgccggatggctccatctccaactcgtcctgggcgccggcgggcgtggcggccacggcgtccgagaagcgggagggccccggcggcgcggcggccgcgaacaagaacatcctcatggagcgcgaccgccggcgcaagctcaacgagaagctctacgcgctgcgcagcgtcgtgcccaacatcacaaagatggacaaggcgtcgatcatcaaggacgcgatcgagtacatcgagcagctacaggcggaggagcggcgggcgctgcaggcgctcgaggccggcgagggggcgcgctgcggcggccacgggcacggcgaggaggcgcgcgtggtcctgcagcagcccgccgccgccccggcgcccgtggaggtcctggagctgcgcgtgtcggaggtgggcgaccgcgtgctggtggtgaacgtgacgtgcagcaagggccgcgacgccatggcccgcgtgtgccgcgccgtcgaggagctccggctccgcgtcatcaccgccagcgtcacctccgtcgccggctgcctcatgcacaccatcttcgtcgaggtggattcggaccagacgaatcgtatccagatcaagcacatgatcgaggccgctctcgcccagctagatgatgcctccgcgagcccgccgagcgtgatgagctactattagaatcggacaaccgtcacgctgacatgcacgagccggcctagctactgtggccgaccggtactgttccgtgcgcgtatataggaactaggaagaagtgggtgctttgtttgctatatatgaggcactaggtcagggggttttgtgatggggctttatgcaactttgatgtaatggaccgaaaacgacagattgagtgttggcggctagctcccatatgtttagagtctagggaaggaataaataatcgagacaagtcttatccctgtatttttgtagagaggtatttgaaacaagaagttcatcaaatacaagggaaaaatgtcatggcgacaaatatgttag

SEQ ID NO: 97633 - DNA, 912 bp, Zea Mays
gtgctcttttatctgattcgattttatattatgtgacatttgtagctccttggccttttgtttttttttgcaaagagtgtatgaaaagaccaaatgaacggaagatgggatcattcttttctctgctagaattcatggacattgacatttaattagcaaacacaactcaagctctcatggcatgcatatccctactgaatttgaggcaagaaaaattaggttcattaaaatacttgtccctcgaatagcagagataattttcataggatcaccatatcttatttttacattcactgccgcaattgcaattatatatgttccagcagactacataaatcttacttgctcttttaaaatagtatgttccatagatagattaattgatcttcttggtgcctgtgaagatacatcaactctagccagcttctcttgtattctggccaagatatctgagcatgttggtggcacaattgctgatgaaattttgcaagaatccccatgtatcaaattgcagatctcttgtttgcagaaaaaagagcaatgtatgcaaatatgtttgcaagacttgcatcttcaataaaggttggaaagttgaaagctgttgagactacgattgaatcagtaattgacaagaaactccttgtgcttctaggcaacggtttcgagatctcatagcaccacgcgattaccacgctaaaagcattcagtgaacttggtgcttcacttcaagggtgcatggggcttgcagtgttgcttcatctgccttggcatgctcggatcagtttggaaagatttgttttatttgacagaaatatattacaatcaccatagccccaacaattatttgaggtgatccttcataatatccttcatacagacgacaaaaatatcattgaaaccatccaatgttta

SEQ ID NO: 97634 - DNA, 1815 bp, Zea Mays
cttgtctccttcccccggccatctccggcaccggatttttcgtcgccgccttgtcctggccccttccgcgaagacccattcccacacaccctttatgccaacttgccgcccccgcggattcgcgcgcaccgcggtcggtgtctaggcttgattggccctggcccaggagcacggcgaaaggcggcgtcttggtgtgaagcggccgcgctggattggttgccgccggtggtgctgatcgttgggcgtgtttgagagcgcgccgaaggctctgccttgtggggagcggtcgacaggcagggtcaaaggaggcggtctttcctcttgtcccgatcgcattgttgatctgacacggtttcttgggaaattcaggttagggataggcggggggagtggggtcgtcgtgaaggaggcagcagcggttcgcgtggatcgaggaagggattttattgcgttgggatttggtaggtggtggcgctgctcttgccgttcttggcatgagcgttggagatggggacggactactacaatgtgctcaaggtgaaccggaacgccacggaggaggacctcaagaagtcgtaccgccggctggccatgaggtggcaccccgacaagaaccctggcgacgtcaagaaggaagccgaggccaaattcaagaagatctccgaggcctacgaggttctgagtgatccgcagaagagggcggcgtacgatcagtacggcgaggaaggcctgaaggcctccgcagacggcggtggtggtggtggtggttccacgtccacgaacggggccgccaaccaacgcttcaaccctcgcaacgccgaagacgtgttcgccgagttctttggcagcaacaagccgttcgagaacatggggcgagccaagtcaatgaggttccagacagaaggcgctggcaccttcggtgggttcggtgggaacgagagcaagttcagaccatacaacaacgattcggccggcaccggctccagtcaggctcggaagccgccgcccgtggagaccaaactgccctgcacgctcgaagagctgtacgcaggctcagcacgcaagatgaagatctccaggaacgttgtgaagccgaatgggcaactagggaccgaatcggagattctaacgatcgatataaagcccggctggaagaaggggaccaagatcacgttcccggacaagggcaacgagcagccgaaccaactccccgccgacctcgtcttcgtcatcgacgagaaaccccatgacctgtacacgagagagggcaacgacctcctggtccaccggaagatcgatctggtggacgcgttggcaggaacgacggtcagcctgaagacgctcgacgggcgtgacctggtgattaggctcacggacgtggtgacacctgggtacgagcttgtggtcgccaaggaggggatgcctatcgtcaaggagaacgggaggagaggcaacctgaggatcaagttcgacgtcggtttccctaagaggttgtcgtcggagcagcggcacaccattcggaaggttcttggaggccagcctcagcagcagtgagcacaggcgttcgaaacaagattgtctgccccttattggctacccatgcaatgcagatttgcagactagttcagatgttcttctctttcttcggctggcttgtactgtatgtttagttgttttttcctttgtggtgttttctgatcttcttctcccttgttggaaaaaatggtggtattgaagaccacaggtgtaatacaagaatgctgtctttgtgtcttcatttacatgtttcagatatcgtttggttcacatatttgt

SEQ ID NO: 97635 - DNA, 1126 bp, Zea Mays
ttctctctctctcttttgccgttccacttgcgccggtcgttatattcccgcgtccaccaaaaccgttgccgccctttttgtttttcgtcgccacggagcaggatcgagcgcgagcgacgcagatgaaggcagcagaggacgcggcgggcccggaggcgacgccgacggcggcggcgcagacggtctggtacgaccccatgtcatcgccgcaggcgccggcgccgcagcagcagccggcgatagaggctgcggcgccgacctcgccgtcggtgagctccgaggcgcggcctctcagggtgtacgccgacggcatctacgatctcttccacttcggccacgcgcgcgcgctcgagcaggctaagaagtcatttcccaacacctacttgctggtaggttgctgcagcgatgagatcacccacatgtacaaagggaagaccgtcatgaccgaggacgagcgctacgaatcgcttcggcattgcaagtgggtcgacgaggtcataccagacgctccatgggtgatcaaccaggagttcatcgacaagcacaacatcgactacgtcgctcacgacgcgctcccatatgctgacacgagtggagctgccaacgatgtctacgaattcgtgaaatccattgggaagttcaaggagacgaagcgcaccgagggcatctcgacgtcggacatcatcatgaggatcttgaaggactacaaccagtacatcatgcggaacctgaccaggggctacagccgcaaagacctcggagtcagctacgttaaggagaagcagctgagggtcaacatggggatcagcaagctgagggagaaggtgaaggagcaccaagagaagttccacagcgcggccaagattgctggaaccaaccccgtggagtggatggagaatgccgaccgttggatcgtcgggttcctcgagaagttcgaggaaggatgccacatgatggaaaccgccattaaaggtcgaattcaggagggtctgaagaggcaaggcaggtcagagtcgaacctttccggagaggactccgactcgtaataatggtctgtagtatccaaatcaaactagacggaagcaggactggaggtcatactcgcgcagtctgtgtaacagtgtga

SEQ ID NO: 97636 - DNA, 2235 bp, Zea Mays
gcacccgcacgcacgcacacaacagcagcacagcgtctcttcctcctcccaaaacctctctcctctccctttctctgtctctgagcgtgtgtctgtctgtcagtgagtaataaatggcagcgagcagcgtgcgtggctgaaggctgctgagcagagcagggcgagcgctcgctagtcggctagtgctgtgctgtgctgtgctgtgcagcggttgctcctcctggtcctgctactgctccgctctcctcgtcgcttgctcgtcttttttccacactggtaactgctgcactaaaccctcccaaacccctccccctgtacgactggtacatcataaatccattccttttttatgttcctcgatcgccttctccctgttgagatttcagagatggcgccgatcagctgcccggtggagtgagctggtttctttgtttttttattattagggcggatttctttctcgcaaggagcaggaggaggaggagggggaaaggtttgtccgtttcttgcgagagcccgttgcagagatccagccaggcagcaggattcaagaacctgacctttttgtgctctactccccgagagattttcacccaaagtttggtccttggagccgattcgatccctggaaacaaccaagtgaaggtgccgcaaatccgttgtgactgcacaaaatcccaaaacgcctctgccacctatctatttgatcgttgggaacctagctccatccatctgagccaagaaagcagcagccgcagggcggaggggaggggagaggataggagagggcgtcctcttccgagcagcccgcattgccgcctgtcgatgagtgagcgctgcctccgatgccgtcggggtgctcggtgtccagtctcgcggcgcggttcgccttcttcccgccggagccggcgacgtacgccgtccggaaggacgaggccacgggccgcctcgtcgcctccggcgtgccgcgggacaacgccatggacgtcctgctcgtcgacaccagcagggggaacaaggtggtggccttctacttccggaacccctgcgcgcgcctcaccctgctctactcgcacggcaacgctgccgacctcggccagctgtacgacctctttgtgcagctcaaggtcaatctcaagatcaacctgatgggatatgactattctggctatggtgcatctactggcaagccaagtgaagagaatacatatgcagacattgaagcagtgtaccaatgcttagaaactgagtatgggatcagccaggaagacattatcttgtacggacaatctgtcggcagtggaccaacattacatttagcctctcgtttgcctagattgcgtggggtggttctccacagcgctatactgtcaggcctccgtgtggtttgccatgtgaactttactttctgctttgacatttacaaaaatgtcaagaaaataaaaaaggtcaaatgcccagtgctcgttattcatgggacggacgacgacgtggtggactggtcgcacgggaaggagctgtggaggctggcgagggagcctcacgacccgctctggatcaagggcggcgggcactgcaacctggagctgtacccggacttcatccgccacctgtcgcggttcgtccgcgagatggagaccgtgacgacgaaggcccggctgaggaagatccggccggccctccaccagctccgcaagaaggcggcgcaccgggcaagcacggcggcgacgacgaccaccaccaccaccttcaccgccaactgctgctgccgcgtccgcgtccgcaagccgacctgccccagctgcggctccttcggctgtggctgctgcgggccgcttaggagctgcctcgcgctccggtttcccaggtgctgccggcctcctgctgcctgcttcacctgcggcggctgctgttggtcatgcaggtgcaggagctgcttcaagtgctgctgctgctgatgatgatgttgagacgtgcgtcaatgagtgccgcccgccgatcgatccctgcgcgcgcgcgcgcgcgtatggtatagtgaagaggaatgacagtggtcatgggatccctgctaacaaaccctttaaacgccgtagactataaaaaaaacctagatttgagctggtggctgctgaacgttgtattaacagatcccaggactccccgccgtttgtggttcctctcgttgtagttgcttgtcagattggtgattcgtctcattattaatccgtctgatgt

SEQ ID NO: 97637 - DNA, 2101 bp, Zea Mays
gcagcacagcgtctcttcctcctcccaaaacctctctcctctccctttctctgtctctgagcgtgtgtctgtctgtcagtgagtaataaatggcagcgagcagcgtgcgtggctgaaggctgctgagcagagcagggcgagcgctcgctagtcggctagtgctgtgctgtgctgtgctgtgcagcggttgctcctcctggtcctgctactgctccgctctcctcgtcgcttgctcgtcttttttccacactgagatggcgccgatcagctgcccggtggagtgagctggtttctttgtttttttattattagggcggatttctttctcgcaaggagcaggaggaggaggagggggaaaggtttgtccgtttcttgcgagagcccgttgcagagatccagccaggcagcaggattcaagaacctgacctttttgtgctctactccccgagagattttcacccaaagtttggtccttggagccgattcgatccctggaaacaaccaagtgaaggtgccgcaaatccgttgtgactgcacaaaatcccaaaacgcctctgccacctatctatttgatcgttgggaacctagctccatccatctgagccaagaaagcagcagccgcagggcggaggggaggggagaggataggagagggcgtcctcttccgagcagcccgcattgccgcctgtcgatgagtgagcgctgcctccgatgccgtcggggtgctcggtgtccagtctcgcggcgcggttcgccttcttcccgccggagccggcgacgtacgccgtccggaaggacgaggccacgggccgcctcgtcgcctccggcgtgccgcgggacaacgccatggacgtcctgctcgtcgacaccagcagggggaacaaggtggtggccttctacttccggaacccctgcgcgcgcctcaccctgctctactcgcacggcaacgctgccgacctcggccagctgtacgacctctttgtgcagctcaaggtcaatctcaagatcaacctgatgggatatgactattctggctatggtgcatctactggcaagccaagtgaagagaatacatatgcagacattgaagcagtgtaccaatgcttagaaactgagtatgggatcagccaggaagacattatcttgtacggacaatctgtcggcagtggaccaacattacatttagcctctcgtttgcctagattgcgtggggtggttctccacagcgctatactgtcaggcctccgtgtggtttgccatgtgaactttactttctgctttgacatttacaaaaatgtcaagaaaataaaaaaggtcaaatgcccagtgctcgttattcatgggacggacgacgacgtggtggactggtcgcacgggaaggagctgtggaggctggcgagggagcctcacgacccgctctggatcaagggcggcgggcactgcaacctggagctgtacccggacttcatccgccacctgtcgcggttcgtccgcgagatggagaccgtgacgacgaaggcccggctgaggaagatccggccggccctccaccagctccgcaagaaggcggcgcaccgggcaagcacggcggcgacgacgaccaccaccaccaccttcaccgccaactgctgctgccgcgtccgcgtccgcaagccgacctgccccagctgcggctccttcggctgtggctgctgcgggccgcttaggagctgcctcgcgctccggtttcccaggtgctgccggcctcctgctgcctgcttcacctgcggcggctgctgttggtcatgcaggtgcaggagctgcttcaagtgctgctgctgctgatgatgatgttgagacgtgcgtcaatgagtgccgcccgccgatcgatccctgcgcgcgcgcgcgcgcgtatggtatagtgaagaggaatgacagtggtcatgggatccctgctaacaaaccctttaaacgccgtagactataaaaaaaacctagatttgagctggtggctgctgaacgttgtattaacagatcccaggactccccgccgtttgtggttcctctcgttgtagttgcttgtcagattggtgattcgtctcattattaatccgtctgatgt

SEQ ID NO: 97638 - DNA, 2051 bp, Zea Mays
gcagcacagcgtctcttcctcctcccaaaacctctctcctctccctttctctgtctctgagcgtgtgtctgtctgtcagtgagtaataaatggcagcgagcagcgtgcgtggctgaaggctgctgagcagagcagggcgagcgctcgctagtcggctagtgctgtgctgtgctgtgctgtgcagcggttgctcctcctggtcctgctactgctccgctctcctcgtcgcttgctcgtcttttttccacactgggcggatttctttctcgcaaggagcaggaggaggaggagggggaaaggtttgtccgtttcttgcgagagcccgttgcagagatccagccaggcagcaggattcaagaacctgacctttttgtgctctactccccgagagattttcacccaaagtttggtccttggagccgattcgatccctggaaacaaccaagtgaaggtgccgcaaatccgttgtgactgcacaaaatcccaaaacgcctctgccacctatctatttgatcgttgggaacctagctccatccatctgagccaagaaagcagcagccgcagggcggaggggaggggagaggataggagagggcgtcctcttccgagcagcccgcattgccgcctgtcgatgagtgagcgctgcctccgatgccgtcggggtgctcggtgtccagtctcgcggcgcggttcgccttcttcccgccggagccggcgacgtacgccgtccggaaggacgaggccacgggccgcctcgtcgcctccggcgtgccgcgggacaacgccatggacgtcctgctcgtcgacaccagcagggggaacaaggtggtggccttctacttccggaacccctgcgcgcgcctcaccctgctctactcgcacggcaacgctgccgacctcggccagctgtacgacctctttgtgcagctcaaggtcaatctcaagatcaacctgatgggatatgactattctggctatggtgcatctactggcaagccaagtgaagagaatacatatgcagacattgaagcagtgtaccaatgcttagaaactgagtatgggatcagccaggaagacattatcttgtacggacaatctgtcggcagtggaccaacattacatttagcctctcgtttgcctagattgcgtggggtggttctccacagcgctatactgtcaggcctccgtgtggtttgccatgtgaactttactttctgctttgacatttacaaaaatgtcaagaaaataaaaaaggtcaaatgcccagtgctcgttattcatgggacggacgacgacgtggtggactggtcgcacgggaaggagctgtggaggctggcgagggagcctcacgacccgctctggatcaagggcggcgggcactgcaacctggagctgtacccggacttcatccgccacctgtcgcggttcgtccgcgagatggagaccgtgacgacgaaggcccggctgaggaagatccggccggccctccaccagctccgcaagaaggcggcgcaccgggcaagcacggcggcgacgacgaccaccaccaccaccttcaccgccaactgctgctgccgcgtccgcgtccgcaagccgacctgccccagctgcggctccttcggctgtggctgctgcgggccgcttaggagctgcctcgcgctccggtttcccaggtgctgccggcctcctgctgcctgcttcacctgcggcggctgctgttggtcatgcaggtgcaggagctgcttcaagtgctgctgctgctgatgatgatgttgagacgtgcgtcaatgagtgccgcccgccgatcgatccctgcgcgcgcgcgcgcgcgtatggtatagtgaagaggaatgacagtggtcatgggatccctgctaacaaaccctttaaacgccgtagactataaaaaaaacctagatttgagctggtggctgctgaacgttgtattaacagatcccaggactccccgccgtttgtggttcctctcgttgtagttgcttgtcagattggtgattcgtctcattattaatccgtctgatgtttgtggagtc

SEQ ID NO: 97639 - DNA, 154 bp, Zea Mays
cggtgatgggcgtctccggcttgtctccttccttcctccaatcatccccgaccgattgacaatatctctccattatttagttatttcctcgctcatgatatcttttctttatttcttttttttttctttctttctttttcttccgttgctgctt

SEQ ID NO: 97640 - DNA, 109 bp, Zea Mays
taatccgagggctggaattatagtagtgacgtggatagcgtggttgcgcgtttatgtccagctggttaatatagtaaatactagtcggttacccgtgcgttgcgacggc

SEQ ID NO: 97641 - DNA, 4184 bp, Zea Mays
cacactgattattaccatataaatcgtcgagggaggccgggctttgccttccagaactcaccaccaccaccacgcacacacacacacgacacgcgcatagggacacggactcgacagagctgtgttagtgagtagatacctacagctacagagtggtagcaaaagagagagagggacgtgtgcagacgcgtacaaaaaaatacagagggaactgagctaagctagccagccccgaccgacactcggctggtgaattccggcccataatttctatatatcgcgttcccgtccctcccccccacgtacttcactcgacacctcccgcgccaccttcttctcttctcccctccctccctccctcccccccgctcctcctctgtcttccactcatcctcacacaacctagaagagcagacgaggcagctagcttcaggttcttggtctccgttgatcctctcctcccacccagaccctgctcggcctcttctctcttgccgagagagagagagagagagagagagagagatacaggggagccagctacctccggccgccgccaggcaggcagagagggagggcgcgcccggcattatggcggcggggcagcagcaggcgagcggcggcgccaagcacgggtgcgtgtgcgggttccccgtgtgcgcgtgcgccggcgccgcggcggtggcgtccgccgcgtcctccgccgacatggaccgcgtggccgtggccgccaccgagggccagatcggcgccgtcaacgacgagagctggatcgccgtcgacctcagcgacgacggcctgtccgccgacggcgccgacccgggcgtcgcgctcgaggaccgccccgtcttccgcaccgagaagatcaagggcgtcctcctccacccctacagggtgctgatcttcgtccggctgatcgcgttcacgctgttcgtaatctggcgcatctcgcaccgcaacccggacgcgctgtggctgtgggtgacgtcgatcgcgggcgagttctggttcggcttctcgtggctgctggaccagctgccgaagctgaacccgatcaaccgcgtgccggacctggcggcgctgcggcagcggttcgaccgcgcgggcgggggcgccggcggagggacgtcgctgctgccggggctggacgtgttcgtgacgacggcggacccgttcaaggagccgatcctgagcacggccaactccgtgctgtccatcctggccgccgactaccccgtggagcgcaacacgtgctacctctccgacgactccgggatgctgctcacctacgaggccatggcggaggccgccaagttcgccaccgtctgggtgcccttctgccgcaagcacggcatcgagccgcgcggccccgagagctacttcgacctcaagtcccacccttacatgggccgctcccaggaggacttcgtcaacgaccgccgccgcgtgcgcaaggactacgacgagttcaaggcgcgcatcaacggcctcgaccacgacatcaagcagaggtccgacgcgtacaacgccgccagggggctcaaggacggcgagcccagggcaacctggatggccgacggcacccagtgggagggcacatgggttgagccctccgagaaccaccgcaagggagaccacgccggcatcgtactggtgcttctgaaccacccgagccacagccgtcagctcggcccgccggcgagcgcggacaacccgctggacttgagcatggtggacgtgcggctcccgatgctggtgtacgtgtcccgcgagaagcggcccgggcacaaccaccagaagaaggccggcgccatgaacgcgctgacccggtgctccgcggtgctgtccaactcgcccttcatcctcaacctggactgcgaccactacatcaacaactcgcaggcgctgcgcgcgggcatctgcttcatgctcggccgcgacagcgacacggtggccttcgtgcagttcccgcagcgcttcgagggcgtggaccccacggacctgtacgccaaccacaaccgcatcttcttcgacggcacgctcagggcgctggacggcatgcagggccccatctacgtgggcacgggctgcctgttccgccgcatcacgctctacggcttcgacccgccgcggatcaacgtgggcgggccgtgcttcccggcgctgggcggcatgttcgccaaggccaagtacgagaagcccgggctggagctcaccaccaccaaggccgccgtggccaagggcaagcacggcttcctgcccatgcccaagaagtcgtacggcaagtcggacgcgttcgcggacaccatcccgatggcgtcgcacccgtcgccgttcgcggccgcctcggccgcctccgtcgtggcggacgaggcgaccatcgccgaggccgtggcggtgtgcgcggcggcgtacgagaagaagaccgggtggggcagcgacatcgggtgggtgtacggcacggtgacggaggacgtggtgacggggtaccggatgcacatcaaggggtggcggtcccgctactgctccatctacccgcacgccttcatcggcaccgcccccatcaacctgacggagcggctgttccaggtgctccgctggtcgacgggttccctggagatcttcttctcccggaacaacccgctgttcgggagcacgttcctgcacccgctgcagcgcgtggcgtacatcaacatcacgacgtacccgttcacggccatcttcctcatcttctacacgacggtgccggcgctgtcgttcgtgacggggcacttcatcgtgcagcggcccaccaccatgttctacgtgtacctggccatcgtgctgggcacgctgctgatcctggccgtcctggaggtgaagtgggcgggcgtgacggtgttcgagtggttcaggaacgggcagttctggatgacggccagctgctccgcgtacctggccgcggtgtgccaggtgctggtgaaggtggtgttcaggcgggacatctcgttcaagctgacgtcgaagcagcccgcgggggacgagaagaaggacccctacgcagacctgtacgtggtgcgctggacctggctcatggtgacgcccatcatcatcatcctcgtcaacatcatcggctccgccgtggccttcgccaaggtgctggacggcgagtggacgcactggctcaaggtggccggcggcgtcttcttcaacttctgggtgctcttccacctctaccctttcgccaagggcatcctggggaggcacggcaagacccccgtggtggtgctcgtctggtgggccttcaccttcgtcatcaccgccgtgctgtacatcaacatcccccacatccacgggccaggcggcaagcacggcggcgcgatcggaaggcacggcggcgacgcacaccaccatggcaagaagttcgacggctactacctctggccgtgaagcgccgagcagccagcatcgtcatgcatgcacatataccgcctgccctgatggtgacgatggtgagccgccaaggtgaagactgaagagtacgttcccgttcatccatccatcgtctccttagtactgctgcccggtgattagtcgatgaagagtgaaggtgaaggctacccacacacacacatttggtcgacgtacccgccaaaatttgaattttttttcttcccccttcttccttctcattcttttttcttttagttttgtccagaaatcgaaaggtgtgttgatttgatttagtttttttaattaccgtgccccgtggtaattaattatgtacgtacttatatatatatacattacgccgaagaggaaggagcactttgtataagagaggaatggggaacgtacttatgggtggggggccggggtgtcagcgtctgcctgtctgtactgtacatggcttagaggagtcacatgcagagagggagggccctggctttggggtggtattcttttggtacatggatcaagaataaattgaatttcattcttgttgtttggaaaagaggtgtacaccctcctccctcctggactctggttcctgtggagagtatgtatctttattattactgatgtaccacctgtgtgttgtcggtactgtaattggatagtaagtactacactgatctgctggtctaatcaatgttgttgttttatatggataataataatgattagtaagtcaatggtgaaca

SEQ ID NO: 97642 - DNA, 2852 bp, Zea Mays
cgtgcgtgcacgcactcgctcaatcaccactcgcgctttatatgatttttttatttacatataaccattcaccatgatttgcaaaaaaaatttgttaaacttaaaatctgtcatagaaaaaaagtactagtgaactgtgggtgaaaacaaaatttattcacgactggatttggggtggctgcagggtgctgatcttcgtccggctgatcgcgttcacgctgttcgtaatctggcgcatctcgcaccgcaacccggacgcgctgtggctgtgggtgacgtcgatcgcgggcgagttctggttcggcttctcgtggctgctggaccagctgccgaagctgaacccgatcaaccgcgtgccggacctggcggcgctgcggcagcggttcgaccgcgcgggcgggggcgccggcggagggacgtcgctgctgccggggctggacgtgttcgtgacgacggcggacccgttcaaggagccgatcctgagcacggccaactccgtgctgtccatcctggccgccgactaccccgtggagcgcaacacgtgctacctctccgacgactccgggatgctgctcacctacgaggccatggcggaggccgccaagttcgccaccgtctgggtgcccttctgccgcaagcacggcatcgagccgcgcggccccgagagctacttcgacctcaagtcccacccttacatgggccgctcccaggaggacttcgtcaacgaccgccgccgcgtgcgcaaggactacgacgagttcaaggcgcgcatcaacggcctcgaccacgacatcaagcagaggtccgacgcgtacaacgccgccagggggctcaaggacggcgagcccagggcaacctggatggccgacggcacccagtgggagggcacatgggttgagccctccgagaaccaccgcaagggagaccacgccggcatcgtactggtgcttctgaaccacccgagccacagccgtcagctcggcccgccggcgagcgcggacaacccgctggacttgagcatggtggacgtgcggctcccgatgctggtgtacgtgtcccgcgagaagcggcccgggcacaaccaccagaagaaggccggcgccatgaacgcgctgacccggtgctccgcggtgctgtccaactcgcccttcatcctcaacctggactgcgaccactacatcaacaactcgcaggcgctgcgcgcgggcatctgcttcatgctcggccgcgacagcgacacggtggccttcgtgcagttcccgcagcgcttcgagggcgtggaccccacggacctgtacgccaaccacaaccgcatcttcttcgacggcacgctcagggcgctggacggcatgcagggccccatctacgtgggcacgggctgcctgttccgccgcatcacgctctacggcttcgacccgccgcggatcaacgtgggcgggccgtgcttcccggcgctgggcggcatgttcgccaaggccaagtacgagaagcccgggctggagctcaccaccaccaaggccgccgtggccaagggcaagcacggcttcctgcccatgcccaagaagtcgtacggcaagtcggacgcgttcgcggacaccatcccgatggcgtcgcacccgtcgccgttcgcggccgcctcggccgcctccgtcgtggcggacgaggcgaccatcgccgaggccgtggcggtgtgcgcggcggcgtacgagaagaagaccgggtggggcagcgacatcgggtgggtgtacggcacggtgacggaggacgtggtgacggggtaccggatgcacatcaaggggtggcggtcccgctactgctccatctacccgcacgccttcatcggcaccgcccccatcaacctgacggagcggctgttccaggtgctccgctggtcgacgggttccctggagatcttcttctcccggaacaacccgctgttcgggagcacgttcctgcacccgctgcagcgcgtggcgtacatcaacatcacgacgtacccgttcacggccatcttcctcatcttctacacgacggtgccggcgctgtcgttcgtgacggggcacttcatcgtgcagcggcccaccaccatgttctacgtgtacctggccatcgtgctgggcacgctgctgatcctggccgtcctggaggtgaagtgggcgggcgtgacggtgttcgagtggttcaggaacgggcagttctggatgacggccagctgctccgcgtacctggccgcggtgtgccaggtgctggtgaaggtggtgttcaggcgggacatctcgttcaagctgacgtcgaagcagcccgcgggggacgagaagaaggacccctacgcagacctgtacgtggtgcgctggacctggctcatggtgacgcccatcatcatcatcctcgtcaacatcatcggctccgccgtggccttcgccaaggtgctggacggcgagtggacgcactggctcaaggtggccggcggcgtcttcttcaacttctgggtgctcttccacctctaccctttcgccaagggcatcctggggaggcacggcaagacccccgtggtggtgctcgtctggtgggccttcaccttcgtcatcaccgccgtgctgtacatcaacatcccccacatccacgggccaggcggcaagcacggcggcgcgatcggaaggcacggcggcgacgcacaccaccatggcaagaagttcgacggctactacctctggccgtgaagcgccgagcagccagcatcgtcatgcatgcacatataccgcctgccctgatggtgacgatggtgagccgccaaggtgaagactgaagagtacgttcccgttcatccatccatcgtctccttagtactgctg

SEQ ID NO: 97643 - DNA, 4438 bp, Zea Mays
caagaccttcacgaaacccactccgagctttcacgatacaatcacgcaatatttgtcgctgagaaattctcaactctggaagaaaaaaaatcgcagcacggaaaaagagagtccccctccccaccaccacatcccggtctagggtttgcgccatcccgaaccatccgctcgccgccggccgctgctgccgccatgggctccggtgacgacgagcgctccacctccaagcaccatcaccgcgataaggacaaggaccgtgaccgctcctcgtctcgccaccatcgcgacaaggaccgggaccgcgagcgctcctcgcggcaccaccgcgacgatggcgaccgggaccgggaccgccatcaccgggacaaggaccgggatcgagaggagcggaaggagagggagcgggaggagcgtaaagcacgggagcgggaggagcggaaggcacgggagcgggaggagcgggaggagcgggacagggagaaggagaaggagaaagagaaggagcgggcgcggcggcgcgaggagagggaccgcgaggagcgggagagttccaggcggcgcggggatgcggatggagaggaggacgacgaccgggaccgcaagcggcgccgccggtcctcgcaccaccaccaccgggacccagagccggagccggagcctgcatcccgggaagaggaggaggtggacgccgaggaggctgagcgccggcgccagcggaagaaggaggaggacatggaggccgagcagcagcgcctcgacgacgagatggagcgccggcgccggcgcgtcaaggagtggcaggagaagcgccgcgagcagcagcagcaggacggcagtgttgccagtggcgcttctgctgctgtggcggccgaggctgatggcgccaaagcggggaagaagtggaccttggatggcgaggagtctgacgaggaagaggacaaggaggacggcaagaaggctgaggggaatggtggtgctggtgacatggacgtgggtttgcccagtggaaatggtgatgccaacggtggtgctgagatggaggaggacgaaattgatccgctcgatgccttcatgaattccatggtgctgccagaggttgccaagctggagagtgctgcagtagcaatggatacagcccctgctgcaggtgcagatggcaagaatggtaagagctcaaaggatgtcattagtaatggggataagaaagggtcaaggaaagctacggggagaattatgcaaggggatgattcagactcggactacgatgatgctgatgatgatggggctggagaggatgatgaggatgatgaggaattcataaagcgtgtcaagaagacgaaggctgagaagttggcgatcgttgaccattcgaagattgactaccaaccgttccggaagaatttctatattgaggtgaaggacatcaccaagatgacatccgaggaagtggtagactaccggaagcacttggagctcaaggtgcatgggaaagatgtgcccaagccaataaagacatgggtgcagagtgggctgacaagcaaactccttgataccatcaagaagcttggttttgagaaaccgatgcctatacagacacaggctttgccgatcataatgagtggtcgtgattgtataggcatcgcaaaaactggatctggcaagactctagcatttgtcctcccaatgctgaggcatgttaaagatcagccccctgttgtccctggagatggccctattgggcttattatggctcctactagagagcttgtggtccagatacattcagacatcaagaagttctctaaggtgcttggcatcaactgtgttgcaatctatggtggttcgggagttgcacagcagatcagcgaattgaagaggggtgccgaaattgttgtttgtacaccgggaaggatgatcgatatcctttgcactagcagtggaaaaataactaaccttcgcagagtgactttcttggtgatggatgaagctgatagaatgtttgacatgggttttgagcctcagattactcgtatagttcagaatacccggccagatcggcagacagtacttttctctgccacatttccacggcaggtggagatactggcacgcaaggtgcttaccaagcctgttgaaattcaggtgggtgggaggagtgtcgtgaacaaagatatcacacaactggttgaggtccgaccagacaccgagaggttcttcaggctattagagttgcttggtgaatggtatgttaaggggaaaatccttgtttttgttcactcacaagataagtgtgattctctactcaaagacttgttccagcatgggtatccatgtctgtcccttcatggtggcaaagatcagactgaccgcgaatcaactattgctgatttcaagagcaacgtgtgcagcttgctgattgctactagtgttgctgctagaggattagatgttaaagaacttgaactggttgtcaattatgatgtccctaaccattatgaggactatgttcatcgtgttggtagaacaggtcgtgctggtagaaagggctttgccgttacttttatttctgatgaggatgagcgctatgcaacagaccttgttaaggctctggagctctctgagcaggctgttccacaggacctaaaagccctggctgatagatttatggctaaggtgaaacagggaactgagcaggcccatggcacaggctatggtggtagtggttttaagtttaacgaggaagaggatgaagcacggaagaccgcgaagaaggctcaggcaagggaatatggatatgaggaggacaagtcagattcagattctgatgatgaagggggagtgcgtaaggcaggaggtgatctggcagcacaagctattgccaatgctcatgcagctgctgctttggttgcaaacaaggctgctaataatgcaaatcagcaaataccaggatctgcaacagcccccttgattcctttactcacagcatcaaaccaacaaaatgatgaggccactgctcgggcacttcaggctgcaatgaacttgcaacaaaatctggcaaggatacaggcccatgcagttccagaacactatgaggctgaacttgagattaatgatttcccacagaatgcccgttggagaatcactcacaaagagacactggcccctattcaggactggactggtgctgctatcactacgaggggaacatatattcctcaaggaaaaattgttggtgcaaatgagcgcaagctttacctgtttatcgagggcccgacagagtcttctgtgaagaaggcgaaagcagaattaaaacgtgtccttgaggattgtgcaaaccaggctctaaatcttcctggatctgctcaaactggaaaatattctgttatttgagttgcagagtagataacaaagtggccgagtatttttttaggagcttataatggtttgcacacttcaaagccgctgatggattgctacttctgatgctcttgctgtctccagccttttattttgtctgatactcttttataaggcaactatggttacttaatgtgacatgattattatgaaattgtcggggtattttggcaatttctactgatgagttttcattgcctttggacagaagacttagaacacaggcggtgaccgagtgctgtaatgcaaaggaaggcggccagttttctggtgcggttttgaaagtgctggttgtgttatgacactttgaaaactgatcttattattttcttgtttatggatatcgttccctttttgtgagaggcaatacaaagtttgtgtgactatggtctaattaatccaggtgtacgtattgatttgcctattcggaagctgagaagctatagctttctctgttggtttggtcctatttacccttcattacttgtgtgctctgtttagtgtttttatccctttaaaaaggtgcagtgatgttcttgttttggtcttcagatgcactattgttactgttgcaagcggagggcatcttataggtatgtctataagctgcagctggccttggtggttgctgagatggccaaacatcttgctcatatgtttccattgctgtaactttctttcctcttcgatcttatctttgtgaaaaggggtgttgcttaggaaaaatagatgaaactggtaagatttggctcgatttgctgagacttgagaaaatgtgaatgatcatggagcaattttacctttctatcggtctatcttaggttatctccaataatttactcattctctaaattgcctaatgtgcttgcgctcttaatggtgtatgaaatgctatatatgcctggggccctaatattatctatgaacagtgtttgccctaatgtttcgtcgcttcgtctcatcttccctgaaaagtgtgcctgttatactacccatacttcttttggcgcagataaaaata

SEQ ID NO: 97644 - DNA, 1826 bp, Zea Mays
cgacttgctcgtccggttcagttcagtggcgccgtcgtgcctcgacgacggcgggagacgccgcaagcaggtgagagtgagacgggcggtgactagcgggcgcttaggccgacatcggccccgcagcggcggggtagggtgcgtcgacacgcgggactgcgacttgggggggattgattcccttcgctgttctctcttctccggcgcgtgcgcgcgggatcgaaggtagggtttgggccccaaagttcgtgtctttggggacagcggcggcgatggactacaccaacgccatccacatcatcccggacgccgcgggccccgacgcctgggccaacgcggcgtcggccgcgggcgccgacgccagcatctgggccaccgaggacgactaccgccagtggagcgccgaaccaggctacggcgaccggaacccctcgtcgcgggcggggagcgagcagccgccgccgggcaagaaggctcgcggcgggggcggcggcagcgatagcggcggcggtggcagcacgagcaagtcgcgcgccattggcaagatgttcttcaagaccaagctctgctgcaagttccgggccgggacctgtccctacgtcaccaactgcaacttcgcgcatggcatggaggagctccggaagccaccgcccaactggcaggagatcgtggccgcccacgaggaggccacggagcagcgggaggagcaccagatccccatcatgacatctggaagtgttgtagctggagacggcggcggtggcagtggtggcggctcgcaggggggcagggcattcaagggccgtcactgcaagaagttctacactgaagagggctgcccctatggtgacacatgcaccttcctgcatgatgagcagtctaaggcacgggagagcgtggccatcagtctctcgcccaccgttggtggtgggggatacaatgctgcctccgccaacggagtgatggtgcagaagccgtccaactggaagacaaggatctgtaacaagtgggagatgactggatactgcccatttgggagcaaatgccactttgctcatggttctaccgaacttcacaagtacggagggggcctcgtggacatcgacggcagggacatcttgtccactcctgattcgaagcaagccggtggctctgctaaagctcctctagagtctgctgctgcgtccactgcgttgccccctcatgcagacgtgtaccatctcggcatccagtcgcagcgctcggccatcgccagccagaggtctggacagctgcaaaggcccatccagaaatggaagggccctgacaagatcagcaggatctatggagactggatagatgagaacgaatagaagaaggatcttctacggtgggccgaagggaagctgttacttggtatccgtccgactccacatcagctggtggaagctttacctggcttagaagatctcgttagcgctgcaaaaccagagtcaagatcatctttgcaagacctgtattggggagataaactgctggaacatagtgccgctttcttccgttgaactcagtagcattgctatgcttgtgtaatttgtgtgttggatggaggagcataatagcatatagcgagtcatggtgcaccctgtacagggtggctgagctgcatcctgaaggctggttgttcaggtgcgtccgtgactgtctgttggttcttgttttcgggctattattattgggccggatatttctagccttactctttggcccattgagcagtgcgctgtgtaccaagcagttaaggccaataaacagggtattttttcccctgaggtctagtttggaaa

SEQ ID NO: 97645 - DNA, 1838 bp, Zea Mays
cgacttgctcgtccggttcagttcagtggcgccgtcgtgcctcgacgacggcgggagacgccgcaagcaggtgagagtgagacgggcggtgactagcgggcgcttaggccgacatcggccccgcagcggcggggtagggtgcgtcgacacgcgggactgcgacttgggggggattgattcccttcgctgttctctcttctccggcgcgtgcgcgcgggatcgaaggtagggtttgggccccaaagttcgtgtctttggggacagcggcggcgatggactacaccaacgccatccacatcatcccggacgccgcgggccccgacgcctgggccaacgcggcgtcggccgcgggcgccgacgccagcatctgggccaccgaggacgactaccgccagtggagcgccgaaccaggctacggcgaccggaacccctcgtcgcgggcggggagcgagcagccgccgccgggcaagaaggctcgcggcgggggcggcggcagcgatagcggcggcggtggcagcacgagcaagtcgcgcgccattggcaagatgttcttcaagaccaagctctgctgcaagttccgggccgggacctgtccctacgtcaccaactgcaacttcgcgcatggcatggaggagctccggaagccaccgcccaactggcaggagatcgtggccgcccacgaggaggccacggagcagcgggaggagcaccagatccccatcatgacatctggaagtgttgtagctggagacggcggcggtggcagtggtggcggctcgcaggggggcagggcattcaagggccgtcactgcaagaagttctacactgaagagggctgcccctatggtgacacatgcaccttcctgcatgatgagcagtctaaggcacgggagagcgtggccatcagtctctcgcccaccgttggtggtgggggatacaatgctgcctccgccaacggagtgatggtgcagaagccgtccaactggaagacaaggatctgtaacaagtgggagatgactggatactgcccatttgggagcaaatgccactttgctcatggttctaccgctataattgcagaacttcacaagtacggagggggcctcgtggacatcgacggcagggacatcttgtccactcctgattcgaagcaagccggtggctctgctaaagctcctctagagtctgctgctgcgtccactgcgttgccccctcatgcagacgtgtaccatctcggcatccagtcgcagcgctcggccatcgccagccagaggtctggacagctgcaaaggcccatccagaaatggaagggccctgacaagatcagcaggatctatggagactggatagatgagaacgaatagaagaaggatcttctacggtgggccgaagggaagctgttacttggtatccgtccgactccacatcagctggtggaagctttacctggcttagaagatctcgttagcgctgcaaaaccagagtcaagatcatctttgcaagacctgtattggggagataaactgctggaacatagtgccgctttcttccgttgaactcagtagcattgctatgcttgtgtaatttgtgtgttggatggaggagcataatagcatatagcgagtcatggtgcaccctgtacagggtggctgagctgcatcctgaaggctggttgttcaggtgcgtccgtgactgtctgttggttcttgttttcgggctattattattgggccggatatttctagccttactctttggcccattgagcagtgcgctgtgtaccaagcagttaaggccaataaacagggtattttttcccctgaggtctagtttggaaa

SEQ ID NO: 97646 - DNA, 1940 bp, Zea Mays
cgacttgctcgtccggttcagttcagtggcgccgtcgtgcctcgacgacggcgggagacgccgcaagcaggtgagagtgagacgggcggtgactagcgggcgcttaggccgacatcggccccgcagcggcggggtagggtgcgtcgacacgcgggactgcgacttgggggggattgattcccttcgctgtgagcaaaccatacccaaatccctctctcccgtcctccctatccagcttatttggttgcggatttcttagatgcggtgtcctactgaacggaattggtggtctgttcgattaggttctctcttctccggcgcgtgcgcgcgggatcgaaggtagggtttgggccccaaagttcgtgtctttggggacagcggcggcgatggactacaccaacgccatccacatcatcccggacgccgcgggccccgacgcctgggccaacgcggcgtcggccgcgggcgccgacgccagcatctgggccaccgaggacgactaccgccagtggagcgccgaaccaggctacggcgaccggaacccctcgtcgcgggcggggagcgagcagccgccgccgggcaagaaggctcgcggcgggggcggcggcagcgatagcggcggcggtggcagcacgagcaagtcgcgcgccattggcaagatgttcttcaagaccaagctctgctgcaagttccgggccgggacctgtccctacgtcaccaactgcaacttcgcgcatggcatggaggagctccggaagccaccgcccaactggcaggagatcgtggccgcccacgaggaggccacggagcagcgggaggagcaccagatccccatcatgacatctggaagtgttgtagctggagacggcggcggtggcagtggtggcggctcgcaggggggcagggcattcaagggccgtcactgcaagaagttctacactgaagagggctgcccctatggtgacacatgcaccttcctgcatgatgagcagtctaaggcacgggagagcgtggccatcagtctctcgcccaccgttggtggtgggggatacaatgctgcctccgccaacggagtgatggtgcagaagccgtccaactggaagacaaggatctgtaacaagtgggagatgactggatactgcccatttgggagcaaatgccactttgctcatggttctaccgaacttcacaagtacggagggggcctcgtggacatcgacggcagggacatcttgtccactcctgattcgaagcaagccggtggctctgctaaagctcctctagagtctgctgctgcgtccactgcgttgccccctcatgcagacgtgtaccatctcggcatccagtcgcagcgctcggccatcgccagccagaggtctggacagctgcaaaggcccatccagaaatggaagggccctgacaagatcagcaggatctatggagactggatagatgagaacgaatagaagaaggatcttctacggtgggccgaagggaagctgttacttggtatccgtccgactccacatcagctggtggaagctttacctggcttagaagatctcgttagcgctgcaaaaccagagtcaagatcatctttgcaagacctgtattggggagataaactgctggaacatagtgccgctttcttccgttgaactcagtagcattgctatgcttgtgtaatttgtgtgttggatggaggagcataatagcatatagcgagtcatggtgcaccctgtacagggtggctgagctgcatcctgaaggctggttgttcaggtgcgtccgtgactgtctgttggttcttgttttcgggctattattattgggccggatatttctagccttactctttggcccattgagcagtgcgctgtgtaccaagcagttaaggccaataaacagggtattttttcccctgaggtctagtttggaaa

SEQ ID NO: 97647 - DNA, 1299 bp, Zea Mays
aggtatggtgagaacgtgttagaatttaagaagaatcctaactggatatgtccagtttgtcgtggcatatgtaattgcagcatatgcagaaccaagaaaggatggttctctactggttctgcctataggaagcttgatggcttgccagcgatggtacaagtcatcctctccaatgaccccactgtgcagcttgaggccactatgcgacaacttacttgttaacttgagagatcctcagagaccaatttgcaagatgcctataggatgcaaaatgcaaaatttaccgatgcgctgtgctacacattgctccatcctctcctcacctgtgaagatatgcagcaaaatgcaaagcctgactgcaaaaggatatgaactcgtctccaatgggattgacaaccatttagtttcggtgaatctcaagaataaggcactaactcctcacatgcaaaaacgggcagaaggatcaccaactccaaagtctggtagagtgctaggtcctgctttgggtgatcagcagcagggaaccttttctgttaacctgtggaaggttgcgtttcacgacacattcaacagaatgtgccccctcagtgctggcggacatgagtgtggctgtttaccagtattagcaaaacaagtgatggagcagtgtgtagcccgtttggatgttgccatgttcaatgccatccttcgtgaatcagcaagtgagataccaacagaccctatatctgacccgattgttaacccaaaagtcctaccaattccagctggtgatctaagctttgggtcaggcgcgcagctgaagaactctattggaaactggtccagatggctgacagataagcttggtatagatcatgatgattctgaggacataggagatgttgaagacgaaagaagagccgcagctgaaacgaaatcgtttcaacttctcaatgagctaagtgatctcctgatgctcccaaaggacatgctccttgaaaaatctatcaggaaagaggcttgtccctcaattggccttcagttagtgactaggatcctgggcaacttcaccacagatgagttttgccctgatccggttctaagcacggtcttagaagagctgaattccgagagcttgatggagcgtcacgccaacaaagacgcgaccagtgtgtttccgtgcaccgctgcccctatagtgtaccgcacaccttcaacgttggacgcggcagagagagcagcagacataggaggtggcgcgaagctggacaggaaagcctcaatggtgcagaggagagggtacaccagtgacgacaacct

SEQ ID NO: 97648 - DNA, 417 bp, Zea Mays
aattagttcttctcctaccctagaaagatggcaggcctggatttgggcacaagctcctacctgcaccaccaccaccaccagtccctgcacctccaccacgaagacggcggccgcccgccgggctccaagaacaagcccaagccgcccgtgatcatcacccgggagagcgccaacgcgctccgggcgcacatcctcgaggtcgccgccggctgcgacgtcttcgaggcgctcaccgcatacgcgcgccgcaggcagcgcggcgtctgcgtgctctcggcggccgggaccgtcgccaacgtcacgctgcgccagccgcagtcgtcccaggccggcccggcctcgccggcggtcgccacgctccacggcaggttcgagatactctccctcgccggctccttcctcccgccccccgcgccg

SEQ ID NO: 97649 - DNA, 697 bp, Zea Mays
ttagtttaatttatgaaaaatctagtcaattactggaccaaatcattttttcttgtaggccgagcaacaaggacgccctgcgagaagagatgaaatatatgttagaacacacacgcgtaagaacaaagaaggggatattgtgcctctatctggagcagaaatatttaataactcaagggtgcatcggtcagatgaggtggcacatgattacagtggtaatgaccattcacaaaatatggttgaagatgacttgcagcttactaggcgagttgcaagcactatgggccgtccaaggaatcgtgaagatgttaatactattgaagagcaaagtcgcagatcagaagttcttattgcaatagcaaatattatctcaaccgacccaaccactaaggttggagatgttcctcttggaagggagtttacacaggtttttgtgactcgtgtgctaaaaagggaaagtactctaccacgaccatacttaggtgtagagagtatgggggatgctctttttatgcccgttgcatggccaacgaacaagatgagtcgtaacaaaaaaataaacattgacccaaggttctacaacaacagcagtttgtattttctgttgggagtttatggacctgctgatacagtaattgacatattatcaaaatatattgtaggaagaggagctggaagcaaggatcagattgcttga

SEQ ID NO: 97650 - DNA, 1740 bp, Zea Mays
aaaaaacaaaataaaaaaattgggtgtttacaacgaattttaggtcttggcctcttggcctcttggtccaagcgattattttccgtgggccgttgggtccgtggaacatatccgttgcagaagactacagattacagaagcgctcgctcgctgttgttgctgctgccaactgaagggatgcgagccacggccaccgcaggaggccgtgcggtgttccacctccaacacctccgcccgcgcccgccatggcgagctcttcctcctgctgccaccacgcacctctcccgctccgcgccagcgaggcgagccgaccaccgttgcctccccaaaggtttcttatcaactctagaaccgaggatttcaggagtctctttgtgtcggcgtgctcatgcaacatgtagctattctttggatgacaagttacagggagagctagatgatacacagggagaacagagaaagctagaaacagttggtgcgtttcagaaaataccaatggtgatgcctgcaactgatatactaatgtcagcacaaaggaaatctagaaacgtgccaccaacaaagggtatagcaaatattgctaagcgtgaaaggaacaaaggtgcgaaacagcttgatgccttaatgaaagaactttctgtaccgctgagaacatacacagaaaacttcccaaagaggagagatttgcatccttatgagaggtctctcattgagttgacttttggcgagggttattatgagcaggttctaggacgtgtagatactctcaggaaaaggattacttctgttggaaagcaacatgcttcagtctgtgctaagtcaacaacaaaacgtgaagcagaggagcgcctcactgagggcagaaagaaactcgaagaggctttccagcatgggaagcacgccattgatgatttagtaaatgtagcaaaggctttgcgttctatgcctgttgttgatctacatattccaacactatgtctagttggatcacccaatgtagggaagtcatctttagtccggatattatcatctggaaaacctgaggtctgcagctacccattcacaacaagagggattctaatgggtcacattgtatctaatcaggaacgttttcaggttacggacactccaggactcctgacaaggcatgatgatgacagaaataacatagagcgattgacactagctgtcctttcttatctacctatcgctgtcctgtatgtgcatgatctatccgaagactgtgggacctcagtggccgatcagtacatcacgtacaagcatattaaggacagattcggtgaccgcctatggcttgatgttatttccaaatgcgatcttttgggaaagaaagagcccataagttttcacgatgctgatgaagatgtagcacggtacagaagattggggccagaaggcgccctccaagtatctgtgcagaccgaaatcggcgtcaaacagcttaaggaaagagtgcatgagctgctgacctctcagatggctcggatcaaatctagcaaggcggagcatgaaacacatgaagtagggactagtgttgtttactgaagtttgacaataataaggattcgaatatcatgctgggtgtccgcgtaaacattcaatgtcgatgatggtaacacattccatcagttgtccttttgtccatttggaaagggtggtcaaaattgcccattatgcgttctttagtagggtaccaccacctgtccgaaaaaaaaaaga

SEQ ID NO: 97651 - DNA, 1800 bp, Zea Mays
aaaaaacaaaataaaaaaattgggtgtttacaacgaattttaggtcttggcctcttggcctcttggtccaagcgattattttccgtgggccgttgggtccgtggaacatatccgttgcagaagactacagattacagaagcgctcgctcgctgttgttgctgctgccaactgaagggatgcgagccacggccaccgcaggaggccgtgcggtgttccacctccaacacctccgcccgcgcccgccatggcgagctcttcctcctgctgccaccacgcacctctcccgctccgcgccagcgaggcgagccgaccaccgttgcctccccaaaggagtctctttgtgtcggcgtgctcatgcaacatgtagctattctttggatgacaagttacagggagagctagatgatacacagggagaacagagaaagctagaaacagttggtgcgtttcagaaaataccaatggtgatgcctgcaactgatatactaatgtcagcacaaaggaaatctagaaacgtgccaccaacaaagggtatagcaaatattgctaagcgtgaaaggaacaaaggtgcgaaacagcttgatgccttaatgaaagaactttctgtaccgctgagaacatacacagaaaacttcccaaagaggagagatttgcatccttatgagaggtctctcattgagttgacttttggcgagggttattatgagcaggttctaggacgtgtagatactctcaggaaaaggattacttctgttggaaagcaacatgcttcagtctgtgctaagtcaacaacaaaacgtgaagcagaggagcgcctcactgagggcagaaagaaactcgaagaggctttccagcatgggaagcacgccattgatgatttagtaaatgtagcaaaggctttgcgttctatgcctgttgttgatctacatattccaacactatgtctagttggatcacccaatgtagggaagtcatctttagtccggatattatcatctggaaaacctgaggtctgcagctacccattcacaacaagagggattctaatgggtcacattgtatctaatcaggaacgttttcaggttacggacactccaggactcctgacaaggcatgatgatgacagaaataacatagagcgattgacactagctgtcctttcttatctacctatcgctgtcctgtatgtgcatgatctatccgaagactgtgggacctcagtggccgatcagtacatcacgtacaagcatattaaggacagattcggtgaccgcctatggcttgatgttatttccaaatgcgatcttttgggaaagaaagagcccataagttttcacgatgctgatgaagatgtagcacggtacagaagattggggccagaaggcgccctccaagtatctgtgcagaccgaaatcggcgtcaaacagcttaaggaaagagtgcatgagctgctgacctctcagatggctcggatcaaatctagcaaggcggagcatgaaacacatgaagtagggactagtgttgtttactgaagtttgacaataataaggattcgaatatcatgctgggtgtccgcgtaaacattcaatgtcgatgatggtaacacattccatcagttgtccttttgtccatttggaaagggtggtcaaaattgcccattatgcgttctttagtagggtaccaccacctgtccgaaaaaaaaaagattatcgttcgtcttctccatggtagaaagattgtcgatagagctcgggaaaagattattgaaacaaaaaatcatttaaatgatcaagatgtct

SEQ ID NO: 97652 - DNA, 165 bp, Zea Mays
ttttcttttattattctcctttctttctattgttttcttacgtattttctgttatttacttatgttttaagttttactttcaaatccgtattttttatgcacaaacaaataaagattcagcatgacaatgcaagtgttttatttatatattaattgtttgtttag

SEQ ID NO: 97653 - DNA, 1751 bp, Zea Mays
aaccccacactcctctggctcagctgtgagctccaccggggtgtagctgcagctgcagtgtcgcacgcacgcacatggcggccctcgccctgctccctctcgtgctccgcctcttcgccgtgcaagcaggcggcagagtcgacggacgcttcacggcgtgcctggccgccgccggcgtgggcaacgtgacgacgcggcagtcccccgggtacgccgcggcgctgctcgtctccgtgcagaacctgcggttcgcgggcgcgggcgcgcccaagcccgcggccgtggtggtcccggcgtcgctgcaggagctttgcgacgcggtgcggtgcgcgcggggggcggggctggcgctgcggctccgcagcggcgggcacagctacgaggggcagtcctacacgacctcggacggcggcggcgcgttcgccgtggtggacctagcggcgctggaccgcgtgcgcgtggacgcggcgcggcgcacggcgtgggtgcaggccggcgcgacgctggggcaggcgtaccgcgccgtggcggcggccagcccggcgctggcattatcggcggggtcgtgcccgacggtcggctcgggcgggcacatcgccggcggggggttcgggctgctgtcgcgcaagcacggcctggcgggggacaacgtggtggacgccgtgctggtggacgcgcgcggccgcgtcctcgaccgcgccgccatgggggaggacgtgttctgggccatccgcggcggcggcggcggcgcctggggcgccgtgtacgcctggcgcgtccgcctcagcccggtccccgagcgcgtcaccgcgttcgtcgtcaaccgcccaggccccgcccgctccgtcgcctcgctggtgtccacgtggcagcacgtcgcgccgtggctgcccgacgagttctacgtctccgcgttcgtcggcgccgggctgccggaggcggacccgggccgccgggccgccggcgtctccgtcacgttcaaggggctgtacctcgggccggcgcacgaggcgatgcagatcctggcggcccggttcccggagatcgggctgtccgacctggccccgagggagatgagctggatcgagtccgtggtgttcttctccggcctgcccgaggggagcgccgtgtcggacctcgcggaccgggtgctgcacaccaagacctacttcaaggcaaagtcggactacgtgcggcgtccgacgccgctagaccacctggtcaaagccgtcggcctgctgtccgagcagcccaaggcgtacgtcatcctggacccgtacggcggcgccatggaccgggtcgggtccgccgtcctccccttcccgcaccgcaagggcaacatccacggcatccagtacatggtcgagtggacggccggcgacgacgagcgcagggaggagtacatgggctggctgcgccggttctacgacttcatgggagcgtacgtggcgacggagccacgggccgcgtacgtaaactacatggacctcgatctcggaacgaacgactggtccgacgccgacgagaggagccccaacccacaggtggaggcggcgcgggcgtggggcgagcggtacttcctgggcaactacgaccggctggttcgagccaagacgttgatcgacccggacaacgtgttccgcaacgcgcagagtatcccgccacttggaggcggcgcccatggcatgacgtggagcacgcgtggcatctcgcccaaggccacatccaatggaagcacgtatgatatatag

SEQ ID NO: 97654 - DNA, 2518 bp, Zea Mays
ccgcaccacgtctcctacactcctccgcctgccgtcctgtcctgcgcccttactcctcggacgccccccacgccaccaatccccaaccccccattccgcactcccctctccctgccccgccgcgcttccttcgctgctaaagcggctgcgatggcgctctgggcgctgccggtcggcttccgcttccaccccaccgacgaggagctcgtcagccactacctcaagggcaagatcaccggccagatcaactccgaggccgaggtcatccccgagatcgacatctgcaagtgcgagccgtgggacctcccaggtaagtctctgatccggtccgacgatcctgagtggttcttcttggcgcccaaggaccgcaagtaccccaacggtagcaggtcgaacagggccaccgtggccgggtactggaaggctactggcccggacaggaacatcaagtccaagggcgacaagagcaaacagtttaccatcggcaagaagaagacccttgtcttccaccgtggacgcgccccgaagggcgagcgcacagggtggattatgcacgagtaccgcaccaccgagcctcagttcgagtctggcaagcagggtggttatgttctttatcgcctcttctggaaaccagaggagaaaactgagcgctccagcccaaaggaaatggatagaagtggcaactcgcctactactattcgttcttcacgtgacaaccaagaggcgaatgaggaagctaatacaccattaaataaaaaatctctagaatctgctctgcatgatccgattgagctgcccaattctgctgaaacccctgctgggccaaggaaaatgtgcctggcggacagaaatgataatttggtggctactgcaccggttgtttcccatatacctttccagggacatgctgctggtgtagctaaggttgatccttcagctgctgcttcagcccacttcgttaatccccagaatggaaatgacgactgcaacaattttatgtctgatttcacccccattctaccgcatgaaaatgcattcttcactggtacacagcaaggagcttttggttttgatggaaatggcatcatgaatcatcctgatgccctggatgctttcttgaaccaaacacttgttgatactgatgaacattcatcgacaacatcaaaagttcagtatgattctgacattccaacagaatttgcgaaccattggaatatgcaggatgagcatcaagactggtgggaaaagttagattttgagccatatgaaccaactttgcttccttatgacaccactgacctagacgtactctcagtagactctggcgccgattccttcaatgacctcttcaatgtgactggcattactcttaggcctcaacagttggactccactgtgcaaccagactgtgtgttccctgatcagggcactgcactaaggaggctgaagctacaggttgttgagtgtggggagagcataactaaagatgagagtgaagatgaagtatcatgtgttgaaagtccaaactattttgatgaatctgtcgagttcgctgcagagaagggtgtggcttcttatggggatggggctgactcaactgggattgttattagaagccgttaccctgccccaagttcaagctcagagagttcattcactcaacagggaactgctatgcgaaggctacggttgcagttgggccttaacgaaggcacatgtcctagtagtggtgattcatcaagctgcatcgtagatgaatcagaaagtcagcagaaagcagagattgaagaggatgcaagcacgaacctagctggaagtgttgataatctacctggcaatagccatgatgatgagcaaaaggacatccctgaacatgatgctgaaatgtctgtttcaggagttaaatctgtcctgaggctgcggaaaacttctgcggaaagtctgaaggatgtgaagcaggaggattgtctggagccagacgggagagcaccgatgcagagggtaggcttccaatcatccatcatctggctggttctttcggtggctgtgctgctgcttctctattgtggcgtatggatgagtatgatatgtatcctggtgcggtgttttgcgcacatgggttcctggcatcaacctgatgtgtgaacttctgtcataacatgcgtttgacagcagtaagacatcccgacatatgccaatgcagctaaaaataaaaaaaagaggtagcaagtgaagagggagaaaaaagagatgtgttattgtaggtcttagtacatcctagtcttgccaatgcagctcaaaagaaaaaagaggtagcaagtgaggagggagaaaaaaaaagaggtgttattgtaggtgttactaatgttgtagctgttgtgcagttgtaaatcccccttcggcagctggttttatttcctgatgtaatgtaagcaagagcaaggtcctgtcagatgcgtgcgctgaaagtctgaacctccgataatatctgatgcttcttgtagatagctgtttcaga

SEQ ID NO: 97655 - DNA, 2769 bp, Zea Mays
tgctaaagcggctgcgatggcgctctgggcgctgccggtcggcttccgcttccaccccaccgacgaggagctcgtcagccactacctcaagggcaagatcaccggccagatcaactccgaggccgaggtcatccccgagatcgacatctgcaagtgcgagccgtgggacctcccaggtaagtctctgatccggtccgacgatcctgagtggttcttcttggcgcccaaggaccgcaagtaccccaacggtagcaggtcgaacagggccaccgtggccgggtactggaaggctactggcccggacaggaacatcaagtccaagggcgacaagagcaaacagtttaccatcggcaagaagaagacccttgtcttccaccgtggacgcgccccgaagggcgagcgcacagggtggattatgcacgagtaccgcaccaccgagcctcagttcgagtctggcaagcaggtacggagctattgttgttagtgtttctaccgtatgtctgatttgtactttattagtacttaagtctgtctttgagaaatataagatactagtctgttcactgaagaatgtggccttaaacactagtttgatttcaggtgggtgaaagaattgttctaatcatcttctcaattagtttatgtacagtgtaatcacattgtaatgattttttagatctcatggcaaatgtttaccaacattacatggtgtttatgtatcttattctttcagggtggttatgttctttatcgcctcttctggaaaccagaggagaaaactgagcgctccagcccaaaggaaatggatagaagtggcaactcgcctactactattcgttcttcacgtgacaaccaagaggcgaatgaggaagctaatacaccattaaataaaaaatctctagaatctgctctgcatgatccgattgagctgcccaattctgctgaaacccctgctgggccaaggaaaatgtgcctggcggacagaaatgataatttggtggctactgcaccggttgtttcccatatacctttccagggacatgctgctggtgtagctaaggttgatccttcagctgctgcttcagcccacttcgttaatccccagaatggaaatgacgactgcaacaattttatgtctgatttcacccccattctaccgcatgaaaatgcattcttcactggtacacagcaaggagcttttggttttgatggaaatggcatcatgaatcatcctgatgccctggatgctttcttgaaccaaacacttgttgatactgatgaacattcatcgacaacatcaaaagttcagtatgattctgacattccaacagaatttgcgaaccattggaatatgcaggatgagcatcaagactggtgggaaaagttagattttgagccatatgaaccaactttgcttccttatgacaccactgacctagacgtactctcagtagactctggcgccgattccttcaatgacctcttcaatgtgactggcattactcttaggcctcaacagttggactccactgtgcaaccagactgtgtgttccctgatcagggcactgcactaaggaggctgaagctacaggttgttgagtgtggggagagcataactaaagatgagagtgaagatgaagtatcatgtgttgaaagtccaaactattttgatgaatctgtcgagttcgctgcagagaagggtgtggcttcttatggggatggggctgactcaactgggattgttattagaagccgttaccctgccccaagttcaagctcagagagttcattcactcaacagggaactgctatgcgaaggctacggttgcagttgggccttaacgaaggcacatgtcctagtagtggtgattcatcaagctgcatcgtagatgaatcagaaagtcagcagaaagcagagattgaagaggatgcaagcacgaacctagctggaagtgttgataatctacctggcaatagccatgatgatgagcaaaaggacatccctgaacatgatgctgaaatgtctgtttcaggagttaaatctgtcctgaggctgcggaaaacttctgcggaaagtctgaaggatgtgaagcaggaggattgtctggagccagacgggagagcaccgatgcagagggtaggcttccaatcatccatcatctggctggttctttcggtggctgtgctgctgcttctctattgtggcgtatggatgagtatgatatgtatcctggtgcggtgttttgcgcacatgggttcctggcatcaacctgatgtgtgaacttctgtcataacatgcgtttgacagcagtaagacatcccgacatatgccaatgcagctaaaaataaaaaaaagaggtagcaagtgaagagggagaaaaaagagatgtgttattgtaggtcttagtacatcctagtcttgccaatgcagctcaaaagaaaaaagaggtagcaagtgaggagggagaaaaaaaaagaggtgttattgtaggtgttactaatgttgtagctgttgtgcagttgtaaatcccccttcggcagctggttttatttcctgatgtaatgtaagcaagagcaaggtcctgtcagatgcgtgcgctgaaagtctgaacctccgataatatctgatgcttcttgtagatagctgtttcagaattttcggttaatgaacccagttactgcttgcttgttgatctattttctgtgttgctatctgatgggattgttgtggtgaattcgagttcattgggaatacatgacagaattgtg

SEQ ID NO: 97656 - DNA, 2452 bp, Zea Mays
cttctgtgccccatatgtacccattttaaccttgaccaaccagacgcaccggcctcgccggcgatgccctcctccacctccgccggcggcggcgccattcccgccggcccaccgtcgacgctctctccgaacgcggctccctacaccttcctcgcgcgtcagtcccgcgccccacccggacgcctccaagatggtgatgctccaaggttgattgataataactttgtgttgtatggagaggacaacagttcttattcggtgccactggcagcacaatcaggaatgaagcagagtgacactgtttactcaagcagctcgcatggaacacaccaaggtcagccaagctccgcacgtggaattcctgtcggtgtttatccatctccaacgtcctcaattgcgatagtttcagagccatcagtgaccataggttctgatttcaaccagcaccttgttccattgacctcaggtaagggaagcagacagccaagggtgacgatcagaagccctccaaataagacttcagaaactaacaacaccatttttggttctgttagcaaattggctataaggaaaaatgatgagtccaacaaagagactgggaaacatgtctccttcagcaggaacttacaactcggtagtcctgctcatggaaatggcaattcaaatggcgccatggctctttcgaaagagctaaatcctgattttggcgtgaagcctcttgtcttgtctgcatgcactagcccatgtgttacaatggctgatgatttgaaccctgatccatcggagtgttctgtggattcaccttgctggcgagggacagcttctcgcctctctccatttgatggccttccaacatcaattgtgcaatcagtgaaacaggaactagtgcctattgatgcagggaaggaacaaagctctaccactgattgcgaggctccaactaaacttcagaatttggtctgttcaaagagtacacaaaaccattcccaatcccatgttaaattgggtctgtccaaagaacctggagacatttgtgcaaatatcacacaatattcccatcgaaagaagcactttgcagaacatagtgcagtgaattgcaatgcagaccaacactgtttagcagtgatagatgattgcataaagcgatctggcctaaactctgctgctcctgattttgttcccttagctgttaggaaatcaaataccagcgatggttcctgttcttcatctggaacgaacgtatcgggaattctgaaagagatcaatagtttgtcggaggtgttatgcaataattattctgatgaaattaagctagaggagcatgaccacagcctcctccaatcagtaattgggaatcttcagagttatcttcacaaagcaagcaaggttcctgctatggttgattctgacaagtcagggggactaaaggcttgctatgctcagaatgcagtttcaaaacctgtcgcaggagactacaacggtagtttcactgccgataatggaaaaggcataagtatctctaatcttggtgattctagtcctttggtcggtgacttaaggaaaaagagcgtgacagggtaccagcagcctgcactcagcaattttccaaaggagctctcatgggaggagcggtcacaggctcttatctataagaaactgtggtttgatgcagaacgcacaaactgtgctttgaagtatcaacttaaacaaacgcgtgtggaaatcgacctagagtcaagcacagctcatattggcgggggtccaagaaacagttctttccatctatgtgatgtgggtgtagatccaagtagttcctatggatctgccataacttgcccaccgatgatgctcaagggccatcctggagaaagaaagagtcataacctcctttctgctgctgaccacattcagtcaggagacagcagtgctctgtcaagaccaaaaggttacatagccgtgccagagaatattgaggatggatatttcttgtcagggccggaagaaaccggtgtccgccgccatgcacgtcctggtctacaaagtaggcccctcggaaggttgaacacaagtacgtcagatggaatgtcatcctcgtatgtcactggaagggatgacattctgcgtggcagctgcgagtttggatcttcagattgggagcatgtgttgaaggaagaaatcggctcaacctaaaaaaaaatttgaagggatctggcaataagtatatagtactgtacatgtatgagctaccacgaagctaggaattcggatcttcttgattttttttttgcttgacaaggctgatgaatgggcactggttggaatggtgctgctctagcctacggaaaaccccttatttatcttgtcttgggaacaatgcctataaatcataacttggatggctatgctaattttctactgtgccgaatgcagatgttattttggcacacgatta

SEQ ID NO: 97657 - DNA, 2320 bp, Zea Mays
cttctgtgccccatatgtacccattttaaccttgaccaaccagacgcaccggcctcgccggcgatgccctcctccacctccgccggcggcggcgccattcccgccggcccaccgtcgacgctctctccgaacgcggctccctacaccttcctcgcgcgtcagtcccgcgccccacccggacgcctccaagatggtgatgctccaaggttgattgataataactttgtgttgtatggagaggacaacagttcttattcggtgccactggcagcacaatcaggaatgaagcagagtgacactgtttactcaagcagctcgcatggaacacaccaaggtaagggaagcagacagccaagggtgacgatcagaagccctccaaataagacttcagaaactaacaacaccatttttggttctgttagcaaattggctataaggaaaaatgatgagtccaacaaagagactgggaaacatgtctccttcagcaggaacttacaactcggtagtcctgctcatggaaatggcaattcaaatggcgccatggctctttcgaaagagctaaatcctgattttggcgtgaagcctcttgtcttgtctgcatgcactagcccatgtgttacaatggctgatgatttgaaccctgatccatcggagtgttctgtggattcaccttgctggcgagggacagcttctcgcctctctccatttgatggccttccaacatcaattgtgcaatcagtgaaacaggaactagtgcctattgatgcagggaaggaacaaagctctaccactgattgcgaggctccaactaaacttcagaatttggtctgttcaaagagtacacaaaaccattcccaatcccatgttaaattgggtctgtccaaagaacctggagacatttgtgcaaatatcacacaatattcccatcgaaagaagcactttgcagaacatagtgcagtgaattgcaatgcagaccaacactgtttagcagtgatagatgattgcataaagcgatctggcctaaactctgctgctcctgattttgttcccttagctgttaggaaatcaaataccagcgatggttcctgttcttcatctggaacgaacgtatcgggaattctgaaagagatcaatagtttgtcggaggtgttatgcaataattattctgatgaaattaagctagaggagcatgaccacagcctcctccaatcagtaattgggaatcttcagagttatcttcacaaagcaagcaaggttcctgctatggttgattctgacaagtcagggggactaaaggcttgctatgctcagaatgcagtttcaaaacctgtcgcaggagactacaacggtagtttcactgccgataatggaaaaggcataagtatctctaatcttggtgattctagtcctttggtcggtgacttaaggaaaaagagcgtgacagggtaccagcagcctgcactcagcaattttccaaaggagctctcatgggaggagcggtcacaggctcttatctataagaaactgtggtttgatgcagaacgcacaaactgtgctttgaagtatcaacttaaacaaacgcgtgtggaaatcgacctagagtcaagcacagctcatattggcgggggtccaagaaacagttctttccatctatgtgatgtgggtgtagatccaagtagttcctatggatctgccataacttgcccaccgatgatgctcaagggccatcctggagaaagaaagagtcataacctcctttctgctgctgaccacattcagtcaggagacagcagtgctctgtcaagaccaaaaggttacatagccgtgccagagaatattgaggatggatatttcttgtcagggccggaagaaaccggtgtccgccgccatgcacgtcctggtctacaaagtaggcccctcggaaggttgaacacaagtacgtcagatggaatgtcatcctcgtatgtcactggaagggatgacattctgcgtggcagctgcgagtttggatcttcagattgggagcatgtgttgaaggaagaaatcggctcaacctaaaaaaaaatttgaagggatctggcaataagtatatagtactgtacatgtatgagctaccacgaagctaggaattcggatcttcttgattttttttttgcttgacaaggctgatgaatgggcactggttggaatggtgctgctctagcctacggaaaaccccttatttatcttgtcttgggaacaatgcctataaatcataacttggatggctatgctaattttctactgtgccgaatgcagatgttattttggcacacgatta

SEQ ID NO: 97658 - DNA, 1597 bp, Zea Mays
cttctgtgccccatatgtacccattttaaccttgaccaaccagacgcaccggcctcgccggcgatgccctcctccacctccgccggcggcggcgccattcccgccggcccaccgtcgacgctctctccgaacgcggctccctacaccttcctcgcgcgtcagtcccgcgccccacccggacgcctccaagatggtgatgctccaaggttgattgataataactttgtgttgtatggagaggacaacagttcttattcggtgccactggcagcacaatcaggaatgaagcagagtgacactgtttactcaagcagctcgcatggaacacaccaaggttcctgttcttcatctggaacgaacgtatcgggaattctgaaagagatcaatagtttgtcggaggtgttatgcaataattattctgatgaaattaagctagaggagcatgaccacagcctcctccaatcagtaattgggaatcttcagagttatcttcacaaagcaagcaaggttcctgctatggttgattctgacaagtcagggggactaaaggcttgctatgctcagaatgcagtttcaaaacctgtcgcaggagactacaacggtagtttcactgccgataatggaaaaggcataagtatctctaatcttggtgattctagtcctttggtcggtgacttaaggaaaaagagcgtgacagggtaccagcagcctgcactcagcaattttccaaaggagctctcatgggaggagcggtcacaggctcttatctataagaaactgtggtttgatgcagaacgcacaaactgtgctttgaagtatcaacttaaacaaacgcgtgtggaaatcgacctagagtcaagcacagctcatattggcgggggtccaagaaacagttctttccatctatgtgatgtgggtgtagatccaagtagttcctatggatctgccataacttgcccaccgatgatgctcaagggccatcctggagaaagaaagagtcataacctcctttctgctgctgaccacattcagtcaggagacagcagtgctctgtcaagaccaaaaggttacatagccgtgccagagaatattgaggatggatatttcttgtcagggccggaagaaaccggtgtccgccgccatgcacgtcctggtctacaaagtaggcccctcggaaggttgaacacaagtacgtcagatggaatgtcatcctcgtatgtcactggaagggatgacattctgcgtggcagctgcgagtttggatcttcagattgggagcatgtgttgaaggaagaaatcggctcaacctaaaaaaaaatttgaagggatctggcaataagtatatagtactgtacatgtatgagctaccacgaagctaggaattcggatcttcttgattttttttttgcttgacaaggctgatgaatgggcactggttggaatggtgctgctctagcctacggaaaaccccttatttatcttgtcttgggaacaatgcctataaatcataacttggatggctatgctaattttctactgtgccgaatgcagatgttattttggcacacgattaagaagttcaggagtgccatatttc

SEQ ID NO: 97659 - DNA, 138 bp, Zea Mays
gtgtgtggggagcctgttggcacgtttgttgtttgcctccttttgctggaggttggggcactgtgcacagcaggagtttggtgggtctgtttgttctgccttttgggctttgtactttggtccattttggaccttttt

SEQ ID NO: 97660 - DNA, 1110 bp, Zea Mays
acgcggtcgttctcacgttggcggctggccaccattccctgtctcgtgctcacggcgggcggcagaccgccaggcgccaccgcggcagaccagctgaccagcaggcggcagtgcaggccatcagccgtcagctctccctcaggtcggcagtgcaggccatcagccgccaaccgatctagtagtgcagaccgccagaggccaggtgaccaggtcggcagtgcagccgtgcaggcggccagccctctccaggtttgcttgttaatccattctggacgccactagatcctactcccgcgggcagaatattgaagaatatgcatctccgttcatggacttgttaatccatttcaggtttttttatttctatttgtaatgtcaactccgggagacagtgccagtggtgctggacctgctagtggtggtggtcgacgcgattctagagctccaactccatcatctacgccacgagatcctactcctacaccatctgatgtaatagcgcctactcctactgatggtcaaggtactggtaccaccaacactgatgttgttgaaatagatgaggatgttagggttggtagtaaaaggaagcttaaatctgatgtatggcaagactttgaaagagtctgtgtaggtggtacttggaaagctaaatgcaattggtgtcacaaaacactatcagctgtatgtagaaatggtacaagtcatttgcgtagccacgtaaatagctgtgaatctcggcaaactagaaaaggtctaaaacagtccactttgaaattatctaaaacacaagatggaaatgttctattggagaagtatgtgtttgatcaaggtgttgctaggaaagaactcgcattgatgatatgtgttcatgagtacccactttctattgttgagcatgttggttttagaaggttttgtgctgcattgcaacctttatttaaggttatgtcaagaaatacaattagaaaggatattttggacatgtaccaagtgcaaaaggtatccatggtgcatcagttccagcaactaggatctcgtattgctgtcaccacggatatgtggacagcaaaccatcagaaaaaagggtacatggttgtgactgttcac

SEQ ID NO: 97661 - DNA, 417 bp, Zea Mays
atggcgaggctgctgctacgcaggagccgcatagggatgccgaccgagcacgagcgctgtgctagccgagccggatgtgccggggtcgcacacgtagaccgcgccatgggctcgcgtcaggattgggctagcggggtgatgcgcagaccgcgcagaccgcgggcaggactgcgctggccacgcgacacgaacaatggcggggcgagggatggcgatgaagcttctcctcgcggcatcggcgcacgaaaggcgagggcgaggcttgacacagcgtcggcgagcgcggacataaaggtaggcacgaatctcacctcggacggaagctcgacgaagatggtcgcggcggggctagcagcagcgctggtccgatcggctgcgcggcattccaatcgccgaaacgcgcctgcagaggcctga

SEQ ID NO: 97662 - DNA, 108 bp, Zea Mays
ttttttatttttcatatctcaattctacaacccagtgggtgccattaccatctttcaggaaactgcagtgtgcccagcaaatgtgtcagttaccctttctctagtgtc

SEQ ID NO: 97663 - DNA, 475 bp, Zea Mays
cgaccatccaacagtttatgaactatactcatcaagtcttggtggtgttcctaatgcaaatggggattcaatgacaacacgagtagctgttgatcaccatatgcatcaagatttttcaaccaacaagtaaaagttcagacatgtctttcagtcacattattgctctggtatacattctgctttattaatgatctttcaaaacaattcagattaaagcatttaactttggcacaactacataatcagccaaaatatgaagcttagtttctcacgataaagaccttggtaggatgtcaaggagcaccctgtcgtcatctatatgaagggttatcctgatgctcctaggtgtgggttcattgcattaggagtgaaggtcgtccagcaatatggtaatttgtctataagtgcggcttatttcaaatgcaagttacggtggtatcgtcttcaagcacacctcttcaagcagcaattgccg

SEQ ID NO: 97664 - DNA, 105 bp, Zea Mays
gttatttgtttaatcaaattaataaattaaaaataagaatttcatcatgctggattcattgcctgctgcatttatatttgaattcatgaatcataaccagatttg

SEQ ID NO: 97665 - DNA, 232 bp, Zea Mays
aaatacattgaccctcgtcatctacaccctctctctctcccaaatcctctcactgcgaatctgcgatggccgttgcgcagcgtctcaccgcgctggagctccaccattgctgctgcccaacacctcgtcatacgtcgcgcctagacttgagctcgctgcgcgctgggagccccgccgagttcgctgttgagcaccgccgcggaagactcttcctgccgtgcgtcgtcgcaag

SEQ ID NO: 97666 - DNA, 291 bp, Zea Mays
acgtcgcagctcgctcgctaaaccgtccgcccaagctgctcctgttcaaaatacattgaccctcgtcatctacaccctctctctctcccaaatcctctcactgcgaatctgcgatggccattgcgcagcgtctcaccgcgctggagctccaccattgctgctgcccaacacctcgtcatacgtcgcgcctagacttgagctcgctgcgcgctgggagccccgccgagttcgctgttgagcaccgccgcggaagactcttcctgccgtgcgtcgtcgcaaggtaagacttcg

SEQ ID NO: 97667 - DNA, 1794 bp, Zea Mays
gtgaatacagcccctagagggcaatgtgccttgcgccattccttacatggtaacagagcccaggatttttcctccaccacgatgcctacctcatcttcttcctcctcctccaccaccgccaccattgcaatccatcatgccgtgacaattcgcctcactaagtccaactttttactgtggcgtgcccaattgcttccttgccttcgtggtctgaaccttatgggtttcatcgatggatccgttgctgtacctgccaaagaagttccgtcttccaatgatgtcggtgcccctcttgttcccaatccggcatacacaacatggtacaatgaagatcaacaggtccttagcggcctcttatccacgatgaaagaagaagtcctctctgatgtggtcgccgccactacatctaaagaagcctgggatattatcaagaagatgttttcttcttctactcgtgcacgaatagtgcaaatacgagttgaattggctaccaccaagaaatgagacctctctgccgctgcctatttcagcaagatcaagagccttgcctctgaacttacggctgctgatgcccctcttcgtgatgacgaagttgtggcctatctcttggccggacttggctcggattatgatccgttcgtcacgtccataaccacaaagactgaagctctctccctggacgatgtttatgctcatctccttacatttgaagcccgtcaacttcagcatcaggaagaagctcgtctacatattggcagctctgccaatatggctgctcgtgggggctcattctctcgtggtggtcgaggtccctcgcgcggccgtggccgtggtcgtggtcctgtccatcgcaactctcctggtgccccacgtcgccccccttgccagatctatgggaaggaaggccacagtgccattcgctattggcatcgcatggatgcttcatacaatgattacccaccatcagcaaatatggcgacagcttcatcatatcaagtggacaagaactggtacaccgacactggcgctactgatcacattaccggtgatctggaccgtctcaccatgcgtgaacagtaccatggtaatgatatagtgaaagtcggcaacggggcaggtttgcatatctcacatttaggttcttgttcaattaacactgctagtcgccctctcactctaaataatgtccttcacgttcctgaaattgccaaaaatctcttatccgttcataagctatctcgtgataataatgtttattttgaatttcacccatggcatttctttattaaggaccgagcaacagggcgacttctcctgcaaggaccgtgtgattccgggttgtaccccatcaagtcatgtgatgtcacttctctcaaacaagcttttttgagttcatcagcaagaccagcacagtggcatgctcggctaggacaccctgctcctcaagttgttcactccattcttcatcttaataaactcccttgtctcaaggagactgatctcggtaccgtttgtaatgcttgccaactcgcaaagagtcaccagttaccttactccacttcaattcatgattccatagctcctcttcaacttattttctttgatgtttggggacctgccccagtatctgttggtggctacaagtattacataagttttattgatgattttagcaaattcacgtggatttatcttatgaatgatcgcactgacgcacaacgcatttttctgcagttccaaacccacgttgagcgtcttcttgatactaaaatcaaatgtgtccaatcagactgg

SEQ ID NO: 97668 - DNA, 456 bp, Zea Mays
tataatattagttaataagagtttctttccttcaagtagagagcttggcaatttcaaggcattcaccaggttcgattgcaggttttgcaacaatggttgtccctagacattggggctgcacaaaggtagcagaagtagtgcccgcacctgtagatgataaatacacagccacaaatcctctccacatatatcttacacttggggcacctctgccacttgctctcttgttcgaccttcctcggcagtaggtcctctctgccctgctcatccttcctcaggtcgttggaactctgcgtaagtgacaccagcgtgccatggaaccttacactgggcacagaacatctgacaacagtgtgggcactccaaatttgttatcaccacctcaccatgctcaggatcatcaaccaacagagcaaagcattcccttaaggggcagtagaatctgagtgaacctaa

SEQ ID NO: 97669 - DNA, 111 bp, Zea Mays
ctcaaatatacttgagtttgaatggatgcaccaccacaacaattcaacataccataaaaatatatcggcatgttatgcaaaaatcaaggacccttttagggttctatttta

SEQ ID NO: 97670 - DNA, 1181 bp, Zea Mays
atgcgcaagcagctgggcgcagcaggcttgctggcggagctgcgcatggggttccggcagttggcagacccgatcgcgcctccgcctgttcggctgtcccctgtgccctgcggcctgcggccctgcccaacacccaacgcactgccgctacccagctacggcagcgggcagccacctgcctgtccgccgtgtccggctgtcccctgcccaggcgcccagcccaacggccaacgcagagaacgcacgaagtatgaatcaggttttcaaaagcgtaagaaacaaaaaagaatagagggtttaattcagtctcaaaaaggagctatggatagattcgttattaaagaatcacaagtatcccctgtgaatcagccagctgatggaggccctgcaattgatagtactgctgctaacaacgaggttgatgatgttcctattgataacacaaacgtagggatgggcaataatagtgataatttgaatacttcagcgtctatgaatgatgtgacagttgcatcagcagaacgaagcttttctaaattgaagctattgaagtcatatttgcgctctacaatgttacaacaaagacttactgatttggcccagatatcacttgagagtgaattattggagaagattgaatatgagcgtattattgaagaattcatttcaacggcggaggatgagctcatttttgtcgaccgggagcttgatgttggcgctggggctggccggagccctatcaagcgcagggtggagttcaagctaccagagagctgcgactgagcaacacatgaaaagctgggaccagattcaagagggatagaggcaagcagccaacacgcagaagctcacctgctcaggacaacaccagggatctacggtttcttgcactgtactgcatcacattccatcgcaagaacaaaaccatcccgctccttgcaaacatccaaagatacaagttttcacggatgtagtctagtttagatatgttagatattatgtctacaatatttcataaactttatcaggagttatgtgcgtatattatggtaatgacgatagaacaatcatgtgtcgatgttgatgtttcttatgttatgttaacgacaacctgggaaccgtaatggataaactgtaatgttttctatgtttttaacgtcatgtgtgttattttttatttg

SEQ ID NO: 97671 - DNA, 1591 bp, Zea Mays
ccatcaacctgtgtcgtgtgcagcagtgcagtgcaggcagctaggccagccacaccgcccacaggacaggagccatgccaggtctctcccacaccacacggcaggacaggagtgggcgacgacggacggacggacggagcaacagcaacaggaacccaactccttcctttgggcgtcacgggagttcgacttccggcggagaaaaggctccccgccttttccactttccccaacgctccccttatctcctccttcctggcgtccgcgcaaccaaccacgcgcgcgcgcgctccgctagccagccagctcgttctctctatctctatctatctatctgtctgtctgtctcagctagagctcgaggcagcatcatcagagcttgcttgctcgcatgctagcttgccgtcgtcctgcgttggtccttgctgggtcgtcttgtgttcatttctcatcgtcggagagaagagggagtatagctagctagctagctaggaggggaggtgcgtggtggtccgtatatatacatgcgcatggagggggccggaggaggcgcaggcggaggcggcgccggcgctggagggtgcctgggtatgggccacggcggggaggcgcagatcaagggcacgcacacgcacggcggccgctacgtgcagtacaacgtgtacggaaacctcctggaggtctccgccaagtacgtcccgcccatccgccccgtcggccgcggcgcctgcggcatcatctgtgctgctgtgaacgcgcagactcgcgaggaggtcgccatcaagaagatcggcaacgcgtttgacaaccagatcgacgccaagcgcactctccgagaaatcaagctgcttaggcacatgaatcatgaaaatgtgagtagccatgtatatgtatatatttctctaccttgtgatgaacatatatatttatatatatactccacgctacaggacttttttttgtcattgtatgtatttattagctatatatacatgtatgtatagttcattagctatatacataatacatccgtgcatatatgtaacagagcaacaaattctttttccctgcaggtcatttcaataaaggacatcatacgcccgcccaggagggagaacttcaacgacgtctacatcgtctacgagctgatggacactgaccttcaccacctcctacggtcaaaccagcaactaaccgacgaccactgccaggtcgtcgatccaaatccaacgctgttgctgtgccgtcctctgttctctgttcctaaccctttttttttctttcttcttttacgacgaccggccggtgcagtacttcgtgtaccagctgctccgcgggctcaagtacgtgcactcggcgaacgtcctgcacagggacctgaggccgagcaacatgctgctgaacgccaagtgcgacctgaagatcggggacttcgggctggcgaggaccacgacggagaccgacttcatgatggagtacgtcgtcacgcggtggtacagggcgcctgagctcctgctcaactgctccgagtacacccaggccatcgacatgtggtccgtgggctgcatcttcggcgagatggtcaccagag

SEQ ID NO: 97672 - DNA, 2021 bp, Zea Mays
ccatcaacctgtgtcgtgtgcagcagtgcagtgcaggcagctaggccagccacaccgcccacaggacaggagccatgccaggtctctcccacaccacacggcaggacaggagtgggcgacgacggacggacggacggagcaacagcaacaggaacccaactccttcctttgggcgtcacgggagttcgacttccggcggagaaaaggctccccgccttttccactttccccaacgctccccttatctcctccttcctggcgtccgcgcaaccaaccacgcgcgcgcgcgctccgctagccagccagctcgttctctctatctctatctatctatctgtctgtctgtctcagctagagctcgaggcagcatcatcagagcttgcttgctcgcatgctagcttgccgtcgtcctgcgttggtccttgctgggtcgtcttgtgttcatttctcatcgtcggagagaagagggagtatagctagctagctagctaggaggggaggtgcgtggtggtccgtatatatacatgcgcatggagggggccggaggaggcgcaggcggaggcggcgccggcgctggagggtgcctgggtatgggccacggcggggaggcgcagatcaagggcacgcacacgcacggcggccgctacgtgcagtacaacgtgtacggaaacctcctggaggtctccgccaagtacgtcccgcccatccgccccgtcggccgcggcgcctgcggcatcatctgtgctgctgtgaacgcgcagactcgcgaggaggtcgccatcaagaagatcggcaacgcgtttgacaaccagatcgacgccaagcgcactctccgagaaatcaagctgcttaggcacatgaatcatgaaaatgtcatttcaataaaggacatcatacgcccgcccaggagggagaacttcaacgacgtctacatcgtctacgagctgatggacactgaccttcaccacctcctacggtcaaaccagcaactaaccgacgaccactgccagtacttcgtgtaccagctgctccgcgggctcaagtacgtgcactcggcgaacgtcctgcacagggacctgaggccgagcaacatgctgctgaacgccaagtgcgacctgaagatcggggacttcgggctggcgaggaccacgacggagaccgacttcatgatggagtacgtcgtcacgcggtggtacagggcgcctgagctcctgctcaactgctccgagtacacccaggccatcgacatgtggtccgtgggctgcatcttcggcgagatggtcaccagagagcccctgtttcctggcaaggattatgtccaccagctgaggctgataaccgagctggtaggctcacctgacgacaccagcctcgggttcctccggagcgaccacgcccgcagatacgtgaggtccctgcctcagcatcccaagcaacagttccgcgtgcggttccccaccatgtctagcggcgccatggacttgcttgagaggatgctcgtgttcgatcccagcaagaggattactgttgatgaggctctgtgccacccatacctggcgtcccttcacgaggtaaacgacgagcccatctgtccggcgcctttcagcttcgacttcgagcagccatcgctcaccgaagaagctataaaggagctcatctggaaggagtctctcaagttcaaccctgacccgatccactaaatataatagctccctcccagctgtgtacacacgagcaaactaggacggcatgtctatcagctagctccatggggggcgaaaggcatatatagcaggatgactgtacaagtgaccacccctcatcatcatcaccttcatctcattcgcatggcttgtcaatggtgcgacaccctaacgtccaagtctggtcaataatttgtagtggagaaaactggcagcgccttgttaggttgtgtctatcttccttcgtttgtatgcttaagaagcttgtcactgcctgtgaaccatggtactactgcagttgtccacacactacagaca

SEQ ID NO: 97673 - DNA, 312 bp, Zea Mays
atggagttcttcacagagtacggagaggcaagccagtaccagatccaagaagtcatttgtaaagggagctacagagtagttgctacagctgtggacacccgcaccggtgagccatcaagacacccgatttctaaactcgagtttgaatttgaaagaaggaagctggccaaagatgatgttagagaactgatctatcgagagattttggagtatcatccagagatgttggaggagtacatgaaaggcggagaacagattaacttcttctatttgaaaaaatcatcccttctggcatgggtactattgttttaa

SEQ ID NO: 97674 - DNA, 420 bp, Zea Mays
atgggcgggaagacacagttgagcgttcacatgaccagcgttctgagcaccacccgcgtgctgtggtactgtgaccgggtgcgggtgcaggtcgcgcagcatgcgcgaactcctcgcgcggacgcgctccgtgaggcggagctggcgcgcgctgagcagctccgtgacccacaacttgcggagctgacgccagtagggcccgtagtgcgaccacagcatgccggagtagttgtacacggtgtacttgccgcaggccatgcggggccggtcgaggtacgccaggtcctgggtcctgaggacgacctcggccacctcgacggaggagcccacgacgacggggaaggagccgaagcggagcgacatgagcgggccgtaccgcgccgagagctcgtggatggagcggtgcggcagcgcgcctag

SEQ ID NO: 97675 - DNA, 114 bp, Zea Mays
ggcgatgcagggtacataactcctccaacagggatttggcaggctatggagatgcaggctgaagtagaaaggagaaaatgcgctcaagtccttgaatcagaagggaagaaacaa

SEQ ID NO: 97676 - DNA, 1279 bp, Zea Mays
gatgctaggtactggttacaaaatagtactaaaacctgcacttctggctcatgctgaggagaacaaaaggatctgtctctcaaatcttgaaaacttaaatgatctacagaagcagctgcaaggaaatgcgaagctgtgttatgcagaagtaggaacttttttaggttctggaaggtcaaggatggacttccacgaactgatcgagatcccacacggcgaccgacggcggtaccacgacgacgtatctgtcattgtaatatccttggagggcaggatctggagatggagaaaatccttgcggtgtacagaaaggcttcgaagcaatggtgttccacccaggacaagctggctcaagccgcgatccgccagacgcccagaccgccaccgtgaatcgcgatcagccagacaaccacggccagagtcccatccattgccatcggccagcaggcggccacacccagaccagatgctgcccaagaaatcattgtcaggatatcagaaaagaaagaagagaaaacatgaagatcaattggttgtatcgcaaaagggtgctttacataaattctttggtgtttcaagtaatgttgatgtcaatgaagttgaagggcatgaatctgatcatgctcatgatgatgggcaacaggaccatgatcaacaatatgatcataatttaaatgctgaagatgtggtcattgaagatggttcaatggaagaaaatttaattgcagcaattgatgctgttgaggatagtatgatgcaggaaaatttgcagccctcatgtgatcatgaaaattcaaatgatgatgaacaagatggttctggtttatctatctttgatcctagaacatgggataatcttgacaacaacaaaagggatgtcttaactgaaagggggctggtaagagaattgaatctagtttttcttgacaacaacatgggaaaattttattcagaattaaaggtgttgcaagtgagtttattggattcttcaatgtcagcacctgagattctgaagtttgttatggatgcagattgttatccaaatgttacagttgtctatcgaattctcttaactgtagctgtgactgtagcctcagctgaaagaagtttctcaaaattgaagttgttgaagaactatcttagatcaactatgtcgcaagaaagattgaatggcttggctatgtgctctatcgagaaggatatcttggacactattgatttcaacaccgtccttgatgaatttgcatcaagaaatgcccgaagaagtatcttttcatga

SEQ ID NO: 97677 - DNA, 411 bp, Zea Mays
atgctctcggcggcggcctacctcctcatcttcctcctacacctgtccgcctcgacgacctgcgatgccgccagccagaaccacgacgtgcattaccatccggcgatgatgatggcgcggcggggagggccgacgccgcagccgtcgcccagcagcgtggaggtggctggcgtcgtcggaggcgccccgcagccgcccgtgtcgttcgccgtggaggcggggaagcgggacaccggcgcggcgaggatgatggagccgtctccgatgccggcgccacgcggcgagggagcgtcgtcagagtcagaggcctctgcgacggagagcgcgagtgacgacgtgagcgtggactacgcggggcccaggacgcacccgcacgatccacctgctggccccgcaaagtcaattgattga

SEQ ID NO: 97678 - DNA, 480 bp, Zea Mays
atgttgttggcctacgtcctcgtcttcctcctccgcctgtccgcctcgacctgccatgccaccagccggaaccaacacctcctcttcgctggtcgcgccggcgactccaccgcccccgtgcaccaccgtcacaccaccaaggttctgtccgactacaacgacgtgcattaccaccctgcgatgatgccgtcgcccgccagcgtggagttggctggcggcatcgggggctcgccgccgccctcgttgtccgccgtggagccgagcggcgtcgaaggcgccccgccgccgccgccggggaagcgcgataccagcgcgccggcgatggagccgtcaccgtcgccacacagcgagggcggcgcctcgtcgtcgggcgacgatgatgcctctgcgacggagcaggaggacagcgccggctacgacctggacgacgcgaacgtggactacgtggggcccaagacgcaccctccctcgcataactag

SEQ ID NO: 97679 - DNA, 875 bp, Zea Mays
tctttccccagaggcaccctcaatcccctttcccctcctccctccagactctcggaggcgggcgcgcggatctgtcggccggggccgatccagtcgattccaccggacaaggccgccaaaaacacactcgctcgacgcagcgagcggggccggcccttcgtgccgcggggcgcccggtggcgagggccgcagcgcgcagcgatctgaaaccctaggtggtggtgggcgccgccgccgtgtgtagacgcgatggatgcgaggttcccgtactcgccggccgaggtggccaaggtcgagttcgtgcagttcggcatcctcagccccgacgagatcgtaatacccctcgcctccctcccctcccctcgctgctactgtcattcgagcgggtcgagggttgagttgagtgagtggtcagccttagtgtagctggactagctgtttgctagtctaccagtaccaccccatttccagtgccaggagcccaggatcctagttcaggacatgttttggtgcaattcgtgcctgatttgagcttcattgccctatttcctgatttggtctagttgaaatcgagcaattctgaatctgtagtataagcgcacaaccgtacagaccttcatccctacaatctgagcttcatcatcaggggaaaaaaaccgaaatgtataggttttgcttcttgatgcctggaactatgcatataaactgctggaacagtattgtgcagagatgaaatgtatggttgagtttggaaccttagcagttctgctttgttcttgggtttcaagtaatatgatgaattaattcatgtactgttgtgaattgtgatcgacacagctcatgatagaccttgaattttgttgttgtttgcctta

SEQ ID NO: 97680 - DNA, 6143 bp, Zea Mays
tctttccccagaggcaccctcaatcccctttcccctcctccctccagactctcggaggcgggcgcgcggatctgtcggccggggccgatccagtcgattccaccggacaaggccgccaaaaacacactcgctcgacgcagcgagcggggccggcccttcgtgccgcggggcgcccggtggcgagggccgcagcgcgcagcgatctgaaaccctaggtggtggtgggcgccgccgccgtgtgtagacgcgatggatgcgaggttcccgtactcgccggccgaggtggccaaggtcgagttcgtgcagttcggcatcctcagccccgacgagatcagacaaatgtcggtgattcaaatagaacacgcagagaccatggagaggggcaaaccgaagcctggtgggctcagtgaccctcgattggggactatcgaccggaaaattaagtgcgagacatgcatggcagggatggcagagtgtccaggccactttgggcaccttgagcttgccaagccgatgttccacatcggattcattaagactgtgctctccatcatgcgttgtgtttgctttaactgctccaagatcctcgcggatgaggatgaaaccaaatttaagcaggctttaaaaatccggaatccaaagaatagattgaagaggatatatgatgcttgcaagagcaaaaaagtctgtgcaggtggcgatgaccttgatgttcaggaacaggatactgatgagcctattaagaaaagaggtggctgtggtgctcagcagccaaatattacagtcgatggcatgaagatggttgctgagtttaaagctccaaagaagaaaactgatgatcaggatcaactccctgagccagtggaacgcaagcaaatcctctcagctgagagggtccttaatgttcttaagcgtataagtgatgaggactgtcttctgttgggcctgaatcccaaatatgcccgtcctgattggatgatacttcaagttcttcctgttcctccaccccctgttagaccatctgtcatgatggacacctcttccagaagtgaggatgatctgactcatcagttagctatgataatacgacataatgagaatttgaggaggcaagagagaaatggtgctccagctcacattataacagagtttgctcagctgttgcaatttcatattgcaacatacttcgataatgatcttcctggccaacccagggccacacaacgttctggaaggcctattaaatcaatttgcagcaggctgaaagctaaagaaggcaggattagaggaaacttgatgggcaagcgtgttgatttctcggcccgtacagttatcacaccagatccgaacataaacattgatgaattgggagtaccatggagtattgctttgaacctgacatatcctgaaactgtcactccatataatattgagaggttgaaggaacttgttgaatatgggcctcaccctcctccaggaaagaccggtgcaaaatatattatcagggaagatggtcagaggcttgatcttcggtatgtgaagaaaagcagtgatcagcatctggagcttggttacaaggtggagaggcatctcaatgatggggattttgttcttttcaatcggcaaccaagtcttcataaaatgtctatcatggggcatcgcatcaaaattatgccctactcaactttccggttgaacttgtctgtcacttcaccatacaatgctgacttcgacggtgatgagatgaatatgcatgtcccccagtcatttgagaccagagcagaagttctggagttaatgatggtgccaaaatgcattgtctctccacaatcaaataggcctgtaatgggtattgtccaagacacactgcttgggtgtcgcaaaattactaaaagggacactctaattgaaaaggatgtatttatgaacatcttgatgtggtggcaagatttcgatggaaagattcctgcacctaccattttgaaacctaggcctatttggactgggaaacaagtttttaacttaattatccccaagcaaataaatttaattcggttttcagcatggcattcggaagaagaaaaaggatttattactcccggtgatactatggtcaggatagagaagggagagcttctgtctggcacactttgcaaaaagagtcttggaacaggctccggaagtcttatccatgtcatttgggaagaggttggtccagatgctgcccggaagttcttaggacacacacagtggcttgtaaactactggcttcttcaaaatggtttcagtattggaattggggatactattgcagatgcatccaccatggaaacaattaatgatacaatatctaaagctaagaatgctgtgaaggagcttattaaaaaagctcatgagaagcagttggaagctgagccaggacgcactatgatggaatcatttgaaaacagagtgaaccaggttcttaacaaagcccgtgatgatgctggtagcagtgctcagaatagcttgtctgaaagcaacaatttgaaggctatggtcactgcaggttcaaaaggcagtttcattaacatttcacaaatgactgcttgtgtgggacagcagaatgttgagggcaagcggatcccttttggtttcattgatcggacgttgccacatttcacaaaagatgactatggtcctgaaagtcgtggatttgtggaaaattcttacctccgaggtctgacaccgcaagaatttttctttcacgctatgggtggtagggaaggtcttatagacactgctgtgaaaacctctgagactgggtatatccagaggagacttgtgaaagctatggaggacatcatggttaaatatgatggtactgtaagaaattctcttggagatgtcatccagttcttgtatggagaagatggcatggatgctgtttggattgaatctcaaaaattggactcattgaagatgaagaagcctgagttcgataatgtattccgttatgagctggatgatgagaattggagacctaactacatgctacctgaacatgttgacgatttgaagaccatacgtgaattcagaaatgtgttcgaggcagaggttcaaaagctagaagctgatcggtaccagcttgggtctgagatcaccacaactggtgacaattcgtggcctatgcctgtgaacctcaagcgactcatctggaatgctcagaagacattcaagattgattttagaagaccttctgacatgcacccgatggaaattgtggaagcgatagataaactgcaagaaagacttaaggttgtacctggtgatgatgctatgagcattgaggcccagaagaatgcaaccttgttctttaatatcctacttcgtagcacgtttgctagcaagagggtcttgaaggaatacaggcttacaaaggaagcttttgaatgggttattggtgagattgaatcgaggtttcttcagtctttggtggcccctggcgagatgattggatgtgtggctgcacaatctattggagaaccagcaactcagatgaccctgaataccttccattatgctggtgtcagtgccaagaatgtcacccttggagttcccaggttgagggagatcattaatgttgccaagaagataaagacaccatctttgtctgtttacctgaagcctcaggtgaaccagaagaaagaattggctaagaatgtccagtgtgctttggagtacactacactgcgtagtgttacccacgccacagagatatggtatgatcctgatcctctagggaccatcattgaagaggacacagagtttgttcagtcctattatgaaatgcctgatgaggacattgacccggataaaatttctccttggttgctgcgtattgagcttaaccgtgagatgatggttgataagaagttgagcatggctgatattgccgagaagattaaccgtgagtttgatgatgatttatcatgcattttcaatgatgataatgcggataagcttatcctccgtatccgcatcacaaatgatgaagctccaaaaggagaaatacaagatgagtctgctgaggatgatgtcttcctaaaaaagatagagggcaatatgttgacagagatggcgcttcgaggcattccagatatcaacaaagtgttcatcaaagaagggaaggtcaataccttctatcaagatgacggtttcaaagcagctaatgaatggatgcttgatacagaaggtgtgaatcttttagctgtcatgtgtcacgaggatgttgatgctacaaggacaacaagtaaccatctgattgaagtgattgaggtacttggaattgaggctgtccgtcgatctctcttggatgagcttcgggtggtgatatctttcgatgggtcatatgtgaactaccggcatctggccattctttgtgatacaatgacatacagaggtcacttgatggctattacaaggcatggtatcaaccgcaacgacactggacctcttatgagatgttcctttgaagagactgttgacatcttacttgatgctgctgtatatgctgaatctgaccacctgagaggtgttactgaaaacataatgcttggtcagcttgctcctattggtactggaggctgtgcactatatctgaatgaccagatgttgcagcaagcaattgaacttcaactcccaagctatgtcgaaggcctagactttggcatgactccagcacgatcacccatcactgggacaccttaccatgaaggaatgatgtcgccaagttatctgctgagtccaaacatcagggcttcgcctattaatacagatgcttcgttctcgccgtatgttgggcacatggcattctcaccattcccttcaccaggtggttactccccatcgtcagggggatacagcccatcttctccggttttcaccccagagaaaggatatagccctctctctccatcatatagccctgcatcaccaagctatagtcccacctcaccgtcttacactcctggctctcccacctacagtccaacaagcccgaattactccccaaccagcccgacgtactcgcctaccagcccatcgtactcacccacatctccgagctacagcccaacatcaccaagctacagccctacatcaccaagctacagccctacatctcctagctatagtcctacatcaccaagctacagccccacctcaccagtttatagcccaacctcaccagcatacagccccacatcacccgcttacagccccacatcgccatcctacagtccaacttcaccatcttatagccctacatcaccttcatacagccctacgtccccttcatacagccctacctccccctcatacagccctacctctccctcctacagcccgacatcacctgcttacagcccgacatcaccaggatacagcccaacgtcaccgagctacagccctacatctccgagctacagtcctacatctccgagctacaatccttcatcagccaagtacagcccttcacatgcatactctccaagcagccccaggatgagtccatacagccagacttctccaagctacagtccaacgtcaccgacttactctcctacatcaccatcatattcacaaccaagtccatcgtacagcccaacgagcccgttcaacacctctggaggacccagcccagactacagcccgacctctccaaattacagccctagcggaagctactcccccactgcaccgggctactccccgtcgtccacaggccagggtaatgacaaggatgataagagcgctcgttgaagaggcacaggagaacaaggcgctctagagcactcgatgaaggcactcggtgatggccacatgggaagatcgaggcacttttttttcccttgagtttttgtatggttgatgaactctgagagcaaacttgtatttttccgagctgctaatagcagaaatagttgtttatgtatgatactagaactaaggactggactgtgctgcgacttgataagtggttaaccgcgtggtcgcccctcagagagtaacacatgtagtaatgtttaatgataatatcgtgactgtacttggtactactatgctatggtgtactagtgtattgcatgcgcgcgtggagcaga

SEQ ID NO: 97681 - DNA, 1076 bp, Zea Mays
ccggttttcaccccagagaaaggatatagccctctctctccatcatatagccctgcatcaccaagctatagtcccacctcaccgtcttacactcctggctctcccacctacagtccaacaagcccgaattactccccaaccagcccgacgtactcgcctaccagcccatcgtactcacccacatctccgagctacagcccaacatcaccaagctacagccctacatcaccaagctacagccctacatctcctagctatagtcctacatcaccaagctacagccccacctcaccagtttatagcccaacctcaccagcatacagccccacatcacccgcttacagccccacatcgccatcctacagtccaacttcaccatcttatagccctacatcaccttcatacagccctacgtccccttcatacagccctacctccccctcatacagccctacctctccctcctacagcccgacatcacctgcttacagcccgacatcaccaggatacagcccaacgtcaccgagctacagccctacatctccgagctacagtccaacgtcaccgacttactctcctacatcaccatcatattcacaaccaagtccatcgtacagcccaacgagcccgttcaacacctctggaggacccagcccagactacagcccgacctctccaaattacagccctagcggaagctactcccccactgcaccgggctactccccgtcgtccacaggccagggtaatgacaaggatgataagagcgctcgttgaagaggcacaggagaacaaggcgctctagagcactcgatgaaggcactcggtgatggccacatgggaagatcgaggcacttttttttcccttgagtttttgtatggttgatgaactctgagagcaaacttgtatttttccgagctgctaatagcagaaatagttgtttatgtatgatactagaactaaggactggactgtgctgcgacttgataagtggttaaccgcgtggtcgcccctcagagagtaacacatgtagtaatgtttaatgataatatcgtgactgtacttggtactacta

SEQ ID NO: 97682 - DNA, 710 bp, Zea Mays
caggatcaaaagaaccatttagagccaacatacttggccgctagaatcgtctctctgcttattttggcacgacgaaaaggtcgacgacacaggacctatcatttcctcaagggtcgtctgccagctttgttgtagttcgctgacaggcaggatcacaccctggacccaggcgcgctggaagtggatgtcggagagcatctgcgtggcggagcaaccctcaaagcatggcgcctcgctgcagccggcgagatgggagccaaagatcttcagcgcagacaccttctactatggccctccctcgtccgctaccatgtgccccattccatggacgatgagtgtctccaatctccggcgtgccaccactcccattgtctgttgtgctccgactgcggctgtgacgacaccttctgctttggccatctcacctcaacgtccttgcgtcccactccaccgtgtacctatcccgctcctcaattcatccaatcccgcctcgagccggccatgcaccggcgcgccgccaccgccgtgcccagggagttggaggagggtggattaaatgttcaagcatctgctcgcctccacgagctgggcgaggcagggagctcgagggcgcagggttggtacgggcggggcggggagctaggggcggagggttggtgcgagcagggcagggagttgttggcggagggttggtgcgggcggcagaagaa

SEQ ID NO: 97683 - DNA, 2492 bp, Zea Mays
acggcagtccgcaccgcacacacacgcacaggcagcagcacagcgatctgccttctgctgtgccccgcccccatccagcccagagcagcagcgcgcggtgccggccggcaaccgcagctggtcggtcatcaggtctctgggcctccacctcctccttccccctctcaaccctccccgtgtcgcctcctcccgaatcctcacacgtagccccgcgcgccacctcgctgccggccgccggcacacagatatagagagagagagagagagagagagagactgagagagagagagggaggggaagcgaagagaccagaacaagagcgaagatggtcggactcctccccgagaccaatgccgcggcggagacggacgtcctcctcgacgcctgggacttcaagggccggccggccccgcgcgccaccaccggccgctggggcgccgccgccatgatcctagtggcggagctgaacgagcggctgacgacgctgggcatcgccgtgaacctggtgacgtacctgacgggcaccatgcacctgggcaacgccgagtccgccaacgtcgtcaccaacttcatgggcacctccttcatgctctgcctcctcggcggcttcgtcgccgactccttcctcggccgctacctcaccatcgccatcttcaccgccgtccaggcctcgggcgtgacgatcctgacgatctcgacggcggcgccggggctacggccggcgtcctgctccgcgaccggcggaggcgtcgtcggggagtgcgcgcgggcgtcgggggcgcagctgggggtgctgtacctggcgctgtacctgacggcgctgggcacgggtgggctaaagtcgagcgtgtcggggttcgggtcggaccagttcgacgagtcggacggcggggagaagcggcagatgatgcgcttcttcaactggttcttcttcttcatctcgctggggtcgctgctggccgtcaccgtgctggtgtacgtccaggacaacctgggcaggcgctggggctacggcgcctgcgcctgcgccatcgccgcgggcctcctcgtcttcctggccggcacacgcaggtaccgcttcaagaagctggccggcagccccctcacgcagatcgccgccgtcgtcgtcgccgcctggcgcaagcgccgcctccctctccccgccgaccccgccatgctctacgacgtcgacgtcggcaaggccgccgccgtcgaggatgggtcctccagcaagaagagcaagcgcaaggagcgcctcccccacaccgaccagttccgcttcctggaccacgcggcgatcaacgaggatccggcggcgggggcgagcagcagcagcaagtggcggctggcgacgctgacggacgtggaggaggtgaagacggtggcgcggatgctgccgatctgggcgaccacgatcatgttctggacggtgtacgcgcagatgaccaccttctcggtgtcgcaggccaccaccatggaccgccgcgtcgggggctcgttccagatccccgcgggctccctcaccgtcttcttcgtcggctccatcctgctcaccgtgcccgtctacgaccgcctggtggtgcccgtcgcgcgccgcgtcagcggcaacccgcacggcctcaccccgctgcagcggatcgccgtcggcctcgcgctctccgtcgtcgccatggcgggcgccgcgctcacggaggtccgccgcctccgcgtcgcgcgcgattcctccgagtccgcctccggaggcgtcgtgcccatgtccgtgttctggctcatcccgcagttcttcctcgtgggggcgggcgaggcgttcacgtacatcggccagctcgacttcttcctgcgcgagtgccccaaggggatgaagaccatgagcacggggctgttcctcagcaccctgtcgctgggattcttcgtcagctccgcgctcgtcgccgccgtgcacagggtcacgggcgaccgccacccctggatcgccaacgacctcaacaagggccgcctcgacaacttctactggctgctcgccgccgtctgcctcgccaacctactagtctacctcgtcgccgcccgctggtacaagtacaaggcgggccgccccggcgccgacggcagcgtcaacggcgtcgagatggccgacgagcccacgctccactgatccatccatgttcgatcgatcgacgaggcacgcgacggacgaccctaaattgaaccctatacaccgagcttaattatatatccgtccgatcgtcgtcggtcagattcattgctagctccgcgtgttgtaccatcgtgtcagtcagtgtatacgagtgtgtatcttttgtatccaagtacagcacgcgcgcgtgcgtaagcgtgtagttataaaaattaataacatgtttcttagaggagtgaggggggaattgtaaaaccgcttgtcaattgggctaagatcgttcgggacactgagcaaactcagaatgagttaagtttttcattttcatataaccaa

SEQ ID NO: 97684 - DNA, 324 bp, Zea Mays
atggaggacgcagcgatcgacgacagcgtccagagcgcctccgccgtgacggaggtgggcagcagcgtcactgcggcggtggaggaagagtcgcggcggcccggccggggcgccgtccgcggcgaggacgggcggccgacgatggcggacaaagaggcggtggacgactacaacggcccagtggaagcggagacgacgacggtcgtcggccgagacgtggacggcccatcctcaacgataaggctcgccgcggcgaggtccgggtacctgctgctagggtttctcgccggcgcggccgccgcagcgctcttcctgagcagttga

SEQ ID NO: 97685 - DNA, 575 bp, Zea Mays
gcggcaactcggggagcaccttgcggtgaattatgttcaggtgttgccttagatgtgaaatgtgatgatctaaatggggaggagaagatgcagcaacatgagatgccaaatactaaaaatgatgatggtgtcacgacattgttacctgctattgttgcatttccctcccatgcttggaggtcctaatcaagggactacgccactaccgagagctccgggagggagattgctggccaacggcggccaggtgatcgcctccatggcatggaagcttgaggggtcatgtccattagggagagcggaggagatccgatgagtccattctctagagtccagactccagaccaggatagaacaaggctgagacgtccggtttcatcaattcatcacgtcagttaccaggcgcacgccacatggttgattaccaaggtgggcctttcctatcctcttcacacctttcttgatgcagtgtccagctctcgaacggaaacaccattgaaaatgtgttcctcccttttaagaaagcgactctcctaagctcaacgttgttactgtaggctgtagcagactgtgag

SEQ ID NO: 97686 - DNA, 462 bp, Zea Mays
atttatctttgcttcaaacaaatatattattttctaaagtactgactttttgtgtcctgtaaaagtaaaatctatttgaatagtcaaatcttagttgtatctataacaagatgaaagtggtggcagccaagatgaaagtggtggtggccgcatcaaaggagaaggtgcaacaagacgaaccgaaagctgctatctcagatgtgaaatgtgacaacccaaaagaggagggcaatgtgcagcaaaccaaaagttgttgcctcagatgtgaaatgtgatgacctagagcaggaggaagattccaataaaaatggggaactggaggagtgtaacaaatgtgtaatttattttttccactctatatgctatcttagaagtttcaaaagttccttgtttgtgcgtaattcaaaatttactgttagtcattgttcctgaacaacccttgattttatttcttgaatgtgc

SEQ ID NO: 97687 - DNA, 1154 bp, Zea Mays
ttaattcaaaatccagaccccaacatatcatatatctctagccataaaataaagagatgacatacattcatatttggttttgtctcttctttacacttgcttttttatctctcctctgctctccgccccctcttttttttagcttttttttatagcccctcaaaacccccacacacaccacgagagagaggccaccaaaacccaccttggcaacaaagcagacgagcacgcaggacgtcgtacgagagggagtcggtagagcgcggcgcgcacgccacacagcaggagaagcgagaaccaaccatcgcatggcgatggcggcggcggcggtgctcgctgccgtcatggcggccgccgccgcgcaggcggcagaggtgcgctgggaggtggcgtacctcaccgtggagcccctcggacgaccgcagaaggtgattgcgataaacaaccagttcccgggtcctctgctgaacgtgacgacgaaccagaacgtgagggtgaacgtccagaacaaccttgacgagcccctcctcatcacctgggacggaatccagatgaggatgaactcgtggcaggacggcgtcacgggcaccaactgccccatccctcccggatggaactggacctacgagttccagctcaaggaccagatcggcagcttcttctacttcccgtcgctcggccttcagcgagctgccggcgggttcggccccatcaccgtcaacaaccgcgccaccgtgcccgtccccttcgaccagcctcatggcgacatcaccctgttcatcggggactggtacaccaagggccacgttgtaagagctttttttttttgtgtctgtcaatgcaaatctagctagatggttcatccttttgtttcagatcgagatagatagccagggaaaaatatcgcgcttttcccttgatctcagtgaactggatttcactgagaatggagttgttgcacatgtaggaactgaggaacatgctagatgatggtcaggatctaggcgcaccagatgctattctaatcaatggaagggcaccttacagatatgacagtgcactggttccggatggccttccctacgaaatcgttggggttgagccaggtcatatatgttttttttgtcaaacttttacttgcaaatttgcagctt

SEQ ID NO: 97688 - DNA, 1840 bp, Zea Mays
ctttggcaaccgaactggtttggtgtgcccacctctctctcttccatgggatatggcagggacggaatccagatgaggatgaactcgtggcaggacggcgtcacgggcaccaactgccccatccctcccggatggaactggacctacgagttccagctcaaggaccagatcggcagcttcttctacttcccgtcgctcggccttcagcgagctgccggcgggttcggccccatcaccgtcaacaaccgcgccaccgtgcccgtccccttcgaccagcctcatggcgacatcaccctgttcatcggggactggtacaccaagggccacgttgaactgaggaacatgctagatgatggtcaggatctaggcgcaccagatgctattctaatcaatggaagggcaccttacagatatgacagtgcactggttccggatggccttccctacgaaatcgttggggttgagccaggcgaaacatatcgcttccgcgtccacaacgttggcgtctcaacaagcctcaacttcaggatccagaaccacaacatgcgtctggtggagaccgaagggacctacaccaaccagcagaactacaccgacctggacatccacgtgggacagtcctactctttcttggtgaccatggatcagaacgcgagcaccgactactacattgtggcgagcccgaggttcgtaggcaatcctcgatggcacgaagtggctggtgtggccgtccttcagtactccaactccaagggtagggcttctggcagcctccctgatgctccagatgatcactacgacaagtaccactccatgaaccaggcaaggtccatcagaatgaacacgagcgccggcgctgcccgtccaaacccgcagggatcattccactacggatcgatcaacgtcacgcagaccttcgtcctcaagaacgagcagcccctgagcatcggcgggaagcgccggaggacgatcaacagggtgtcctactcgcctccggagacgccgctgaggctggccgacctccacaacctgaccggagtctacgcagccgacttccccgcgacgcccagcgacgacgacgcgccgccgagggtagcttcgtccgcgctcaacgcgtcctacaaggggttcctggagatcgtgttccagaacaacgacaccgacgtccagacctaccatctcgatggctactccttctttgttgtcgggatggattacggcgagtggacaccggacaggaggagtgagtacaacaagtgggatgccatctctcgctgcacgactcaggtcttccccgggggctggacggcggtcctagtctcgctcgacaacgttggtgtctggaatctgcgcgccgaaaggctggatgactggtacagagggcaggaggtctatgtgaaggttgccgatccactgggctacaacatcaccgagatggtcgtcccggacaatgccctctactgtggtctactgaaggagaggcaaaagccacaggttcatgagtcgaacagcaagtcgtcggcgcaaggcgatgctggatggagcaaccgactcctcgcaaccatgatcctggtcgtcgcagctgtgatcttcagttgatcctctctctttttttttctccaaagttttttggtagatttttgcctagaggaaatagaacattgaaacgtctagcctacaagttcagcatagggtagttcgtggagataggatctggccgagctgtttgatagtgtagggcagcttggaatgatgtctgtggagaaggcaagaaacgtgatactggaatgagatttatcagttatccggtgcgtgttttttttcgagcttgggaacacaa

SEQ ID NO: 97689 - DNA, 768 bp, Zea Mays
ctttggcaaccgaactggtttggtgtgcccacctctctctcttccatgggatatggcagggacggaatccagatgaggatgaactcgtggcaggacggcgtcacgggcaccaactgccccatccctcccggatggaactggacctacgagttccagctcaaggaccagatcggcagcttcttctacttcccgtcgctcggccttcagcgagctgccggcgggttcggccccatcaccgtcaacaaccgcgccaccgtgcccgtccccttcgaccagcctcatggcgacatcaccctgttcatcggggactggtacaccaagggccacgttgaactgaggaacatgctagatgatggtcaggatctaggcgcaccagatgctattctaatcaatggaagggcaccttacagatatggccacaggttcatgagtcgaacagcaagtcgtcggcgcaaggcgatgctggatggagcaaccgactcctcgcaaccatgatcctggtcgtcgcagctgtgatcttcagttgatcctctctctttttttttctccaaagttttttggtagatttttgcctagaggaaatagaacattgaaacgtctagcctacaagttcagcatagggtagttcgtggagataggatctggccgagctgtttgatagtgtagggcagcttggaatgatgtctgtggagaaggcaagaaacgtgatactggaatgagatttatcagttatccggtgcgtgttttttttcgagcttgggaacacaa

SEQ ID NO: 97690 - DNA, 112 bp, Zea Mays
gggaatatgtgttacttctctaaaaataagcaaaacaacataggttcatttttattgattttaacctttaattcgatcacacattcacaaatgatattctcctaaaatgcat

SEQ ID NO: 97691 - DNA, 1679 bp, Zea Mays
cccacacccacgtgagcagaggatatttccgccgccaggagagaaggtgatggccatcaccttggtgcttcacctgcgacgccacatggtgctgacccacgcccccaccattgcatagcctagtagtgtggttctggagaatcttcagtgtgcacggatcctgtgttcagtcagatgagccccatagccaagatcaccgtcgttgtggagcgtgggacgcgatgatgggttactgcggcatcgggcttattgggtggtcctggaaagtcaccataccactccgcacctcttcatggcctccccgtgcgaagctatcgaccaaagcgccaccagtttcacgccggagttggtgctccaccgtgatgcctccttgctccgcggactggctactccacaacacattcgcaggttcctggaatcacagtcccgaggtgagaggttgtgtcaaatttttccttgtagcccgcagaaccttggtgtttcagggagagtatatactactatgcagaggggctcgtcgtcgcagttggactacgtcctggtgccgctggggctggctgtgatggtgggctaccacgtgtggctgctcctccgcatccgcagccggccggagactaccgtgatcggcatcaacgccgtgaaccgccgcatctgggtgcgccacatcatggaggacccgtccggcaagcacgcagtgctggcggtgcagacgctgcgcaacaccatcatggcgtccaccgtgctggcctccgtggccatcacgctcagctcgctcgtcgccgcgctcatggccagcggcgccgccgcccacgggggcctcctcctctccgcccccggcggcggcagcgaggccgcgctggccgccaagttcctcgcggtgctcgtgtgcttcctggtggcgttcctcctcaacgtgcagtccatccggtactacagccacacggggctgctcgtcaacgtgccgctcgccgcgcaccgccgccccgcgcgcgccgtcggctacgtcaccgcagcgctcaaccggggcttctacttctggtcgctcggcgtccgcgcatactacttctcctgccccgtcttcctctggctcttcgggcccgtccccatgtgcgcctcctgcgtcgccatggtcgccgcgctctacttcctcgacgtcaacaaggagtgggaggacaaggacgacgacggcagcgaggatgaagcggacggcgatggaagaagcacggccaccgtgtgcggcggcgtctgaattcaagccgtgtcagtgtgtcacgcgagggcatatgaatcccgccaattagaaaaaaaaaatctcgcaaagaaggaagacttaacaagcaaccggatccaatgatcgttgaatccagcttacaaatcactctaccgtactgcactagtatacgtagaaattaataaatttgtctccttggtgttaatttggatccaggactttcttgagcctcgtgccactatagtatccgatgtcgctgatgtgaagtcaacttcagtgtcgtgtcgtgttgttttacgtttttgtttgtgtctcaataacaggtatcaaccatcagggtctgatggaagtatgagttcatatcaaaactcataaggtttcttttggtgtagctctagccctgctctgaccggtgaaatccatttcttggttgaataaagcacacttg

SEQ ID NO: 97692 - DNA, 776 bp, Zea Mays
gcgcggaagtgtggcccgactccccggccccattcctgaccgtcagattacgatcgggaggctcaagcgcaccaactggcggcgccgccccgccgccggagagctctccggcgtcggtgcctcaccgtctcccgttattccggcgccttccgttcctcgacagaagcggggctatggtcgccagtcgtcacgcgctcgccgcacgagcaggagcaggagcagggactgctggccggttagcctccagatgggtagctgttctgcgcaacaactggaggagcgcggagggagaagggactaaacacgaggggggaggtggaggaggcggtacgactggtgagcggccactgcttcctaccagagcgatgactttgcctgcggggatggacaatgagaatccttggagaattggcttatcctggcgggaaggatatgcaaagtgcaccctacggaatttgatctctccatgaatcttgtctagtactaatccactttttgcataacttatggatggctttctctttatcaccttgaagacctcttttcctgcagtttttgcctgattgaaggtctgaaggtctggtgcggcataggtaattgatctgaatcaatgtagtaggaaaatccattaaatatagaatacatgcaaattaaaaaataatggcaactttggctaaaggatgtgagttgcttcagtgttttgtttgaatggtaactatatttggaaaagaatttttttctagtgactgaaccaatcagtgagtttgtgtaattat

SEQ ID NO: 97693 - DNA, 1147 bp, Zea Mays
gcgcggaagtgtggcccgactccccggccccattcctgaccgtcagattacgatcgggaggctcaagcgcaccaactggcggcgccgccccgccgccggagagctctccggcgtcggtgcctcaccgtctcccgttattccggcgccttccgttcctcgacagaagcggggctatggtcgccagtcgtcacgcgctcgccgcacgagcaggagcaggagcagggactgctggccggttagcctccagatgggtagctgttctgcgcaacaactggaggagcgcggagggagaagggactaaacacgaggggggaggtggaggaggcggtacgactggtgagcggccactgcttcctaccagagcgatgactttgcctgcggggatggacaatgagaatccttggagaattggcttatcctggcgggaaggatatgcaaagtgcaccctacggaatttgatctctccatgaatcttgtctagtactaatccactttttgcataacttatggatggctttctctttatcaccttgaagacctcttttcctgcagtttttgcctgattgaaggtctgaaggtctggtgcggcatagattaaattggctttccatgcactggacaaaggacttcatggcccagctctctccaacgaaggagaagacggtcttgatatgtgacaaagtctgcgaacaaatgtataggcaaggattataaacatatataatgaagtgggggatgatctgtgtatcaacatttctatctattcaggtaacttggcttgaggtatgtctgttaactgatgtcacaatacctgctctacaactgatactgcctctgaaacaatagcattgcgtgacaaagataagacattcaactttttcgtgtatgctgctccgatgatgaggataagtggaatgaccaggaaggaaagcattgcaacttgccagcagctgataaacgcaattatgacaccagcaaagaaagtggagaagcttgcgacgaaatgacccagctgcagaagagtgaacttaagatgcagatctgaccacagagcttcaaaagacttgcatcagtataatgctcatatgattgtgaaatccattaccttctctcctattgcatcttgtatgacactcatgtagttggt

SEQ ID NO: 97694 - DNA, 370 bp, Zea Mays
ccaccaaacccaagcccgcagcttcaccggcggcggcggcggccgatgatggcctccgcctcggcctccggcggcggcgcgcgtccgtggcgcaccgcgctgctcaccctccgcgacgagtccctcgcctcgccgtcgcccacggccctcctcgagctcctccgccaagtcctcctcaccccagcctcgccctcgctcgccgcgtccgcggccgggctcccccctcacgaggtgggctcggatgtggcgttcctcgctgacacggccgcggcggcggccccttgccccggcgccggcgacgcgctgcgcggtgtctgccacctgattcatgatgtcatgtccaaaacaaatatggagattaacccttctg

SEQ ID NO: 97695 - DNA, 3398 bp, Zea Mays
atggcgtcgaccctcatcctggaagtcatagcccaggcggttgccgatctctgtagttccgtggcggccatcaacgccttcctctccaccaattttccaccgccagggcacacgttctggagcagggattatggaagaggcatttcattagctgaaagttcacattcactaacagtgctcgtctcgattgtatcattcttgcaagctgaactgaacatctctgataaaccagcaaatgccactggcatttcttcccgcaattctggatctgcgaatagtaaaaattccaatatttgggatatgaagatatcagcattttcgatgctcgaagatatattgagtaaggttgcatcaaatatgacagaaaatctgtggcagtctgtcatcgaggtcttgaggaaagttatggattttgtcacagcaaggaaccttgttatagagagtagcatcatgtcaagattttatacatcttttcttcgttgtctacatttggttcttgtggatcccaaaggaccactttcagggcatgttgcagggtttgtagcaaatctgcagatatttttcgtatatgggctgaggtcatcttcacctcctacactagctccaaaagaaactagaacagattcaaaacccagagcttcacgtggacgatatagaccacctcatttgaggaacaaggagagaagagagaatgattcactggaaggtcaaaattcagatagtgagtattcttggtatgatatgagctcatcagactcagacctgagtgatagtgatggttatgcaaaaagtggagaccgcttccggagttcgaaggctagattagctgccattctttgtatacaggatatctgccatgctgatccaaagttacttacttcacaatggccagtacttttgcctgagaatgatgttctccaacaaaggaaatatcaagcaactctgatgacatgcttgctttttgatcctataacgaaggtacgtgttgaggcagcatcaaccattgctaccatgctggaacggcaagcattagttttgacacaagttgcagagtacaaggagtcgtctaagcgtggatcattcactacattatcttcctcacttggtcaaatattgatgcaactgcatacaggagcactgtacttgatacagcgtgaaactcaagctactttgcttgcggcattattcagagttctcattcttttgatatctgctacaccgtacgctcggatgccaaaggaattgttgccaacagtcattaaagtattgtgcagtagattactgaacaaacactcgaataagactgaacattatgccgtgctggttactgttctaagttgcttggagacagctttttcaaaagtgccacctactttggatgtctttgcggttctcactgaggattgctgtgctggaccatcacatgagcaggaagaatcaaatgttatagcttttcttcttcattgtatagaggaggaaatgcattacagtgttagacatggagccttccaggtgctgagatcagcggttcacaactacccaagctgtgcaaacatgatttgggaaaaacttcgagacaatgttcttaacttgttgcaaatacaaagttttgaagaccaaaagtatgatgctaactttgggcctcctggagctaaagaagaatcatcaatcaagggaagatgtcttgtagctggaataaaggtaatggatgaatgtctgcgtgtttcatctggattcacaggagcagatgacatcaaagaatgcagattactggatattcagcaaatttctgattgtaccataaataaaactattaagtctgcacctcactttgaaatggaagctgctggatcatcacagaattgcactttggacataacacttggaattaaccgttggatcgaggtgatagagactcatctccctcagggattatcccatggttctgctatggtcaggacagcatccctcacatgctttgctggcatgacttctgatgtattcttctccctgcctgaaaataagagagactatgtgacctcttcttctgttcatgcggcgttaaatgatatggttcctagtgtaagatcagctgcatgtcgagctattggcattgttgcatgttttcctcagatattgtcaagctctagcctaccaggcaagttcatagatgccattgagttcaatacacataactcatcaactccagttcgtgtcaccgctgcatgggctttggcaaatctctgttcttgtattcgttttagagcactggaagtgcatacagatccctatgcaggtgtattgagcaaatcaagcatatctcttttggttgaagttgctttgcgtctggccaaagatagtgaaaaagtaaaatcaaacgctgttagagctcttggttatctttcaagatttatcagattcaattaccacgccggcacaataaatgacccaagtaacagtgattcagttttttatggagatcctgtgtggcttgaaagaatggtgcaggctttgatgtcttgtgtgacaactgggaatgtaaaggtccaatggaatgtttgccatgcccttagcaacttgttcatgaatgataccttgagacttcaagacatgccttgggcatcaagtgtttatagcatacttctacttctaatccgggactcaaacaattataagataaagatgcatgcagctgttgctctatcagtgccagtgtcaaggcttgattacggcagctcgtttccagatgttgttcgaggcctcgtccatgctctcgagtcattgaactcaaacaattcatcgttaccttcaaatttcaaacagagagacaacctcgagaagcagcttacgtttactgctctccatttgcttagttttgtgtcaccaaacgacgatccaagcctgaaagattttcttaccaagaaatcgtcgttcctagaagactggctgagatcactatgcgcatcgttcaacagctcggagcgccagcccttgccaacggaggccacaaacgacgaggacggcttcagcccaaacgtgactcagaaaggcatgctgtcttccgccctgcagtccttgctcggcgtgtacgcgggcaggacccagcaggtcatcacccagagatttgagcaactggctagaagcgtcgcttgaatggtgagcagcgacgagcagtcaggtgtggtctccactccagcctccattaacaagcagcgatatattggtcgtcgtctacccctcaggacggacagcgcgtcaggcagtggatccttaaattctgccgaatcccatgagctccaggcggcacttgtctcggatcttggctgtcatcatgcacaggctctgcaagcctggcttggtcggtgttttcgtcgttgtttacttgaaacatcgttact

SEQ ID NO: 97696 - DNA, 1625 bp, Zea Mays
gggtaccctagtttcagggtaccaacaacgtcgtgcgtcgggaaggggcggcgtcgggaacggggtgttagggcggactgactcggttgatgtcggaaaaattggagacggacatattgatggaggactaggccgagactgaggacgagaatcaggaggactgagccgatctgacaaggaaacccagacatatgggactgtttttggcccatccaattttctattttttctatacttaacattaggtataagggttttaaaaattgaggggggccatagcccactatgcccccctcccctttcgtccgcctctgacagtagaacacacctcggtgtaactcataccatgccgcagaaacttctgattggctgtacctattacacgagcacaagtcataggcatttagagttcacatagctcacgtttgtcttttgcaaaacctgtcaattatggtaatatctcagtatatgcttgaacttagtatgtgatgattctcatcttcaagcattctgtttaacagggcatcaagtgtttatagcatacttctacttctaatccgggactcaaacaattataagataaagatgcatgcagctgttgctctatcagtgccagtgtcaaggcttgattacggcagctcgtttccagatgttgttcgaggcctcgtccatgctctcgagtcattgaactcaaacaattcatcgttaccttcaaatttcaaacagagagacaacctcgagaagcagcttacgtttactgctctccatttgcttagttttgtgtcaccaaacgacgatccaagcctgaaagattttcttaccaagaaatcgtcgttcctagaagactggctgagatcactatgcgcatcgttcaacagctcggagcgccagcccttgccaacggaggccacaaacgacgaggacggcttcagcccaaacgtgactcagaaaggcatgctgtcttccgccctgcagtccttgctcggcgtgtacgcgggcaggacccagcaggtcatcacccagagatttgagcaactggctagaagcgtcgcttgaatggtgagcagcgacgagcagtcaggtgtggtctccactccagcctccattaacaagcagcgatatattggtcgtcgtctacccctcaggacggacagcgcgtcaggcagtggatccttaaattctgccgaatcccatgagctccaggcggcacttgtctcggatcttggctgtcatcatgcacaggctctgcaagcctggcttggtcggtgttttcgtcgttgtttacttgaaacatcgttactgtgagtacacacacatatatatatatatatatatatatatatatatatatatatatatatatatatatatatatatatatatatatatatataagttggcagtcttcaaagctcagcgtgaccggacctcagcagcactgggtatctcttaactacttttctggcgttcctgacaaacaggatggcgctgttatgtagatgggccttttccctggtcctggggcttcctgcttgcttgataaaaggttggtatcacccgaccacggtccacgtggacgatattacaagatgttcattgttcttggcaagaggggtcatgaatgc

SEQ ID NO: 97697 - DNA, 1891 bp, Zea Mays
atgctgcaccgggacggcgggtcgacgtcgtcacgtcaccagcgcctgcctccctttgtttatccctcgcaggtcgcagctacggctacgcaaaagcttcccttccttccctggaacggcaacgagacgtgggagctgggacgggcaagtagtagaaaccttctctccttccccagccaggacgccatacagaatccgacgcgatccagaagaagccaagggcctcttcatatcctcccgcctccctctgcgaggttcccagaccgagccatcgccggcgctaggctcggggatcttgtcgggtcccgtcccgtcctaccacttcgccggcgctgcgtcgccgtcactcgtcagtcaggactcaggatccccaagatggcttcttcaaacggtgaggctgagcaacaatggatagagaatatcaagtcaggaggaacagttccctgtctagcacctgaaaactgtcctaatggctgggctactcctcccggtgattcatttatggtcagaggcccagaatatcttacaaacaaggtaaaaataccaggtggagagtatcttctgaagcctctcggctttgattggatcaaaggaccagcaaaaatctgtgagatcctcaaagacagtaaccatcgagttagaaaagctatcgatgatgaggtttcacgtagtaaccagccttttgtctgggcattcaacctgcaactgcccaaggataacttcagcgcaatattctactttgtgtcgctggaggctatacctgaaggctcccttatggaccagtttttgaaaggagatgatgccttccgaaactccaggcttaagttaatagcgaacattgtcaaggggccctggattgtccggacggctgttggtgaacaggccatctgtatactggggagagccctctcgtgcaagtatgttcaaggatcaaacttcatcgaagtcgatgtggatatcgggtcttctatagttgcaaatgcgatcgttcatttggcatttggctatatcacaacgctaactgtagatttggcctttctcattgagagtcaaaccgagccggagctccctgagagacttattggagcagtaaggttttctgagttaaatccaggatcagctggtttgtttgaaaggcggtctgaagagcatcaggaaagcactcagtctcggcctgtaggattttggcagggtttctctcaactgttgaacaaccaaggcaatacaagggagccatcccctaatttacagaatactaatggaactttgcgcaaagaagaagcaaatgaggatgccaaatggtaagtacttatctaagtgctttgtgagttgtttgccattggaatttaaccttgccagatacacaaaatatctctagtgcatttttttttaaaaagaaacaaacaaagactgtagtgtgagtatgaaaaggttgagtggataagttatggcatgcctcatgactcatgaacagtgaagtactttccttgtaattttctgtgttatgttgaggacgctactcaatcaaatggctgttgcgtcagcatcattctgctatatctttgaaacctgtcaaaataaaggttttcttttgtttgatgaagctttatcatgtgaaataatggtatatttgcatgtgcctctctcttgcagattcagacccctaccattgtttcggggacaatttatcagtagatcacggcgttacaatttaccagatagtcccagggctttgtttctttgccctcacatctgctgtaaaaattataactttggccacagacaaactgcataactttgtacataaactgaatgcttcctaaatatttgttcccttatatagttatatgtgaattgtatgaagctcaaggaaagatgtttcattccacag

SEQ ID NO: 97698 - DNA, 1582 bp, Zea Mays
atgctgcaccgggacggcgggtcgacgtcgtcacgtcaccagcgcctgcctccctttgtttatccctcgcaggtcgcagctacggctacgcaaaagcttcccttccttccctggaacggcaacgagacgtgggagctgggacgggcaagtagtagaaaccttctctccttccccagccaggacgccatacagaatccgacgcgatccagaagaagccaagggcctcttcatatcctcccgcctccctctgcgaggttcccagaccgagccatcgccggcgctaggctcggggatcttgtcgggtcccgtcccgtcctaccacttcgccggcgctgcgtcgccgtcactcgtcagtcaggactcaggatccccaagatggcttcttcaaacggtgaggctgagcaacaatggatagagaatatcaagtcaggaggaacagttccctgtctagcacctgaaaactgtcctaatggctgggctactcctcccggtgattcatttatggtcagaggcccagaatatcttacaaacaaggtaaaaataccaggtggagagtatcttctgaagcctctcggctttgattggatcaaaggaccagcaaaaatctgtgagatcctcaaagacagtaaccatcgagttagaaaagctatcgatgatgaggtttcacgtagtaaccagccttttgtctgggcattcaacctgcaactgcccaaggataacttcagcgcaatattctactttgtgtcgctggaggctatacctgaaggctcccttatggaccagtttttgaaaggagatgatgccttccgaaactccaggcttaagttaatagcgaacattgtcaaggggccctggattgtccggacggctgttggtgaacaggccatctgtatactggggagagccctctcgtgcaagtatgttcaaggatcaaacttcatcgaagtcgatgtggatatcgggtcttctatagttgcaaatgcgatcgttcatttggcatttggctatatcacaacgctaactgtagatttggcctttctcattgagagtcaaaccgagccggagctccctgagagacttattggagcagtaaggttttctgagttaaatccaggatcagctggtttgtttgaaaggcggtctgaagagcatcaggaaagcactcagtctcggcctgtaggattttggcagggtttctctcaactgttgaacaaccaaggcaatacaagggagccatcccctaatttacagaatactaatggaactttgcgcaaagaagaagcaaatgaggatgccaaatgattcagacccctaccattgtttcggggacaatttatcagtagatcacggcgttacaatttaccagatagtcccagggctttgtttctttgccctcacatctgctgtaaaaattataactttggccacagacaaactgcataactttgtacataaactgaatgcttcctaaatatttgttcccttatatagttatatgtgaattgtatgaagctcaaggaaagatgtttcattccacagaatgtgatagttgaaagcatctgcatttcaaaaagataaaaaa

SEQ ID NO: 97699 - DNA, 1320 bp, Zea Mays
aattttccggtaacaccatggaccatggtgcgcggggtagttgcagctgttaggagcaccgagcacaataatttgtctgttcttcggcctccatccccgcaggatagagaaagagggagctctagacggggaggctcccaaatcgatattttttcgcatctgttcgttctccgacgcggcggcgaatctgagaacccctcgctgagtggtcggcggcgagtccgtgatggtcggcggccggcgggcgcggacatgcacaaccgctcctcctcctccgccgccgctgcgtcgtcgttgccgctctcccccgccgacggcttcctgcgcgtgaaggacggcgtggacggaatgatcaagtacgtcgccaacgagccctccgtcgggctctacttcgtccagcagcacgcccgggcttccatgcccctcctccttgacgtcaagggtaagctcgtagagaagacgcgtgaggtgacattgcacactgaagacatggaggattctatttgcgctgtgagatccatggctgattttggacttccacttgctgatgacatgatcaaggacataaatagatcactgcaaataatgtcaaagacccagccaaagagagggttgatccaaaaccccagttgggggttccagtcaaggaaaagctcaggaacttgggacgaactgggctctaccaatggaagtagcagcaggaactacctctcttcaatgttcaacacggcgaagcaaaaggcatcgggtctcaggtggccgcagcctaattttgcaacaaaagatgatactagcgagaactcggcgtcgtcttctgccctggaatcgccacaagctggtgggcaaggtgcatctacaccagatacagagaaggatgagctccccatttcaagtcggttgtcagagggtacggccgcaaaccgtagcctgcctgctaccggcgtctcggaaacagtggaggcttacaacaagttcaaagaagagcaggagctgaagcttcgtgagtggctaagagactctgaagaagccgtcaatgataaagactgagtgtgctaaagctgcttcggccctgtgcctctgttattagatatatggtacattctgaactaaaaagaaacatagcactctgttaatgaaacagaggttgattggtatagatgcacaagatgccgaaagactgtagtttgtgatgaaggggttggtccggacgattgtaacgtgacttatttatagatgccattgcatagtgtttgtctcaagcctcatgtgtaattgaatcacgatagataatagataaaagatgttgtctgtttctgttct

SEQ ID NO: 97700 - DNA, 533 bp, Zea Mays
gtagtactcaaccctcaacacacccagtcacaatggcgacatccgtgaagcgcagccacagctgcagatgccaagtactcttcctgcttgcgttggttcttctggcattcgtctctgcgagtcctacacccatcagcggtcagagcattgacgacggcaggaagagcaagacaacggtcgtcgtcggcggcggcaacgaggcaatcgtcgacgaggacaacgacatattcaacgggtgccactacaataaccagaatccccattattcgtcggcgctgttctgctgcagcaaggacaagctgtgctgggcgtcgttgccggagtgcgccgccaactgcccttgcaagacgaactgctagacgatgatgagcttcgagtctccagttcatacatgatccatggttgtgttattggatgaagatgtactagagaggcaatcgccaaagatgcagtcttgatagcaactgagaataatcgtacgatagatattgggctaaaccaggaccaggagtatccaaaaattgttttatagc

SEQ ID NO: 97701 - DNA, 1157 bp, Zea Mays
aaattagaatagtagtcttacacggtaatttggatgcagcattacaaaatagagccggcacgcaaacggggtagtgtagcaaacttacaaaattggctaaggaaagtaattcaaaatctagttttttccttcattttctagctacattaaatgtaccagataaccaagtcaatgttctagttataatttttaattgccgcaaagtttaaaaaggaaactcgcacatttttgtgtttcgtgatatattttgattacaagatttttctgaattgttgcacttggtcctacactaaattgatgattaagaaaaggttcactaattaatacgagaactcccaagagccaagcctatgccagacgagctaacatatagaaaggtaaagaaacatatagataaatagatagatagatagatagacacataaagaaaaaagatagacagatagataaagggatatatatatatatatatatatatatatatatatatatatatataagagatagatacataaatcgagatagatagacaaaagctagatagacagacaaatagactatggactgcatatatatattggccacatcttgcagctttcaaaagtaacacattgttagtattagacactttctagttcatcacccatggcaaagttcttcaactacaccatcatccaaggactcttgatgctttccatggtacttctggcatcgtgtgctattcatgcacacataataagtggggaaactgaagaggttagcaacacagggagcccgacagtgatggtcacgatgggggcaaaccgaaagataattgaagataataaaaatttattgtgctatctaagggctctagagtactgttgtgcaaggaccagacaatgctatgatgacataaagaagtgcttggagcattgccgtggttgaaaggtgtaaataaaggatatgctttctttggatcttagttggtgatcagaaaaaatgttctaccaattcatgcatgtaccaaaggataatataagctgctcaaaaaatcgtggttaattagagttttttgttggaaaaatgataacttccttacaaacatataccaaattaaagagaccctcttaatgcatgatctatcttttaataaagaacatattccatagtaaaaa

SEQ ID NO: 97702 - DNA, 586 bp, Zea Mays
tatggagtgcatatatatatattggtcatattttgcagctttcaataataacacattgttactattagactctagttcatcaccaatggcgaagttcttcaactacaccatcgtccaaggactcttaatgctttccatggtacttctggcatcatgtgtcattcatgcacacataataagtggggaaattgaagatgttagcaacactaggagcccgacaatgatgggggcaaatcgaaagataattggagataataaaaatttgttgtgctatctaaaggctctagagtattgctgtgaaaggaccaaacagtgctatgatgacataaagaagtgcttggagcactgccatagttgaaaggtgtaataaaacgatatgctttctttggatcttagttggtgattagaaaaatgttctaccaattcatgcatgtaccaaaggataatataagctgctcaaaaaatcatggttaattaaagtttttttgttgaaaaaatgacatcttccttacaaacataccaaatttaagagaccctcttaatgcatgatcaatcttttaataaagaacatattccatagtaaaaa

SEQ ID NO: 97703 - DNA, 1922 bp, Zea Mays
tcccgttcctgttcccttcccacctctcccggcttcagacctcgggctccccgctcctgcgccgccgccaccgtcgcggccctcatccctcaaattaaacctctaggcctccactcgttgaagccacgtcactcgtattagcacacctgtccctcgctgtaacggaggcccgtccctcgctgcaacgaatacccctctccctttagctgcactagcactgcactggttcgtatcgtctcccactctccctctccctcccattcacacggtctcagtgaagaactcctccgcgacttggtggccatcgatggcgacgcactgccctaccacgacatgggttgtttggagatggtcatgtacgagcggtggttcatgttctagaagcggcggcaacatcctacacctgagagcggccgagtcatcccgaacccgcacggcacacgcggacgcgctcacgcgcctgggctggggatttatgcttctgacggaaatatttggtggttcagtttgaatcaagagtttttgtgtatttctttcttactatgatttggtagggagggactgaatattatcatggaattggaatacaaataaacaaattcaatctattgcagcggaggataagcatgtaattagcagaccaacaacatttgcacttgtccatgctgatggcactacaaaattcctgggtaaggccttaaagttcatcaaagattatggtaaatcctttttccatattttaataattcaatacacgtttgttgagataatggatgtagttttctccagagatgtgtggagatgtgtctagcatatgattaaggtataacagtataacacagtttcagtgtctgcactctgtccatccacttggctttgtttggttgatatctttttgttcttgcataatggattagttcatggatgggatctcgattttgctctatggaaatgtgtggtggtacacacttcaaaacatagttacaacattgaagagaatcgtgactacaatgagtggaactgcactatcactatagatctatagcagtagagttatgaaggaactttatcattcactgactcacaattgctgcatgttttgtataatgagtttttggttgatggagctcgggttgtgggtaatagatgcatccagtcagatcgtgttcacttggggaaggatacatggattttgtgatgaacacaaacttacaaaggcacatgtcttaactcttaatacaagtttttgcttaatgacttcatggacatggaatggagaagatctaccccctcctgatactaaagctattagggatatctgtgtactgcatggcgggcatgttgtattgcatcactgagcaggaagttcccttttcaggtctacaaagaaagtggtgcacccataaggtgagggcatctatcacaaaagtttgtcatgaagcgaaagagatctttcaagagacaaaaaagccaagttggtcatggaatgcttgaaattttattgcatgacaatgatgaagaggaggcagcattgcagagagttgcccaagctgaacgtgcggcaaaataggctgtacaaagagctattcgactgcgcaacaaggtccaattctcatgacaaacacagaactcgcaacatacaaatctatcatagttctcaggattgtcgaggctgctagtatatcagactcgtcccaagatattatttgtattatcctcgactaaagaataatatgggttgttcattatttttgtgaagagcatgggaaacactctttgtagccatgatattggcttttgatgagttgttcattgtttttaagaatatactgccatgtaagtcattttgtttacatcttaatatgacggtttccataatgtccaatatatgtcttttaaataagatgattttcttgttgcaa

SEQ ID NO: 97704 - DNA, 740 bp, Zea Mays
agctttcaataataacacattgttagtattagaccctagctagttcatcacccatggcgaagttcttcaactacaccatcgtccaaggactcttgatgctttctatggtacttctggcatcatgcgtcattcatgcacacataataagtggggaaactgaagaggttagcaacattgggagcccgacagtgatggtcacgatgggggcaaaccgaaagataattggagataataaaaatttattgtgctatctaaaggctctagaatattgctgtgaaaggaccaaacagtgctatgatgacataaagaagtgcttggagcactgccatggttgaaaggtgtaataaaaggatatgatttctttggatcttatttggtgatcagaaaaatgttctaccaattcatgcatgtaccaaaggataatataagctgctcaaaaaatcatggttaattagagttttttgttgaaaaaaatgacatcttccttacaaacataccaaatttaagacaccctcttaatgcatgatcaatcttttaataaagaacatattccatagtaaaaacttgtatttatcacttcttcaatcctaggtattacattttttatttcctgcttggcctcatttctagaattacggtagtaactacttcatggatgaaattgttttccacatctctactcctataatacaaaagtttctccgtgtgtcaaccacgtcacctctccccttcctgcttta

SEQ ID NO: 97705 - DNA, 458 bp, Zea Mays
agagacatcctgaccaacacacggttggtattagctctcatctagcacccatggcgaaatgtctgaagcacactactatccacgcactgtggctggttgccatagttcttcttgcatcctctgtcgtacttcatgcgcgcataataagcaggcaaaccaaagagaatagcaacactaggagcttgacaatgactatgatggggccggcaagcaacattattggcactggggtgggcaactttctagagggaagtgcattaaggatcatgcatagttcgtgtgcgtaaagactatggagtgttttgtgaccttagtggagtgcttgatagggtgcagtggttatgactaacaagaggccgtgcttttatccaattccaagatggaaatcataaagatgttctagcaaatcatgcatcaaccacaagatcaaaatataagctaacatacctttaattacg

SEQ ID NO: 97706 - DNA, 2094 bp, Zea Mays
ccgcgcccctcccttccttccctgccgcgcccgacgccagtggtccgcgcccctccctagccacgccgagatctccgtcgattcgagatgcccgcgtgcagccccctacctgagatcgacgtcgatttggcatgtcgggaggtccgctccccacccaacccccgagatcgctgtcattgtcccccctccctactccaaccccacgctcccaccatcacttgctcgcgtcgcgctccgccgaggccatatacaaaaagctgccgacgacgcagacaaggaaagcgtgggggtccagggcgccgagcagcgccgggaggaacgagcggggggagctcctgccgctgacgcgcagcgagtccaccagcgcggaggggtccatgttcgcgcatgccgtggcgatggctttcaccagagccgacgacgtctcccccctgcctgcggcgtgcggatgttgctgccttttcctccgcctcgtcctcacggccttctctgtctacgctcccgttgacggcctcctcctccactaccatctcgatgtcatcattgcgttggtggggagacgccacggctgtcccgtgtcatctccttctcgtcgtttaatcagatgtgctatttgcgcgtgctaacagcacatttcagtttcttactctcacaacatcgagtaagacacttaggtatattagaatagtacacttttcgttttaattttttagaacaattactgatgaaacaaacaacactttctatctttactactcctttaagaacatactgtaggcgtccacatctggtgcggttctgcctcccgaggccgcgacgcccccatccctcacaccgcgcatcgtcgtctacttcccgcccatcccactgccgcgtccgccccctcccccaccgaaggaatccccgcggactccgccctggctcccgagaacgcgatccactctcctctctccctcaatccccgcttcctttcatggattgggatctcaagacgccggtctcctgggacctgcccgacctagagcaggcggcacacctccaccgtacctcctcctctccccatcaccgcgcccctccctcgccgcacacctccaccgcgcccctcccccagaccgaactcaaatatcaagaacattccaagctttggcattccagacaagtgctctttcgaggaattgaggacaatcctcaagtcaaaaagattaggtgtatatccatccctcgacagcatggaacacaccagatggtgactttgccagaacatcttcctgagcatgagtttttaatgatcttcaacccttgggatggatgcatacatagccaaatgaagatccacagctatcgccgatctaacatcacatgccaagattctggagaacaacaaacaatgggatggtgagaagtgcatcattctggaatgtagtttcaccccaggatcttgttcattgactgcttacaagctggcaccaagcggttttgagtggccaagtggggacgcaacaacaaggacaatggaagcaacccacatggataccttccaattcattacaagaatgtccagatgcttctgagcgataacttccttagtttctacatgattctagataacaccccttggaatttcaacttcatgtgagtgaagcacgacccacagatgaagtacaacatgaagctgggcatgccgcaggacatttatcacgaggaccataggccgacacacttccttgagttcagcaacattgagggagaggtcgctgaagctgatagggaggacacattcacgtaggtgcctgttcaaaattgtatctcaaacgcacttagctctattttgaatggcaatgtgtgaaagttgtaacctgccccgatgggtgtcatttgttgtttggcttaatcctgtattatacttgctgtaagacagccttagagagggggaaattgtacaagtgcacgggatgacaagagtaaagattttgcatagtagcaatgtctactatataaatctctttgccttgtgcataggatgcaaagattctttggagaaactttgtgatcgatctgttaaattatgaagacaattcgtaccgatatgttatc

SEQ ID NO: 97707 - DNA, 1793 bp, Zea Mays
caggaatcatcgcgtcgtgctcaagccaccccgccgtcatcgcctcacgcaccttccttcggcaaccttctataggcgcaatcacaggaatccccgcggcctcgccccagatccctaaaccccgcctcgtctctcatggaaagtgcgtcctctgcgctcggctctctccgcgtctgcgacagcccgctatccatggaacgtgggtcctctgccctggatcgtcacgtcggccctcgattcgcgtccgcgacagcctaatcccgcacgtggattgggtacccctctgccccgaatcgtcgctcccgcccggcatcagcgtccgcgtccgcgttgtggtgtccgcagtctccatggaaggcgatcccgcgtgtggattagcattagcagatgaagaggcggaatgttcttcttgggatagcgacgatgagtaccagaaattcatccaaaatatgaaccctccaagggtcaccatcgacaacacctcatgtccaagtgctatagttattcatgtcctcactaacctcaagctcatagtcacgaaggcatacatatcctcagacggaggatggttcatggatgtgtccaccgacgaaggagaagccaaagcacaggagcatggtgctatgttcatggagaccagtgcaaaagctgggttcaacgtcaagcccctattccgcaagatcgctggatcccttctaggactagacgcactttcgtcaggaaagcaggaagacatggtcgacataaacctcagacctgccagcggttcgtcggcttcaggtgcagccgcgcagctggagcagaaatcaggcggttgctcctgttgagacttcgacagttttgtgttcagagaagctacaacagtactgcaacatcgagaacttctccattccattccaatccaacatcgacaggcattccatttcacacagctaatcggtggagggaaaaatattcatcaggaaaccagctaatcgtggaaggaaaaaatattcatcaaagtggatgtcactggatgttttagtggatgtcaactttgtcatctactcgtgtttgataccaggatgcagtgcaaccatttccacatatggttccacatgcacattcagcgagtcaatcctgggatcgtgtggcttccatactgggctgttcacctcaccacatttgatggatgttagagagcgatttcagctagatgggtgctatgaaatttatgatcgcactgacctagctcctcctttctgagggcatcggggttaatatttctgaagagaaaattttgaagtactcctggtggtgctagaacaagttgaagcctatttcaggttcctcgcgctgctcgcattcaagatattttctgctgagcaggtagatgttgctattctcgaggttggcctaggagggaagttcgatgcaactaatgtggttgttagttctcgtgaatgtcctgttgtctcgaaatacaaagcttctgttcgcacctaatcgcctaaaatggaaatgtttgactcattgtttaattcggggggaagctgaaggtggtctgatccgttctaggaagagaaaggctgaccaagtcatcatctccagggacgatgttagcgaaagtcaatttaatcaggtgttgatcattgggttgcaacaaatcatcggtggagactgagtcaccgcggccagaaaaccacggtctcaatttgaggagtttttccatctatgtttgttagaaggcataatgcctatttatctcttgtattcgaacatttggcaattaagaaatagaagattacttcccc

SEQ ID NO: 97708 - DNA, 1907 bp, Zea Mays
ggaatcatcgcgtcgtgctcaagccaccccgccgtcatcgcctcacgcaccttccttcggcaaccttctataggcgcaatcacaggaatccccgcggcctcgccccagatccctaaaccccgcctcgtctctcatggaaagtgcgtcctctgcgctcggctctctccgcgtctgcgacagcccgctatccatggaacgtgggtcctctgccctggatcgtcacgtcggccctcgattcgcgtccgcgacagcctaatcccgcacgtggattgggtacccctctgccccgaatcgtcgctcccgcccggcatcagcgtccgcgtccgcgttgtggtgtccgcagtctccatggaaggcgatcccgcgtgtggattagcattagcagatgaagaggcggaatgttcttcttgggatagcgacgatgagtaccagaaattcatccaaaatatgaaccctccaagggtcaccatcgacaacacctcatgtccaagtgctatagttattcatgaaagtgtccaccgacgaaggagaagccaaagcacaggagcatggtgctatgttcatggagaccagtgcaaaagctgggttcaacgtcaagcccctattccgcaagatcgctggatcccttctaggactagacgcactttcgtcaggaaagcaggaagacatggtcgacataaacctcagacctgccagcggttcgtcggcttcaggtgcagccgcgcagctggagcagaaatcaggcggttgctcctgttgagacttcgacagttttgtgttcagagaagctacaacagtactgcaacatcgacatcgacattcaatttcacagcaggaacttctccattccattccaatccaacatcgacaggcattccatttcacacagctaatcggtggagggaaaaatattcatcaggaaaccagctaatcgtggaaggaaaaaatattcatcaaagtggatgtcactggatgttttagtggatgtcaactttgtcatctactcgtgtttgataccaggatgcagtgcaaccatttccacatatgtattggctagcattgaactgaggctttgtacagtagtaataagaaatgagaaatgtcgaattcttttagggccctgatttggcatcaattgaaaagacattgactgtatctatctacagggttccacatgcacattcagcgagtcaatcctgggatcgtgtggcttccatactgggctgttcacctcaccacatttgatggatgttagagagcgatttcagctagatggagaaaattttgaagtactcctggtggtgctagaacaagttgaagcctatttcaggttcctcgcgctgctcgcattcaagatattttctgctgagcaggtagatgttgctattctcgaggttggcctaggagggaagttcgatgcaactaatgtggttgttagttctcgtgaatgtcctgttgtctcgaaatacaaagcttctgttcgcacctaatcgcctaaaatggaaatgtttgactcattgtttaattcggggggaagctgaaggtggtctgatccgttctaggaagagaaaggctgaccaagtcatcatctccagggacgatgttagcgaaagtcaatttaatcaggtgttgatcattgggttgcaacaaatcatcggtggagactgagtcaccgcggccagaaaaccacggtctcaatttgaggagtttttccatctatgtttgttagaaggcataatgcctatttatctcttgtattcgaacatttggcaattaagaaatagaagattacttccccaatatcccttattcctaatctcacctttcacggcttgtggtgaacaatcacttgctattaccgactgacatgtccactcctcatatgtgcgatattggggttgatatat

SEQ ID NO: 97709 - DNA, 1998 bp, Zea Mays
ggaatcatcgcgtcgtgctcaagccaccccgccgtcatcgcctcacgcaccttccttcggcaaccttctataggcgcaatcacaggaatccccgcggcctcgccccagatccctaaaccccgcctcgtctctcatggaaagtgcgtcctctgcgctcggctctctccgcgtctgcgacagcccgctatccatggaacgtgggtcctctgccctggatcgtcacgtcggccctcgattcgcgtccgcgacagcctaatcccgcacgtggattgggtacccctctgccccgaatcgtcgctcccgcccggcatcagcgtccgcgtccgcgttgtggtgtccgcagtctccatggaaggcgatcccgcgtgtggattagcattagcagatgaagaggcggaatgttcttcttgggatagcgacgatgagtaccagaaattcatccaaaatatgaaccctccaagggtcaccatcgacaacacctcatgtccaagtgctatagttattcatgaaagtgtccaccgacgaaggagaagccaaagcacaggagcatggtgctatgttcatggagaccagtgcaaaagctgggttcaacgtcaagcccctattccgcaagatcgctggatcccttctaggactagacgcactttcgtcaggaaagcaggaagacatggtcgacataaacctcagacctgccagcggttcgtcggcttcaggtgcagccgcgcagctggagcagaaatcaggcggttgctcctgttgagacttcgacagttttgtgttcagagaagctacaacagtactgcaacatcgacatcgacattcaatttcacagcaggaacttctccattccattccaatccaacatcgacaggcattccatttcacacagctaatcggtggagggaaaaatattcatcaggaaaccagctaatcgtggaaggaaaaaatattcatcaaagtggatgtcactggatgttttagtggatgtcaactttgtcatctactcgtgtttgataccaggatgcagtgcaaccatttccacatatgtattggctagcattgaactgaggctttgtacagtagtaataagaaatgagaaatgtcgaattcttttagggccctgatttggcatcaattgaaaagacattgactgtatctatctacagggttccacatgcacattcagcgagtcaatcctgggatcgtgtggcttccatactgggctgttcacctcaccacatttgatggatgttagagagcgatttcagctagatgggtgctatgaaatttatgatcgcactgacctagctcctcctttctgagggcatcggggttaatatttctgaagagaaaattttgaagtactcctggtggtgctagaacaagttgaagcctatttcaggttcctcgcgctgctcgcattcaagatattttctgctgagcaggtagatgttgctattctcgaggttggcctaggagggaagttcgatgcaactaatgtggttgttagttctcgtgaatgtcctgttgtctcgaaatacaaagcttctgttcgcacctaatcgcctaaaatggaaatgtttgactcattgtttaattcggggggaagctgaaggtggtctgatccgttctaggaagagaaaggctgaccaagtcatcatctccagggacgatgttagcgaaagtcaatttaatcaggtgttgatcattgggttgcaacaaatcatcggtggagactgagtcaccgcggccagaaaaccacggtctcaatttgaggagtttttccatctatgtttgttagaaggcataatgcctatttatctcttgtattcgaacatttggcaattaagaaatagaagattacttccccaatatcccttattcctaatctcacctttcacggcttgtggtgaacaatcacttgctattaccgactgacatgtccactcctcatatgtgcgatattggggttgatatatatgttgttcgtttccatgt

SEQ ID NO: 97710 - DNA, 1920 bp, Zea Mays
gcaaccttctataggcgcaatcacaggaatccccgcggcctcgccccagatccctaaaccccgcctcgtctctcatggaaagtgcgtcctctgcgctcggctctctccgcgtctgcgacagcccgctatccatggaacgtgggtcctctgccctggatcgtcacgtcggccctcgattcgcgtccgcgacagcctaatcccgcacgtggattgggtacccctctgccccgaatcgtcgctcccgcccggcatcagcgtccgcgtccgcgttgtggtgtccgcagtctccatggaaggcgatcccgcgtgtggattagcattagcagatgaagaggcggaatgttcttcttgggatagcgacgatgagtaccagaaattcatccaaaatatgaaccctccaagggtcaccatcgacaacacctcatgtccaagtgctatagttattcatgtcctcactaacctcaagctcatagtcacgaaggcatacatatcctcagacggaggatggttcatggatggtaggagagccattggtttctttccttttcgtcaaaatggaaagtgtccaccgacgaaggagaagccaaagcacaggagcatggtgctatgttcatggagaccagtgcaaaagctgggttcaacgtcaagcccctattccgcaagatcgctggatcccttctaggactagacgcactttcgtcaggaaagcaggaagacatggtcgacataaacctcagacctgccagcggttcgtcggcttcaggtgcagccgcgcagctggagcagaaatcaggcggttgctcctgttgagacttcgacagttttgtgttcagagaagctacaacagtactgcaacatcgacatcgacattcaatttcacagcaggaacttctccattccattccaatccaacatcgacaggcattccatttcacacagctaatcggtggagggaaaaatattcatcaggaaaccagctaatcgtggaaggaaaaaatattcatcaaagtggatgtcactggatgttttagtggatgtcaactttgtcatctactcgtgtttgataccaggatgcagtgcaaccatttccacatatgtattggctagcattgaactgaggctttgtacagtagtaataagaaatgagaaatgtcgaattcttttagggccctgatttggcatcaattgaaaagacattgactgtatctatctacagggttccacatgcacattcagcgagtcaatcctgggatcgtgtggcttccatactgggctgttcacctcaccacatttgatggatgttagagagcgatttcagctagatgggtgctatgaaatttatgatcgcactgacctagctcctcctttctgagggcatcggggttaatatttctgaagagaaaattttgaagtactcctggtggtgctagaacaagttgaagcctatttcaggttcctcgcgctgctcgcattcaagatattttctgctgagcaggtagatgttgctattctcgaggttggcctaggagggaagttcgatgcaactaatgtggttgttagttctcgtgaatgtcctgttgtctcgaaatacaaagcttctgttcgcacctaatcgcctaaaatggaaatgtttgactcattgtttaattcggggggaagctgaaggtggtctgatccgttctaggaagagaaaggctgaccaagtcatcatctccagggacgatgttagcgaaagtcaatttaatcaggtgttgatcattgggttgcaacaaatcatcggtggagactgagtcaccgcggccagaaaaccacggtctcaatttgaggagtttttccatctatgtttgttagaaggcataatgcctatttatctcttgtattcgaacatttggcaattaagaaatagaagattacttcccc

SEQ ID NO: 97711 - DNA, 862 bp, Zea Mays
actatcaaaccttgactaagttacatagttgcctgaaagcaaaatttcactttattatctttaaatcatttgatgcttatcactttggcgtgatttcaataactaggaaggcatgcacattttcaacctttaaaagccagaatacacacgtctacttgctggaaaatttttatgctttctaccaatcttacaacgacaatttgaaagttgatatttgtgatacttatttggtccaggaactagattttttgtacattctttcggatctggattgaacaacgctctctttgtatatgaacaatgctctgtaaatatacgtttgataattttatatgatatttaataaatagtagctactgtgactgtttcattttgtttttcttaggttgttagttctcgtgaatgtcctgttgtctcgaaatacaaagcttctgttcgcacctaatcgcctaaaatggaaatgtttgactcattgtttaattcggggggaagctgaaggtggtctgatccgttctaggaagagaaaggctgaccaagtcatcatctccagggacgatgttagcgaaagtcaatttaatcaggtgttgatcattgggttgcaacaaatcatcggtggagactgagtcaccgcggccagaaaaccacggtctcaatttgaggagtttttccatctatgtttgttagaaggcataatgcctatttatctcttgtattcgaacatttggcaattaagaaatagaagattacttccccaatatcccttattcctaatctcacctttcacggcttgtggtgaacaatcacttgctattaccgactgacatgtccactcctcatatgtgcgatattggggttgatatat

SEQ ID NO: 97712 - DNA, 341 bp, Zea Mays
tatttgacttgaaagtatcatgacatattttactgcgacaattatcattacatatttctccaagttatgttgcaagaataaaaattggcttcagtttcaaaattactatgcttatcttagttggcagcttttttgtatcattacatacttgaattttcaatggtaaaatttagcattcctttgcattgtactctgatttttttaaaagagctttgacataccgaaccagtctattttatacgcgtattgttgtctactttgaatcgtactaaataaagtttgttattgcatttgactaatggaggtagggcgccgcgaagcgcgcctccttttctagtatc

SEQ ID NO: 97713 - DNA, 1151 bp, Zea Mays
agctagcttggcgtttgccagcacgcatagcgattgcgactattggcgattgtgtaggtgtagtgtgcctgtcgaggaacgagagcctcaagacccgagcgtcttcagatatggaggaggcggcggttgcacggacgaccagcgagacccaggtgggcgacctgccggaggtgtgcctggcgcaggccatcgcgcggacctccccgcgcgacgcctgccgctgcgccgccgtgtccccggccttccgcgccgccgccgactccgaccaggtctggcgcgccttcctccccgagcagctcgaggcggctgaggaccacttggacagccgccgcgtgtctccgccgtcgcaggcggctcacccagcggcgaccgtgcgcggcctcagcaagaaggacgcctacctcagcctctgcgacgctgccggcgccgtggccgtcgacggcagcgggtgcagggtgtggctggagagggccagcggcgccacgtgctacgcgctgtcggctcgcaggctcagcctgccctgggacgacggcgagttctcctggaggttcacgcaccacccacgctccaggttcgcggaggtggcggagctggtggactgcacgtgcctggacatctacgggagcctgccgctggccgcgctgacgccggcgacggtctacgcggcgttcctggtgtacggcaccgcgccggagggggcctaccgcggcctgagctacccggaccaggagacggccgtggccgtgggcgggcgggtcgtcgcgcgccacgccgtgtgcctccgccccgacgacgccgaggcgcgcaagttcaggggccgcggcgccggggaggaggcgaggaggccgagcctgcgggctgacgggtgggaggagatggagatgggacgcctgcgcacgccgcccgtggaaagcggcggcggcggcggcgacgtctgcgtggtgcaggcgagcttcgaggtgctcggctggtaccccaagcgcggcctcgtcgtcgagggcatcgagttcagggccctccacgatgcttcatgactggttgagagttgagaccgcatgaatatacgttgtaaatgagatgtaaactcgattggtaaattgtaacaatcatttacagtgttcttgataggtaaattcatcggagacatgatc

SEQ ID NO: 97714 - DNA, 1646 bp, Zea Mays
aaaaaagacattgggcctcgcttgtcggcccagtccccagcaaaaccctggaggcccgcgcggcactccgaaaccgtcatctcattttccttttcacgcccactcactcacccgccgcccccgccgccgccatcccctccttgccgtctccgggcacggcctcgtcaatcctttgctcctcctccgccgcagccgctgccatggactccacgccggcgcccgaggcggctcccggagcctcctcttccgccaccgccgctgccgaggatctggcggggggcgtggcggcgatgaccctggatgagcggttcgctctgctgcgggggatcggggaggagtgcatccaggaggacgagctcaggcgcctgctcgagaacaagcccgtgcccatctgctacgacggcttcgagccctccggacgcatgcacatcgcccagggcattgtgaagaccatcaacgtcaacaagatggtcagggccgggtgcaaggtgaaaatctggattgccgactggttcgcgcagctcaacaacaagatgggaggcgacctcaagaaaatccagacagtcgggcgctacatgatcgagatttggaaggcggccgggatgaacctcgacggggtggagttcctgtggtcctccgaggagatcaaccggcgcgcccacgagtactggccaatcgtgatggacattgcccggaaaaacaacgtcaaacggataacgagatgctgccaaattatgggcagaagtgaccaggacgacttgactgctgcccagattttctacccttgcatgcaatgtgctgatatatttttcttgaaggctgacatatgccaattggggatggaccaaaggaaggtcaatgtgctagctagggagtactgtgattacatcaaaaggaagaacaaaccaattattctttcacatcatatgctccctggttttaaagaaggccaggagaaaatgtcaaagagtgacccatcctcggctatctttatggaagatgacgaggcccaagttaatgtgaagataaagcaagcattttgccctcccaaaattgttgaggggaatccttgtttggagtacattaaatacatcgttttcccttggtttggaaggtttgaggtggcccggaaggaaagcaatggcggtaacaagacatttacaagcatggatgaactaatttctgattatgagactggtgctttgcatcctgctgatgtcaaacctgcactggcaaaagcaataaatgaaattttgcagcctgttcgtgaccacttcaacaacaataacgaagccaaagttctactaaacactgtcaagaagtacagagtaaccagttgaggagcggaaggtgttcatctttagggtgaatgtcgctgattgaaattcttctatgcttattctgttactaatgccaccactcattttagatcaagcattgagccattggttatcagtgtacaatctctctatacaggcattttggtggcagtggccttgtctgtcattggctacaacgttctagataaaaaaacatttaaattttgtggaagttgaattatcttctcatgtgtgtatgactgtatgtgagactggttgaaagtgcaagcgacaaggcatatatggccgagaagtttaaatgttttt

SEQ ID NO: 97715 - DNA, 1643 bp, Zea Mays
aaaaaagacattgggcctcgcttgtcggcccagtccccagcaaaaccctggaggcccgcgcggcactccgaaaccgtcatctcattttccttttcacgcccactcactcacccgccgcccccgccgccgccatcccctccttgccgtctccgggcacggcctcgtcaatcctttgctcctcctccgccgcagccgctgccatggactccacgccggcgcccgaggcggctcccggagcctcctcttccgccaccgccgctgccgaggatctggcggggggcgtggcggcgatgaccctggatgagcggttcgctctgctgcgggggatcggggaggagtgcatccaggaggacgagctcaggcgcctgctcgagaacaagcccgtgcccatctgctacgacggcttcgagccctccggacgcatgcacatcgcccagggcattgtgaagaccatcaacgtcaacaagatggtcagggccgggtgcaaggtgaaaatctggattgccgactggttcgcgcagctcaacaacaagatgggaggcgacctcaagaaaatccagacagtcgggcgctacatgatcgagatttggaaggcggccgggatgaacctcgacggggtggagttcctgtggtcctccgaggagatcaaccggcgcgcccacgagtactggccaatcgtgatggacattgcccggaaaaacaacgtcaaacggataacgagatgctgccaaattatgggcagaagtgaccaggacgacttgactgctgcccagattttctacccttgcatgcaatgtgctgatatatttttcttgaaggctgacatatgccaattggggatggaccaaaggaaggtcaatgtgctagctagggagtactgtgattacatcaaaaggaagaacaaaccaattattctttcacatcatatgctccctggttttaaagaaggccaggagaaaatgtcaaagagtgacccatcctcggctatctttatggaagatgacgaggcccaagttaatgtgaagataaagcaagcattttgccctcccaaaattgttgaggggaatccttgtttggagtacattaaatacatcgttttcccttggtttggaaggtttgaggtggcccggaaggaaagcaatggcggtaacaagacatttacaagcatggatgaactaatttctgattatgagactggtgctttgcatcctgctgatgtcaaacctgcactggcaaaagcaataaatgaaattttgcagcctgttcgtgaccacttcaacaacaataacgaagccaaagttctactaaacactgtcaagtacagagtaaccagttgaggagcggaaggtgttcatctttagggtgaatgtcgctgattgaaattcttctatgcttattctgttactaatgccaccactcattttagatcaagcattgagccattggttatcagtgtacaatctctctatacaggcattttggtggcagtggccttgtctgtcattggctacaacgttctagataaaaaaacatttaaattttgtggaagttgaattatcttctcatgtgtgtatgactgtatgtgagactggttgaaagtgcaagcgacaaggcatatatggccgagaagtttaaatgttttt

SEQ ID NO: 97716 - DNA, 2271 bp, Zea Mays
attatatacatccatcggcatagcacgtgcgaggatgcgacggcgagcagcggtgtcgatttttagggcattgtgacttgttgagaaattcgtaggggtatacgaaaacctctccgccgaactcctgcagatcctaattaacctccccctgctgcaccaattgccgctggcgatggatggtagcggacgagctctcgattgtcgcagcttctggaaggccggcgcgtacgaggcccccactgctccgaccagggagttccaagatgctcttgagacgggggacttcgaccgcgcgcgcgtgcaccccaagttcctccacaccaacgccacctcccacaagtgggctttcggagctatagctgaacttcttgacaatgcagtggatgagataagcaatggtgccacgttcataaaagttgataaaagcatcaatttgaaagacaatagctcaatgctagttttccaagatgatggaggcggcatggatcctgaaggtgtccgtcgatgcatgagtttaggattctcaaccaagaaatctaagaccactattggccagtatggaaatggctttaagacaagcacaatgagacttggtgcagatgcaattgtttttactcgtgctatccgaggaggtaatgttacattgagtataggtttgctctcctacacttttttgagaaagacattgaaggatgacatagttgttccaatgcttgattttaagatccaagatggggacattgtaccgttggtgtatggttcacagggtgattgggatagtagtctgaagatagtacttgattggtcccctttttcttcgaaggaagaacttctgcagcagtttcaggatgttggtagtcatggaactaaagtggtagtgtacaatttatggatgaatgatgatggccttttggaacttgactttgaggatgatgatgaggacatattacttagagatcaaggtagcgcaagtggggggttctcaaagagtcagaaagaaattgttaagcaacacatatcccacaggctcagattttcattgcgagcttatacctccatcctttacctcaggaagtttgataatttccaaattatattaagaggaaaacctgttgagcagatatttatcactgatgaactaaaatttaagaaagtcgttacttacagacctcaagcagcacatgattcccaagtggcctcggtaaaaattgatattggttttgcaaaggaggcccctattttgggcatttttgggatgaatgtctaccacaaagatcgacttataatgcctttctggaaggtccttcaagaaggatctagcagagggagaagtgtggttggtgtacttgaagcaaattttattgaaccagcacatgacaaacaagattttgagaggacaccattgtttattcggctagaaacaagacttagacaaattattattgatttctggaaagaaaggtgccatttgattggttaccagccaatggatccacatttaagatcccagtataaggccaccctcaaagaatcggttggtcctgctccagttcaccataaagcttccagtgtccgaagaactggagggctttcgtcaaatttactaccagagacatatgacgacataacaactgttgggttagcaaataatggttctcatttgcaatcgtctgatcaagcacaagagaacaatatggactcagaagttttggatgaggatctggtggagattggctcctctggtgtcctagatcctagttttattgagaagctgagtgaagaaaacatcgctctgttttcaaggcgtgaagagcttcgacaacgagatacacaactgaagcagacgattggagacctggagcttgagctggaggaaacaaaaaagaagtgcggtcagcttgctgctcagctcaaggcatggaagaaccagcagcatctaccctaaatgtgaagggcatcattaagaccgaggacacggaggtacacgacaacgaccaatactgacagaaaaccgaaggttacaaggaagcacggatgcatataatgtctgtctagtgggctggctaactcatggttgagttgttaaaaagaagtttagcatgtaaatcttaggcgtgtgtgctacttagctactagacagaatggttgtcatgtgcaagcaaggaagatgacttgggtgattcctgctgttaatttgctatgcaaaatgtcacgtaaggcccttatgatccagccttgagcatcaaataaaactgtagaactcgaaatgaa

SEQ ID NO: 97717 - DNA, 1417 bp, Zea Mays
ccaataaaaacgccaccccgccctccactcgccggagcccgaccgccgggatgcctcgagatttgcgaccagccgggatgcgcctgttcggcgtcaccatcgcgccggtgcctgaggcgaatcctccgggacgaaatccgagccccaacccacccgtggctgccagggaggacgtgatgcgcaagtgcaagagcatgggcaacctcgcggcccttggcgctggcctggacggtggaggaggatgcgcggacggcggagttgctggcgacgggtacctctccgatggcgggctgatgcagtcgtgcggaaagcggcggagggcgcaggagaggaagaaagctgttccttggactgaagaggagcatagaacatttcttgctggtcttgaaaagctagggaagggagattggaggggtatagcaaaaaaatttgttaccaccagaacaccaactcaagttgcaagtcatgctcagaaatattttcttagacaaactaatccaaataagaagcgcagatctagtctttttgacatgatgcccagagagctgtcaccaacaccaaactgccccgtattaccaccatccatggcaaaagtacatgacgtggtagctatgacgaaacaactccagaatagcaacttggaaggagcctcatcttccaatgcagctaatgtagtatctcaagtaggaagagatctccccccagttccgtcttttaaggcaacaaatatagattcaagtttcagcaaatttagccacatggagcgctactggagaactccctacccgtccagaccaattcctagagcccctgaagggacgtcttcatcaactcctgttgctgccagtacagctgttccagcctccgaagctaacctgactgcatatactagcacattcttgagccagcgagctgataccccatcattgcctccgaagggtgatcctcctccatcagaggatgatgatctggaactgactgtcgctccaccatcccaacagaatatgaccaatatgtcctcccagaatgcggtaggcgtgattcaagtcatctaagctaattttttttctctctctagaagttactgtgggtatttacagttcaccgaataagtactaacattctatcagcaaatacatcagtataataagatcatgagtgacaagacacagtagatgttaagcgcgttaatgtggggggtctgttgtgcatctgcatccccttttcacttgtgttggtacttatctagggattggtgcaagcttagccgattgttttcactgcacttgtgttgctaattatcttgtgtacatgcatggttctctctacattaggcccagacagaaggcatctcacattatgatattgaatattatcaatggggggaaacagaatgttggctggcactgccaccatt

SEQ ID NO: 97718 - DNA, 186 bp, Zea Mays
atggaggaccgtgagtggatgtacatgggccgctcaggtcagggtcaggtcaccaatgaatggatcaacaagactgatgctttcttggaacgagcatttggtgaggctgctaaaggagcgagtagaatttgttgtccatgcagtaaatgtgcaaacaggaaaagacaaacaaagaagtttggctga

SEQ ID NO: 97719 - DNA, 1030 bp, Zea Mays
actttggttaaccacccgactccacctaatatagccttccttttccgtccatggccgcgcaaccctaacggcgcccttcccgtgccgcgcgcatggcggaccccggcggctgcctcgaggtccggctcttctacgtgcgcgtctcgccgcacggcggcgcggcccctcccccgcgcctcgcgctcgagctccgccccgcgggcggcgaggcggcccccgtcccgctgcgcctcgaccgccacgacgccgcctcgggcgaggccacctacgtctccaccgcggccgcgcggcttcccccgccatccgcggccttcgatgtggccgaccaccgcggcgtcgcgctgctccggggctcgcttcggtggtgtcccggcgccaagggcggttcccacgcctgggaaattgattgcgtccccgccgctgcggcggccgcctcggcctcggccttcgaggtgtacgtcgccgggtgctacgccggcgagcccgcggtgctcacgcacgccctgcggctagccaccccggaggaagctgctgctgcgttggttcggcgccgatcgggggcattgccggctgctagggatgaaggcgacaatgatatgaacactggtagcacgcaataccctgaaggttggtactcagacgatgacgacgggcagctctcatggttcaacgctggggtcagagttggcgtaggcatcggcctgggagtctgtgttggtgtaggcataggcgtcgggctcctcctgcgctcctaccaagcaacaaccagaagcttgaagaggcggttcttctgacagttgcagctggtgtagctaccaatgatgaccagagcagagttctgcctcacatacttgtatagttcatgtgtttgttgtgcaggagttttgttttgtttttaggggaaagtgtagatgctgtgttaatgtggttgtgtacatggctctcgccgtttcttgtatggcatggcatgcatgtaaactgtgaagttggtcctcggacatgtgaaggaaatggtttctagttttgagaa

SEQ ID NO: 97720 - DNA, 2411 bp, Zea Mays
tcagcgaaatcgcgcgagacgaaagcgggaagctcttatctttcccaccaaatccaagcccatttgaggggccagccactccccgtcggatgccgccgccgccatgaccgtcacggccgccgcatggccggtatgcaccatctgctacgaggacctccgcccgctctccgaccagcacctccactgcctccccgcctgcggccacgtcttccacgccctctgcctggagcaatggctggagtactgccctgggggcaagaagaagcgcacctgccccgtctgcaagcagccctgcggcgccgcgcacccgccgacccgcctctacttcagctccaccggcacgtgcccgatccaggcctgcccctccccgggaagcgcctctgggggcgcggacccggaggcgctcgccgccgaggtcgcccggttggagcagaaggcggcgtcgctcggcaaggtggtcgaggagcagcgccagagcatcaacgatctcaagtccgaggctgcctggttgagggagcaggcggaggcgggagactttatgctgcaagccgcgaagaaggacaaagaatctgtccagatacttctgaatgcgaaaacagaggagttgtcgaggaagacatcagagtgcgggaggttgcaggagaagagccttgcattagccaaagagcttgcggcgctgaagctgtccgcagacatgaaccttcaggaggaagaaatcatgaagtttgcttcacttggtaaccagggaaacctgcagaatgctgttgatgttttgaagagatcacttgctattcggaacaagagctacaaggaattgatggtccagtgtaatgttttgggaagatcagagtctcgcatgcagcagaagcttgaaaaggccaaagaaattttaaagaagttaaaggcaagggtacaggaacttgagaaggaattagaagataaagaaaatggtctgttaagggacttgaggtcttcaaagaaatttaaagcagaccatataaaatctgggaatgtcacagctaatagtgctttcactagttcaagtcctggatatgaaaatcaaacaaacaagctcgatgaggtgatgcaagatccgtgcaacgacaagactcactttgaccggttaaaatctgaagctgggagtgttctgaatgcccaagacaacctggacaacaaggatgtagatgtgatagacctagaagccaatgattctgtttttggagatgaacagaaggctcagttttccgccaagccattcgggaccgatgatagcacaccgaattccgagaacaagtctagcctttgccaaaatgatgaccgacattccgtggcatctgaatgcacaaccgcacacgcagcaaatggaggacccttcctcaaacacagagaagcaactgtaaaatcaacctttatggcgaacattagggccaaactgcatattcctcgggagagtccttccgtgagaactaacgcgacaagttcaacgctggagagtgaaacattgacaattgatggcatctccaaacaagcaacgagattggcatctggcactggacctcagcagatccacaacttcaactctttttctgatgatttccaagcgccaggaattcctggcacggatggagcaaggagaagcattggcaaatggtgcaagggcccagcagatcccagttctgcgagtgggagcagaggcaacctgatcgccgtgggaccggatggccgaggaggcaaggtcaagatcctgagggaccttggccgaccccaggatagcaagtcccaagcgctgtggcccaaggcgcagaaggttgcaggcagaggtggccagtcccagatccatcagttctttggcaagagatgatcctgctactgaatgaatatgttgtgccgcatggagcctggttagctgaacctaaatcctgcatgcagctgtgtcggtatgcaatgcgtgctgtcgaacaactgaacgtgtatctctgttgtgcttgagctgatctacgtgtggatagttgtagagcacacctctggctcagcttggacatagccctggtttcatcacatggcagctggatgcagcagaaaagggaaacaagtttgttgaagagtctgatggtaggttctgggaggtggtgtgggcttgggagagcctacctacactacacgtcagctgtgttggatctaaccatccaatcataacaggacaccgggcatgtatggcgcttctagtttgtttgtttgtgaagtagtgcaagtgttgagcttctcgagtccctgaaaaggatgtttagtggacagctacaccagctcccgtctttttcttcaaagattttagctgccataactgatgtacttgttttgtatagtcatcattttacatttaaatatagacataaaaatcaagagttaaaacg

SEQ ID NO: 97721 - DNA, 2690 bp, Zea Mays
agttcctcttctgtgtcttccccagtccccactccaccccgccgcagggctggaatggtctgtcgccttgtcgcgtccgtgatccgtcccttggcctctcgcagcggacagcggccctccgccccctccaaatagcagcgaaacccctcgcgtttaaactattccctgatccaacccctcctcaaactctgacgacgcctccttccgtgcccgtccgtcctctataagggcgccgccgaggagagagaacgatgacttcaggttcttcccccgatcttccccgctcagcttcgcttaattgcatttaagcccctttggcactcattgccgtcccctcggctccatttcttggaggtgaccgcagctctccggcggaaggcggcgcagatggcttccgcggcgacacagtgcttcagctactcctcgttgccggccacgtgggctctgcggcagcggggcggcggtgccagcgtgctccggctctcttcccggcggaccttctcggtctccgcggcggccgggttcgacaaccagaaccgcgagtatgtgatcgtcgggggagggaacgctgcgggttacgccgccaggacgttcgtcgagcatggcatggctgacggccgcctttgcatcgtctccaaggagccagttccaccatacgagcggccagccttgaccaaaggctatctttttcctccggacaagaaaccggctcgcctacctggtttccatacatgcgttggatctggtggacagcgacagactgctgaatggtacaaggagaatggtatagaggtgctgtatgaggatccagttgtagcatttgatggcaaaacgcaaaccttaaagacttcatcggggaaagttctgaaatacggctcacttattatttctactggatgtgaagcatcgagattacctgagaaaattggagggaaattacctggagttcactacatacgggatgttgctgatgctgatgctctagtatcctcattgggaagtgcaaagaaggtggtggttattggtgggggctatattggcatggaggtagctgcagcagcttgtggctggaatcttgacacaactattatattcccagaggaccacattatgccaagattatttacaccctcgcttgctaagaagtatgaggaactgtatcagcaaaatggtgtcaaattcataaagggagctcttatcgaaaaacttggagctggctctgatggaagggtgtcttctgcagtacttaaggatggatctgtagttgaagctgatacagttatgctatttatttccttctaatggttcatgcagtagtactatacaactgaaattattacttttactgccagataaatttaaatatcatattcattttttgatccacttctctgtgagaaccaatgttcttcacttcttcatagatacaaaatcttcaaccttctgtagttacttatagactcaatttgatagatttgttcactcgatattcaatacaagggtagttgatatatttactcattgtctcattcacttaagcccataaagtaaaaaagaagacaaaaagtatttgatattcttgttgttttaacaagatgaaaggacaggcctgacgcagtggtgagaagccttttcactgagccaaaggtcctaggttcgatgcagcctctctgcattggcttgcctcggttataccttccttagaccccactcatgtgggagctgccaacactgggtttatcatgtcctcttgttttaacaagattaagtgcaggtaattgttggtataggagcaaaaccagttgtcagcccgtttgaagctgttggagttaaccctaaagttggtggaatagaggttgattccttgttcagaactagtgtacctggcatctttgcaattggagatgtagcagcgttccccctgaagatgtacaatagaattgctcgagtggaacatgtggatcatgctcggaagtctgcgcaccactgtgtagagacgctcctaacatcccagacaaaagcgtatgactaccttccatacttctactcgagggtttttgagtacgagggaagttcgaggaaagtctggtggcagttttatggcgacaatgtcggcgaagcagtcgaagtagggaactttgatccaaaggttgcgactttctggatcgactctgatagccggctgaagggtgttttcctcgagagtggaacctcagaggaattctcgcttcttccgcagctcgccaaatctcagcctgttgttgacaagtcaaagctccaggccgcgacttctgttgaagatgcattagagattgcaagaagctcactccggtccagtgccatggtttagctctcagaatctagtactttcttgaacccgaggctgtgcgctgctcgagcggttcatagcgtcgagaccacgtcagcaataacgcacaattacatagaatctattcccactggggttgtaacattcttcagtgcacctgcgtcggctatttccagcttgaaataaacctggttgccctttgaggggttgatgaggatgatagattgaagcctttatgctacttttttcttgatggtcttctgatcactcatgcattcatgtttactgctcgacatatagttcgtttaacagtccctcttttccgaagttactgtaagacgtgttttcccctatattcatt

SEQ ID NO: 97722 - DNA, 2091 bp, Zea Mays
agttcctcttctgtgtcttccccagtccccactccaccccgccgcagggctggaatggtctgtcgccttgtcgcgtccgtgatccgtcccttggcctctcgcagcggacagcggccctccgccccctccaaatagcagcgaaacccctcgcgtttaaactattccctgatccaacccctcctcaaactctgacgacgcctccttccgtgcccgtccgtcctctataagggcgccgccgaggagagagaacgatgacttcagctctccggcggaaggcggcgcagatggcttccgcggcgacacagtgcttcagctactcctcgttgccggccacgtgggctctgcggcagcggggcggcggtgccagcgtgctccggctctcttcccggcggaccttctcggtctccgcggcggccgggttcgacaaccagaaccgcgagtatgtgatcgtcgggggagggaacgctgcgggttacgccgccaggacgttcgtcgagcatggcatggctgacggccgcctttgcatcgtctccaaggagccagttccaccatacgagcggccagccttgaccaaaggctatctttttcctccggacaagaaaccggctcgcctacctggtttccatacatgcgttggatctggtggacagcgacagactgctgaatggtacaaggagaatggtatagaggtgctgtatgaggatccagttgtagcatttgatggcaaaacgcaaaccttaaagacttcatcggggaaagttctgaaatacggctcacttattatttctactggatgtgaagcatcgagattacctgagaaaattggagggaaattacctggagttcactacatacgggatgttgctgatgctgatgctctagtatcctcattgggaagtgcaaagaaggtggtggttattggtgggggctatattggcatggaggtagctgcagcagcttgtggctggaatcttgacacaactattatattcccagaggaccacattatgccaagattatttacaccctcgcttgctaagaagtatgaggaactgtatcagcaaaatggtgtcaaattcataaagggagctcttatcgaaaaacttggagctggctctgatggaagggtgtcttctgcagtacttaaggatggatctgtagttgaagctgatacagtaattgttggtataggagcaaaaccagttgtcagcccgtttgaagctgttggagttaaccctaaagttggtggaatagaggttgattccttgttcagaactagtgtacctggcatctttgcaattggagatgtagcagcgttccccctgaagatgtacaatagaattgctcgagtggaacatgtggatcatgctcggaagtctgcgcaccactgtgtagagacgctcctaacatcccagacaaaagcgtatgactaccttccatacttctactcgagggtttttgagtacgagggaagttcgaggaaagtctggtggcagttttatggcgacaatgtcggcgaagcagtcgaagtagggaactttgatccaaaggttgcgactttctggatcgactctgatagccggctgaagggtgttttcctcgagagtggaacctcagaggaattctcgcttcttccgcagctcgccaaatctcagcctgttgttgacaagtcaaagctccaggccgcgacttctgttgaagatgcattagagattgcaagaagctcactccggtccagtgccatggtttagctctcagaatctagtactttcttgaacccgaggctgtgcgctgctcgagcggttcatagcgtcgagaccacgtcagcaataacgcacaattacatagaatctattcccactggggttgtaacattcttcagtgcacctgcgtcggctatttccagcttgaaataaacctggttgccctttgaggggttgatgaggatgatagattgaagcctttatgctacttttttcttgatggtcttctgatcactcatgcattcatgtttactgctcgacatatagttcgtttaacagtccctcttttccgaagttactgtaagacgtgttttcccctatattcatt

SEQ ID NO: 97723 - DNA, 2126 bp, Zea Mays
ggcacctactctactattgccatttttcccaccatggccgtgttcgacatgaagtccgctcccttgatgatcctagaactcctcttagttagccttggccttaccattgcgcccttcagcgccgaagaaaacaacgaccactggttcgtctactctggcttcgccaatgctagcctcaccctagacaacacagcctcgatcacaccaagcgggttgctggagctgaccaatggcacggtcatgagcatgggccatgccttctacccgactccactgcgcctccgtgactcgcccaacagcacggtgcagtccttctctgcctccttcgtgttcggcatcatctccatctacgacgacttgagcagccacggcctcgctatgttgattgcaccgagcaggacactttccgcgcttccagtgcaatacctgggcctcctaagtggctccaacgatggcaacaagagcaaccatatcttcgccgttgagcttgacacctaccagaacagtgagtttaaggacatcaacaacaaccacatcggcatcgacatcaacagcatgacctccgtgcagtccaacccggctggtttcttccatgatcaagatggaaccttcgaaaacctgacactcagtagcaaagaggcgatgcgggtgtgggtggagtacgatcgagagaatacacagattgacgtcaccatggctcctctggccatagtcaaacctaagagaccaacagtgtccactatccaaaacctctcagacgtgctcaccgacgtggcatacgtcggtttctcatcgtcaacgggcaagatccatacgcaacactatgttctcggctggagcttcgccatgaacggccctgctccgtccatcgacctgagcatgcttccaaagcttccacggcatcatcacaagagtcgacgatcctgggtgttagagacagttctgcccatagcaactgcagcattgctcttgtctcttggtgtcgttgctttcttgcttgtgcggaggcatgtcaggtacgcggagatacgggaagactgggaattggagttcggcccgcaccgattctcatacaaggacctgttccatgcgacgggtggatttgagaacaagaatcttcttggcattggaggatttgggagagtgtacaaaggggagctcccgagatcgagattgaagatagccgtgaagagggtatcgcatgactccaagcaagggatgaaggagtttatcgcggagatcgtcagcataggacgtcttcagaaccgcaatctcgtccagttgcttggctactgtcgtcgcaaaggtgagctcctactggtatatgagtacatgcccaatggaagcttggataaatacctgcataatgcaaaagagggcaactctgcgttgagttgggctcaaaggtttcggatcatcaagggaatcgcatccggcctactgtatctccatgaggagtgggagaaggtagttgttcacagagacatcaagggaagcaatgtgctcctcgacagcgagatgaatggacggttaggcgatttcggccttgcaaggttgtatgatcacggtgtcgacccacagaccacacatgtggttggcaccataggttaccttgctccgaagctcgcacgcggcggaaatgccactccccttacagatgttttctcctttggtatgtttgtccttgaggtcacctgtggacagaggcctgtcagacacgaaaatgtgcaagatagccaactcatgctggttgattgggtgctcgacaaggtgcgagaaggatcattcggtgctaccatggatgctaggcttgaagggaagtatgatatcggtgaggcatacttggcgttgaaaatagggctgttgtgttcacacccattcgccagtgaaaggcctaccatgcggcaagtcatacaatacttggatggggagattgaggctccagatttaagcttcgaggtgctagcctctatgcaaagtgaagggatcgatccatacctcatttcatatcccttgtcaacagaatgcttcagcacaacgtcaaacgtcgtctctggaggaagatgaaaatgtgttgtcatgaatggatacaaatatgtttattgcataccctaagtaacttattt

SEQ ID NO: 97724 - DNA, 2458 bp, Zea Mays
caaattgtaagatgttttgtcttttctagttacatagcttttgctatacacttggatatgcattgtatctaaaagaacgtcttacaatttagaacagatggagtacttgttaggctgttacttaaaatcaattctaagatgtggtagcaaataaacctaacagtataagtgtctatatcacctattaaaatttagacaataacagatgttgaaaatccagaaactagacttggtatgaagcagcaagttaaaatctaatataaactgaaccactgagtgcaagcggaaaccagatagcattggttgcccacataacacttactgcttgctatccttgttgatttgcagcttgcaagacacacacatgcttgtaatggcaatgaagcatacgtccttccttccgtacctgctcctcctcacaaccttggcatcctgcgatgatcaatttctgttatctggcttcacccaatccagcttaaaccttgatggttctgccatcgtcacaaatgatggcctccttgatctgaccaatagcactgcaattaccaacggtcacgcattctaccccagccctttgcacttccgcaaatcacctgatggtaaagttgaatccttctcagtcaatgttgttttcagcatcttcatcacatacccagacttgagtgctgacggcatggccttcttcatcgcacctaccaagaatttctctgatgcacgggcaggcaagtactttggcttgctcaacgaaaacaacaatggaaacacaagaaaccacatcttcatggtcgagcttgatacctacaaaaatgctgaggtacaagatatcaacgacaaccacgttggaatcaacatcaacggtgtattctccttcaaatccaatacatctggcttctatgaagatagtggtgccttccgggagctgacactgaatggaaacaagggaacacaactgtggatcgactatgacaagagtactatgcagatcaatgtgaccctggctccgatcaacgtgcacaaaccatccaggccactgctgtctacaacctatgatctctcaactgtaatctccacctcaacttcatacattggattcgcatccggagcttctcccgtgaactcccgtcattatgtgatgggctggagctttggcatgaataaaccagccccaccccttgacgtctccaagcttcccaagttgcctttccatggccccaaggcccagtccaagctcttggcaattgtcctgccgatagccactgcaacgttgatcctctccataggcactattgtcactctggttgtccgaaggcggctgaagtatgctgaggtgcgtgaggattgggagggtgagtttggtccacatcggttttcatacaaggatttgtaccatgctacaggggggtttaagaataagcacctgcttggagaaggagggtttgggaaagtatacaaaggagtccttccattatctaatgtagaggttgctgtgaagaggatgtctcatgagtcaagacaaggaatgaaagagtttgtcactgaggttgttagcatcggtcgactccgccatcgcaaccttgtccagctacttggctactgcaggagaaaaggtgagctgtttttggtttataactacatgcccaatggtagccttgataaatatctatactgtgaagagcacggtgctattttgaactgggaacagaggtttcgagtcatcagaaacatcgctaccgtcttgctgtatctccatgagaagtgggagaagatagtgatccacagagacatcaaggcaagcaacgtactcctagatggtgaaatgaacggccgcctcggcgacttcggccttgcaaggttgtatgatcacggcactgacccacaaacaacacatatggttggaacaaagggatacctagcacccgagcttctgcgcacagggaaggcgtcccctcatacagatgtctttgccttcggcatgttccttcttgaggttgcgtgtgggcaaagacctgtcaagaaaaatgcagaggggactgaatttttcttggtcgattgggtgctcgagcactggaataatggtgttattacaaagacactggattcaaggcttcagggtgactacaacattgatgaggcccatcttgtgttgaagctaggactcttgtgctcgcacccacttcctagttcaaggcctaggatgcgacaagttatgcaatacctcgatggcgatacgccactacccgagctaaggccaacgcaactgagctcgaacatggttgccttgatgaaaaacagtggactcaactcatctgtcgtgtcatatccgcaaatatcgacgagcttctgcacaatatctagcctctcgggaggaagatgatatctgccatttttccgtacttcattacttagctgtttagtatgtgacgcgtttaattttattgtataagtctttgtattttta

SEQ ID NO: 97725 - DNA, 1372 bp, Zea Mays
attcgtttttgattggcgtcgcagcaaccacctgtcaagtgtcaacactccagtccactacaatcatcgctgtaggagatggaggcggcggcggcggcggtgaggtatgggatagtcggggtggggatgatgggccgggagcacctccacaacctcgcccacctcgccacagaggtcgagcgggagcagtccgtccgggtgcgggtcaccggcctcgccgacccccaccaggagtcactccgccttggcctccagctcgccgctgagctcggcctcccgcctccccagatctttccaggtcaccgcgagctgctggacagcgggctctgtgacgccatcatcgtatcgtccccaaacatgacccactacgagatactcatggacatcatccgccatcgtgaaccgcagcacatccttgtcgagaagcccctgtgcaccactgtgcaggactgcaagaaggtcattgaagctgctaaacagagaccagagatagttgtgcaagttggattagaatacaggtacaacttgcaggtaaacaactggaatagattcaattgtaacagtgggggaactctagtagagaagtgctgccacttctttgatctgatgatattgtttgcggctgcaaatccagttcgtgtgatggcttcaggagccattgatgttaaccataagaatgaagtgtatgatggacaggtaccagatattattgataatgcatatgtgatagtagaatttgataatggctcccgtggcatgcttgatctctgcatgtttgctgaaggaagtagaaacgagcaagaaatttgtgtggttggtgacattgggaagggcgaaacttttgttccagagagcattgtcaggtttggaaagagaacagaaggcagagatggagttgtaacaataatggcggaagatgaacggatcaagtatcaaggtcttcatcatggatccagctacttggagcacctcaatttcttgtctgctataagggctcaaggtgcatccggaccatctgtgaacttgagtgacggcctactatctgttgccgtcggtgtggctgggcaattatcaatcgagcagggccggtttgtaaccatggaagaggtcttaggtttgtagcctggtgataattcaggcatcctaatgtactgtaaaaccttttgtgtattattaggtatatgttcttaataatgctgcggactgacgagtttatgcaaagttaggataacattataacatgcatttcaaatagaggaatatgatgataatcttcaagcaaatgtcatggagtagcagggttatgttatctgcaagtgatatcttggacctcttggttgtgattaatggaccaatatctagaacatgtcat

SEQ ID NO: 97726 - DNA, 1487 bp, Zea Mays
attcgtttttgattggcgtcgcagcaaccacctgtcaagtgtcaacactccagtccactacaatcatcgctgtaggagatggaggcggcggcggcggcggtgaggtatgggatagtcggggtggggatgatgggccgggagcacctccacaacctcgcccacctcgccacagaggtcgagcgggagcagtccgtccgggtgcgggtcaccggcctcgccgacccccaccaggagtcactccgccttggcctccagctcgccgctgagctcggcctcccgcctccccagatctttccaggtcaccgcgagctgctggacagcgggctctgtgacgccatcatcgtatcgtccccaaacatgacccactacgagatactcatggacatcatccgccatcgtgaaccgcagcacatccttgtcgagaagcccctgtgcaccactgtgcaggactgcaagaaggtcattgaagctgctaaacagagaccagagatagttgtgcaagttggattagaatacaggtatatgccacccgttgctaagctgatagacatcgttaagagcggtacactaggacaagtcagaatggtggcaatacgcgaacaccgttttcctttccttgttaaggtaaacaactggaatagattcaattgtaacagtgggggaactctagtagagaagtgctgccacttctttgatctgatgatattgtttgcggctgcaaatccagttcgtgtgatggcttcaggagccattgatgttaaccataagaatgaagtgtatgatggacaggtaccagatattattgataatgcatatgtgatagtagaatttgataatggctcccgtggcatgcttgatctctgcatgtttgctgaaggaagtagaaacgagcaagaaatttgtgtggttggtgacattgggaagggcgaaacttttgttccagagagcattgtcaggtttggaaagagaacagaaggcagagatggagttgtaacaataatggcggaagatgaacggatcaagtatcaaggtcttcatcatggatccagctacttggagcacctcaatttcttgtctgctataagggctcaaggtgcatccggaccatctgtgaacttgagtgacggcctactatctgttgccgtcggtgtggctgggcaattatcaatcgagcagggccggtttgtaaccatggaagaggtcttaggtttgtagcctggtgataattcaggcatcctaatgtactgtaaaaccttttgtgtattattaggtatatgttcttaataatgctgcggactgacgagtttatgcaaagttaggataacattataacatgcatttcaaatagaggaatatgatgataatcttcaagcaaatgtcatggagtagcagggttatgttatctgcaagtgatatcttggacctcttggttgtgattaatggaccaatatctagaacatgtcatattatttcttgatttttctctt

SEQ ID NO: 97727 - DNA, 1477 bp, Zea Mays
attcgtttttgattggcgtcgcagcaaccacctgtcaagtgtcaacactccagtccactacaatcatcgctgtaggagatggaggcggcggcggcggcggtgaggtatgggatagtcggggtggggatgatgggccgggagcacctccacaacctcgcccacctcgccacagaggtcgagcgggagcagtccgtccgggtgcgggtcaccggcctcgccgacccccaccaggagtcactccgccttggcctccagctcgccgctgagctcggcctcccgcctccccaggtcaccgcgagctgctggacagcgggctctgtgacgccatcatcgtatcgtccccaaacatgacccactacgagatactcatggacatcatccgccatcgtgaaccgcagcacatccttgtcgagaagcccctgtgcaccactgtgcaggactgcaagaaggtcattgaagctgctaaacagagaccagagatagttgtgcaagttggattagaatacaggtatatgccacccgttgctaagctgatagacatcgttaagagcggtacactaggacaagtcagaatggtggcaatacgcgaacaccgttttcctttccttgttaaggtaaacaactggaatagattcaattgtaacagtgggggaactctagtagagaagtgctgccacttctttgatctgatgatattgtttgcggctgcaaatccagttcgtgtgatggcttcaggagccattgatgttaaccataagaatgaagtgtatgatggacaggtaccagatattattgataatgcatatgtgatagtagaatttgataatggctcccgtggcatgcttgatctctgcatgtttgctgaaggaagtagaaacgagcaagaaatttgtgtggttggtgacattgggaagggcgaaacttttgttccagagagcattgtcaggtttggaaagagaacagaaggcagagatggagttgtaacaataatggcggaagatgaacggatcaagtatcaaggtcttcatcatggatccagctacttggagcacctcaatttcttgtctgctataagggctcaaggtgcatccggaccatctgtgaacttgagtgacggcctactatctgttgccgtcggtgtggctgggcaattatcaatcgagcagggccggtttgtaaccatggaagaggtcttaggtttgtagcctggtgataattcaggcatcctaatgtactgtaaaaccttttgtgtattattaggtatatgttcttaataatgctgcggactgacgagtttatgcaaagttaggataacattataacatgcatttcaaatagaggaatatgatgataatcttcaagcaaatgtcatggagtagcagggttatgttatctgcaagtgatatcttggacctcttggttgtgattaatggaccaatatctagaacatgtcatattatttcttgatttttctctt

SEQ ID NO: 97728 - DNA, 776 bp, Zea Mays
taatttgtactaagtatgaactgagtccccattgtgctactgttcacagtcgaccacaggttcctcttaccttgagtgttttctcagatgaaagaaaatggtctattcttttatttcttagttgaatctggtttcctgggttttgagtctctgctatcctgtctctgtttaatattcagttctggtgtacgtgatacattttctttgaaacagggcgaaacttttgttccagagagcattgtcaggtttggaaagagaacagaaggcagagatggagttgtaacaataatggcggaagatgaacggatcaagtatcaaggtcttcatcatggatccagctacttggagcacctcaatttcttgtctgctataagggctcaaggtgcatccggaccatctgtgaacttgagtgacggcctactatctgttgccgtcggtgtggctgggcaattatcaatcgagcagggccggtttgtaaccatggaagaggtcttaggtttgtagcctggtgataattcaggcatcctaatgtactgtaaaaccttttgtgtattattaggtatatgttcttaataatgctgcggactgacgagtttatgcaaagttaggataacattataacatgcatttcaaatagaggaatatgatgataatcttcaagcaaatgtcatggagtagcagggttatgttatctgcaagtgatatcttggacctcttggttgtgattaatggaccaatatctagaacatgtcatattatttcttgatttttctctt

SEQ ID NO: 97729 - DNA, 2674 bp, Zea Mays
ccaaaaccaaacccgaggctgcgcctgcgctgcacagcagttccacacctaaacccctcgccgccggcgcctccgaatccggcgatgtcgtcgtcgccgcctcgccggccgcagcgccgcgcggcgtcgtcgcggccggcgtcgtacgatgagtccctcctcgacgccgagctgcaggcctacctcggcgacgccgcctcgcgccgcgtgcggcggctgcgccggctctcggcggaggagcggcagcgggagacggagacggaggcgctcatcgcgctctccctgggattccccatagacgagctgctccccgaggagcggcccctcctgcccgcccacatcgccgacgcgcccaacgactacatcgtcgtccgcaaccacatcctcgcctcctggcgcgcagacccgggggcgccgctgccgctcgcgcgcgtcctcgagacggtcagcgccacctacgaccgcctcgtcgccgccgcccatgggtacctcgcccgcgagggccacatcaacttcggcgtctccgccgccttccctgccgcgccgcccccggacgccgccagccagggcgcggcatccgtcctcgtcgtcggcgcggggctcgcgggtcttgccgccgcgcgccagctcgtccgcttcggtcttcgagtgctcgtcctcgagggccgcgcgcgccccggtggccgcgtctacacggcccggctaggtgaggacaaggccgccgttgagctcggcggcagcgttatcaccggtatccacgccaacccgctcggcgtgctcgcgcggcagcttgcccttccgctgcataaggtgcgtgaccgctgcccgctctactacccggacggccggaccgtggagaccaggctggataggagcatcgatctggtgttcaacacgcttctcgaccacgccaccaggctccgggagtctctcaatgaggctgcggagaggatctcgctgggggaagctatagacaagctcaggaggctctaccatgtggccaggtcggatgacgagaggatgttattggattggcattttgcaaatctggaattctccaatgccggttgcctatgggagctttcgctcgcgcactgggatcaggacgatccttatgagatggggggagaccattgtttcttagccggagggaattcccggctcatacatgcattgtgtgatggggtgccggtcttgtatgagaagaatgtgacacggattgagcatggagtggacggggttagtgtcacagtggaagaagggcagatttttcaggctgatatggtgctatgtaccgtgccccttggggtgctcaagagtgggagcatagtatttgacccagagttgcctgaagagaagcttggggcaataaagaggttggggtttgggttgttgaataaggtagccatggtgtttcccagtgtgttttgggatgaagatattgacacatttgggtgtttgaataaggagagcagcaagcgtggagagttctttctcttctacagctaccacactgtctctggtggtgcggttcttgtcgcacttgttgcaggagaggctgctttagagtttgaaaaggttgatcctgttgttgcacttcatcgagtacttggcattctaaaaggtatctatggcccaaaaggcgttactgttcctgatccggttcaatcagtttgcacgagatggggcagtgatcctttttgctcaggttcatactcgcacatcagagttgggtcttccggtgctgactatgacattctttccgagagtgtgaatgaccgactcttcttcgctggagaagccacgaaccgcgcgtaccctgcaaccatgcacggggccctattgagcgggttaagagaagcttccaaaatctatcgtgcctcagatagcttagtgaattatgaccagaagaagaattcactgccaaagagcctcaaaccaccagatggtgcccttctagatctcttcttggagccggacctagcattcgggagattctcgttcgtgttctcctcactgacacccgatgatccagcggctccagggttacttcgggtttcgctcgacaagcgtttccttctgcagcccaattataattcagagctaaagggcgaccaaaaggatcacagccacagccacgcatctggggccttccatctgtacgccgctgtctctcgggagcaggcagatcggctacgaaggtcaagcgaagatgacagaactaggttaggagtattatgcaaggatcgtactgtaaagctaatgggttacgatagtacttgcgacgtaggtagcgatctgatctcgagcatcttgggtgcgcggaaagccaggaaactgctgcagcacccaaagaactccaagatcccgcgttgatgtgtacccggttcctctctttttttcttctttgtagaacagaatgcattcttttgttatgtacacaaggtacgaagggccggccgccggctggtggagctcagattttgctgtggcgtgtacaggctacgaactgtgacgcttcggcaggaacgtaactgagatcctccatgttctggtcctcacttgtaaaaattgccgttcatgtgacttcagacttcagttgattagatattgttctgtggatttaactgcaggcaccattgtgatcttgctctatctatctttcgcctgagta

SEQ ID NO: 97730 - DNA, 336 bp, Zea Mays
atggagccggcaatggagttcagtgttatagcatccaagagccgacaatggagtgaaggaaaaccacaatgtgataccaaagccctattcttcctcgcctcctctttctgcttttcggcctcctccttctcaaacttctcattttccctcttctacaagaagtcctgcaccgacaggtatatcacctgcattgcaaagagaatcgtgagccagccaaaagcacagtctggcgtctggagagaccagcatcgaccttccaatgccacaacagttcgcaagcagcaagtcgcaacccagctaatgattttcatggaaggacacgcaccccgagggtga

SEQ ID NO: 97731 - DNA, 552 bp, Zea Mays
atggcaatggcctacgtcgctgcagcagtgttggcagcagtgactctcaccgcctcgttcgccggcggcgaggcctgcaacttcgtcgcctccatgacatggaccgcggcgtgccagcagacgggcaggtgggagaatctgtgccagcagacgctccagaccgcgccggccaccgcggaggtgaccgtgtacgcgctcgtcgcgacgaggctggccaagctcaggtacgagaacaccttgggggaggtggacacgatgctgtggcccaggaacgcccccgccgacgcgcgggcggcgctggacaactgcaagtacaagtacagcgtggcgctgggccggatggacgccgtctccgacgagatattcgcctgcgacttctcgcacgccaggcaggagtacgtcgacgccgaggtcgccgtccgctcctgccaggatgggctgctgcggctgccgaaccagtaccatagctggccgctgttcgccaaggtctctgcggattatgatttgaccatggtcgcgtatctactaggcgctatctttcttggcaggtag

SEQ ID NO: 97732 - DNA, 2279 bp, Zea Mays
ccgttaaacgcccatctcgccacgccgcttcccatgcccggtcgtccgtctcctctcgttcctcctccatccaaccctgctgcctatataaaccacacccaacccatgacaccacgccacacaacacacgttacacaccttccagagcttccgttccaagcgagctagtcctcctcgccatcattgcaactagctagctctgcttcttcgtccttagctctcgcacataatctttgaagaacgaacaccaacccaccaacgatcacacactactcaatccatcgactgacatgggcagcctcgacaccacccctaccgccgccttcgccgacgtcgccggcggtggcttcgagccgctcaacgccgacgacgtgcgctcctacctgcacaagtccgtcgacttcatctacgactactacaagtccgtggagtctctgcccgtgctgccgggcgtggagccgggctacctgcgccgcctgctgcagtccgtgccgcccacctcctccgcgcccttcgacattgccctaaaggaggtccgcgacgccgtcgtgcccgggatgacccactgggccagccccaacttcttcgccttcttcccgtccaccaacagcgccgccgccatcgcgggcgagctcatcgcctccgccatgaacaccgtcggcttcacctggcaggccagccccgcctccaccgagatggaggtgctcgcgctcgactggctcgcgcagctcctgcgcctgccgcccaccttcatgaaccgcaccgccgctgcagggcgcgggaccggcggtggcggcgtcatcctcggcaccaccagcgaggccatgctcgtcacgcttgtctccgcgcgcgacgccgccctgcggagggcaggctccgtcggggtcgctgggatcaccaggctcgccgtctacgccgccgaccagacgcactccaccttcttcaaggcgtgccgcctcgccggcttcgacccggccaacatccgctccatccccaccggcccggagacggactacgccctcgacccggcgaggctgctcgaggtcatgcaggccgacgtggacgccggcctcgtgcccacctacgtgtgcgccacggtcggcaccacgtcgtccaacgcggtcgacccggtcggagccattgccgatgtcgccgccgtgttcaacgcctgggtccacatcgacgccgcctacgccggcagcgcgtgcatctgcccggagttccggcaccacctggacggcgtggagcgcgtggactccatcagcatgagcccgcacaagtggctcatgacgtgcctggattgcacgtgcttgtgggtgcgggacacgcaccggctcaccgattctctcgaaaccaacccggagtacctcaagaacgacgccagcgagtccggcaccgtcaccgacctcaaggacatgcaggtcggcgtcggccgccgcttccgcgggctcaagctctggatggtcatgcgcacctacggctccgccaagctccaggagcacatccggagcgacgtcgccatggccaagatgttcgaggacgccgtgcgtgccgaccaccgcttcgaggtcgtggtgccgaggaacttcgcgctcgtgtgcttcaggatcaggccacagggcaccgacttgacggaggaggacgccgacgtggtcaaccgtgagctaatggagcgcctgaacaggacgggcaaggcgtacctggcgcacacggcgatcggcggcaagttcgtgctgcggttcgcggtggggtcgtcgctgcaggaagagaggcacgtgcgaagcgcgtgggagctcatcaagaagacgaccaccgagatcttcgaggaagagacgatgtagagagtattactatagattatcgtcattcttatttattgattgatgcagctggactaataaatatggttatgcatgccaatcgaaaggtgacgtccaataaagcctttcgtgatgcatatatattcatgcaagaaatttatgtacgttggacctggagtatataacaatgtattatttatgggctataatatatgaacttggctagcttctaatgtctttgtcctgcgtctatgatgaataccatgaactagtggccactatcttgaagaacgcagggtgagaacatgttcaattgttcattttattttgggagaaagagtgttcttgtttttttttccttcttggatgtgactatgacatgtgcgtaagagtaaagctaataaacttgactctagtggtttcaagtctttctctcactcgaacttctccgtgaaatat

SEQ ID NO: 97733 - DNA, 366 bp, Zea Mays
atggcgttccggaaggacgagcatggcgtggtgaacgctgtgccgcttctggacctggctacatctggtcttggtgcagaacaagagtatggaaaatacaagcatattgtggaactctcgaaagcaatatttggtctaagagtgaattatgtacaatgggaaccagagctccaaaaatcatgggacgataatcaggttctagaagggtatctgaaaggaacactggaggttcagaagaacatggagaaaaatgagagtattgcgatgatacatgtttcaatttttagcaggaacactttcttgacttccttcgtcaattattatgcttcaatcgaggccaagtgtctccgtcttacgtctgcttga

SEQ ID NO: 97734 - DNA, 203 bp, Zea Mays
gcaagtggtaaagctacgttagttccgtctatactcggaccgtttgaacgcaacaaaaggaatcagagagcccatcaagtctccagccccccacaccacagtccacagcgatcaacaaatgttattttaaacccccctactattgccacgcaaagcacgcatgaaagagaagaacacacgtcacggcacaatagcaaaacaac

SEQ ID NO: 97735 - DNA, 1190 bp, Zea Mays
cttttaaagcgcgcacggacacgggacactccgtctctctgaccttatccccttgcggcaaaaccttgcgcgcaacaatggccgcctccctcccgaccaccgccgcgcgcctcgcggccccggccttcgcctaccggtcgcccaacgctccctccgccaccgccctcccgcgtgccgccgccttccctgcaatcgccgtcgcggcggcgcccctgcgcccgcgccgcgcgccgaggccggtggcggcccgggccgggggcgaggagagggagacgatactgctccccgggtgcgactacaaccactggctgatcgtcatggagttccccaaggaccccgcgcccacccgcgagcagatgatcgacacctacctcaacacactcgccaccgtcctcggcagcatggaggaagccaagaagaacatgtacgccttcagcacgaccacctacaccgggttccagtgcaccgtggacgaggagacgtcggagaagttcaagggtctgcctggggtgctgtgggtgctccctgattcctacatcgacgtgaagaacaaggactacggaggtgagccgcaacagcgcccctgttccgttcggtgtctctgatgtcttcttcttcttcatgtcttcttcttctttgtctgtcgtgtccaggtgacaagtacgtgaacggcgagataatcccctgcacgtacccgacgtaccagccgaaggagcggaggacgtccaagtacgagagcaggcggtacgagaggcggagagatgggccaccggcggccagcaggaaaccgaggcagcaggcaccagctcagactcagaccgagtccgcgtcttcgtgacgagctctgcaggcattttgtccacgtacctacctacctagaagtagaacaagagaggaggacgcctaaaattctgtcgccttgggcaccgcgtactggactggacaggcgggtcgggatccatcatccatcgtcagccagaaaaattgtcgctgtccaagcagcctgggcagcttgtgtgtgtgtgtgctgataagcctgatatcttgagctagctgtggcagaaactgaaaaccctactcttccccccgactccttagtgagctgtgtgatgccgactggtgtagagctgtatcgctgattgcgtgaaaccgaaatgctgtggctttatttagactgaagttggcacttc

SEQ ID NO: 97736 - DNA, 1323 bp, Zea Mays
cttttaaagcgcgcacggacacgggacactccgtctctctgaccttatccccttgcggcaaaaccttgcgcgcaacaatggccgcctccctcccgaccaccgccgcgcgcctcgcggccccggccttcgcctaccggtcgcccaacgctccctccgccaccgccctcccgcgtgccgccgccttccctgcaatcgccgtcgcggcggcgcccctgcgcccgcgccgcgcgccgaggccggtggcggcccgggccgggggcgaggagagggagacgatactgctccccgggtgcgactacaaccactggctgatcgtcatggagttccccaaggaccccgcgcccacccgcgagcagatgatcgacacctacctcaacacactcgccaccgtcctcggcagcatggaggaagccaagaagaacatgtacgccttcagcacgaccacctacaccgggttccagtgcaccgtggacgaggagacgtcggagaagttcaagggtctgcctggggtgctgtgggtgctccctgattcctacatcgacgtgaagaacaaggactacggaggtgacaagtacgtgaacggcgagataatcccctgcacgtacccgacgtaccagccgaaggagcggaggacgtccaagtacgagagcaggcggtacgagaggcggagagatgggccaccggcggccagcaggaaaccgaggcagcaggcaccagctcagactcagaccgagtccgcgtcttcgtgacgagctctgcaggcattttgtccacgtacctacctacctagaagtagaacaagagaggaggacgcctaaaattctgtcgccttgggcaccgcgtactggactggacaggcgggtcgggatccatcatccatcgtcagccagaaaaattgtcgctgtccaagcagcctgggcagcttgtgtgtgtgtgtgctgataagcctgatatcttgagctagctgtggcagaaactgaaaaccctactcttccccccgactccttagtgagctgtgtgatgccgactggtgtagagctgtatcgctgattgcgtgaaaccgaaatgctgtggctttatttagactgaagttggcacttcgagccatcggatcactccaagcactttgttcgttcatcgcgtatttggctgtgctaggctcgtttcatgtctaatgttattttttttaatttaaccaactaaccttggttatgttgtaaaacgttatggtgtaacagagttagccggtaactaaacatactcagtccacttcagtggcggaagacaaaataataatttggtatagctaaaacaagaaaaaaa

SEQ ID NO: 97737 - DNA, 885 bp, Zea Mays
ctctgaccttatccccttgcggcaaaaccttgcgcgcaacaatggccgcctccctcccgaccaccgccgcgcgcctcgcggccccggccttcgcctacatcgacgtgaagaacaaggactacggaggtgacaagtacgtgaacggcgagataatcccctgcacgtacccgacgtaccagccgaaggagcggaggacgtccaagtacgagagcaggcggtacgagaggcggagagatgggccaccggcggccagcaggaaaccgaggcagcaggcaccagctcagactcagaccgagtccgcgtcttcgtgacgagctctgcaggcattttgtccacgtacctacctacctagaagtagaacaagagaggaggacgcctaaaattctgtcgccttgggcaccgcgtactggactggacaggcgggtcgggatccatcatccatcgtcagccagaaaaattgtcgctgtccaagcagcctgggcagcttgtgtgtgtgtgtgctgataagcctgatatcttgagctagctgtggcagaaactgaaaaccctactcttccccccgactccttagtgagctgtgtgatgccgactggtgtagagctgtatcgctgattgcgtgaaaccgaaatgctgtggctttatttagactgaagttggcacttcgagccatcggatcactccaagcactttgttcgttcatcgcgtatttggctgtgctaggctcgtttcatgtctaatgttattttttttaatttaaccaactaaccttggttatgttgtaaaacgttatggtgtaacagagttagccggtaactaaacatactcagtccacttcagtggcggaagacaaaataataatttggtatagctaaaacaagaaaaaaa

SEQ ID NO: 97738 - DNA, 871 bp, Zea Mays
aaccctaccaccaccacggagtggtaaaatggtcatttaactcggagccccagaaagatcttaaaccctagaaagctcttaaaagcccccagggctagcagcggcgacgtatccctaatcccacctccagtctttgggcaccaaatttccggcggcgatggcggcggctgtggcgaggtcagggttccggcgcatgttctccgtctctgccttcgcgccgccgaaggcgcccgccgcgcgccccaaggccgacccatcccccaacctcttcgtctccggcttaagcaagcgtaccacaagtgaaggacttagagaagcctttgcggagtttggtgaagttttgcatgctcgagttgtgaccgatcgtgtcagtgggttttctaagggatttggctttgtaaggtatgctacgaccgaagaggcagccaagggaatagaaggaaaggatggaaagttccttgatggatgggttatttttgcggaatacgctaaacccagaccaccgccggaggaaacagggatgaattcgcagccccagcagtcatggggagctccatcaggttcctggggtgcacagtagatgaagtgatattgtgagagcccctccctgtcccagccctggggctcgtagcggatcgtgagggatgaatttgtgtgtggtgtgtcgcaggtgtgaatgcctttgttgtccaaatattcctacgtgttggggtggtcgcttgctcgcgtccacgtctttcacatgaattggttactgtggtagttgtagttctggatacggtaccaaaacaaaagtattgctgtcaacaatctgcaacagccgggaaaacagtcgaaaacctttgcaaataatgcctgctgccgtggaaaa

SEQ ID NO: 97739 - DNA, 1088 bp, Zea Mays
gaccgacacagcagctccgctcgtcgatcagctctcggctgaccactcaccgccagtgggtgcctgccgaccaggtctcgccaccgccgccgccgccgcggtagagaggggagggagagggagagggagaaaaaactggcccagatcgagaggtacagcacgaaaaagagaggcaagagagataggggaccggagggcggcgggccggggcccaagaccgaggggctcgtgcgcaggaagctgatgaggctcctgtcgctcgtccccttcggctgccgtgctggacccatcgacgacgcgccgccgcccgtggaccacgctgccgccgccgccgcgaggaggcgccggaggaggagggccaacagagccgcccagctgctgggggctgctgcgggtgcgccgcagcagtggcgcccctcgctcggcgacatctgcgaggagtacagcagcagcaccgacgccgtcaaggtcaggaaggcggcgtcctgggacctcgcccgggcgctgccccgcgcgcacggtggcaagcagtaccggtacttatctatctatctatttatatacctgtcagagattgtcactgtgtcatgtctctacgtatgtacgtctaatctgccgagaacgacatgatatgcatggttgtacacacacaggcaccttgagagcgcgtcgtccctgccagcgttcgcgccgacggcgttcctgttctgatcatggcgtcggcgacggcggcgactcgtcgtcatccacgaggacgacgacggcggtgaagacaataagaaccaaccaaaaccactacgcgaagcatatatacagattactgtcaacgtattgtagaaccaaggatctatgtataaatatatgtgtgcgtccatatcatcatcggaccggaataaagctagcaatctctcttcttcacgatcgagagatagcgcgcgtgcgtgtaattaagtattatagatgcatgtatgatgcatgcgtgtgtgtatctatatatcatgtgatggtttgtatatgagctagctatagctagagtcgtgtaatagtatactacaaactaagctaatacaatatccaagtttgctata

SEQ ID NO: 97740 - DNA, 974 bp, Zea Mays
gaccgacacagcagctccgctcgtcgatcagctctcggctgaccactcaccgccagtgggtgcctgccgaccaggtctcgccaccgccgccgccgccgcggtagagaggggagggagagggagagggagaaaaaactggcccagatcgagaggtacagcacgaaaaagagaggcaagagagataggggaccggagggcggcgggccggggcccaagaccgaggggctcgtgcgcaggaagctgatgaggctcctgtcgctcgtccccttcggctgccgtgctggacccatcgacgacgcgccgccgcccgtggaccacgctgccgccgccgccgcgaggaggcgccggaggaggagggccaacagagccgcccagctgctgggggctgctgcgggtgcgccgcagcagtggcgcccctcgctcggcgacatctgcgaggagtacagcagcagcaccgacgccgtcaaggtcaggaaggcggcgtcctgggacctcgcccgggcgctgccccgcgcgcacggtggcaagcagtaccggcaccttgagagcgcgtcgtccctgccagcgttcgcgccgacggcgttcctgttctgatcatggcgtcggcgacggcggcgactcgtcgtcatccacgaggacgacgacggcggtgaagacaataagaaccaaccaaaaccactacgcgaagcatatatacagattactgtcaacgtattgtagaaccaaggatctatgtataaatatatgtgtgcgtccatatcatcatcggaccggaataaagctagcaatctctcttcttcacgatcgagagatagcgcgcgtgcgtgtaattaagtattatagatgcatgtatgatgcatgcgtgtgtgtatctatatatcatgtgatggtttgtatatgagctagctatagctagagtcgtgtaatagtatactacaaactaagctaatacaatatccaagtttgctatattc

SEQ ID NO: 97741 - DNA, 3546 bp, Zea Mays
atatgcagccactctctcctgtcatcctgtgtcctcgtcctttccacccaaaatccccgatcctcgaatcgattaaaccctaagcggcatggcgggtagcgactactgccggccggcagtgcgcccgcgcgacttctgagccaccggaagccgcccttgtcccggctccactgtcgcgtgccccatccaacactgggggagtgggagttcagagccgcaaacgctcagggcaaccgggaggacgggaaggtgtggccgcaaccgcaagacgcaggcaagaggcaatcaactcaccgatgtctcagtcaccgggaggacgggaaggcatatattacagcaggcagaggaaaccttcggaacgcaacggcagtgtatttacacccatagctgcaatgtatcccagcggtcacgcacttcctgatgcaaacaggaaccacagtttggtatttggcggtacgagcaaggactgggacaacatccgtcagttcattgctagtctggaacgcgcctctgaaaactcctctgcgatagccagcaaaaccggaggtggcaaatcgaccaaccattccgtggagccagccgaacaaaaaggaaagggtgacataatagttctcgattcagatgatgaggatggagatggaaacagtccagaacacaataagttggcatctgagatgaacaaagaactcggaacatctgtattggctagtaatatcgcagaaaggatggcaactaatgggagccaaacatttgaaaccgtgcatgcttatggaggtagtaagaacacgcagattgttccgtatggccaaggttctgctctggtgaatcagtttcctttgcaaaccagttggcaaccatctattcagtttgagagagttgtgttgacgaaaaggcctgaggagcagcggatgcaagatcttgtggctgctaccatagcggagaagagggcagaaacacaaatgttcctatcacttcctacggagagaaagcgaaggagaacagaccatagtttgttgatgcttgactcatttgtccctaaacaaagaagaagaaaaggtgacacaggtctagcaccagctgatttgtcattggatttacatcaaactgctacatcacaagaacctgacatagctatagaggaagaagagaaacgtaaaaatgatggtgatggtcttgaggattattggaaagattttgcattggctgttgaaagcacaaagcttgacgatgttgacgaggcggcggcaaatgaaaaggaagataatggaaagatggaggacatcgactgcaaccatgacattcggattcatgaagatttgggccatgtatgccgtgtgtgtggtatgattgtgagaagagctgattcaataattgattaccagtggaaaaaggcttcaaggagaagaatgaatggctatggaggaaattcaaaggatgctgatgagatagactgtggtactgtcaaactgtctgaagatttcatagttgcagatattgctattcatcctagacacgctcaggcaatgaaaccacatcaggtggaaggtttcaactttttggttaagaatttgattggagacaagcctggaggttgcattcttgctcatgccccaggttcagggaaaacatttttgcttataagcttcattcagagcttcatggcaaggtatccatctgcaaggccccttgttgtgctgcctaaagggatactagttatatggaagaaagaaattcaacgatggcaagtgcaggatataccagtgtacgatttctactctgtaaaggctgaaaaaagagtagaacagttgcaaatcctcaaatcttgggaggacaagatgggtatactgtttcttggatacaagcagttctccacaatcgtcactgatgatgggggcagcaaggtaacagctgcatgccgggacaggctgcttaaggttcccaaccttctgatacttgacgagggtcatacacctagaaataaggagactgatgtactagagtcgctaagtagagtagaaacaccacgcaaagtggttctctcaggtacacttttccagaatcatgttgaggaagtgtttaatatcttgaatcttgtccgcccaaagtttcttaggatggaatcgtcacgccctattgccagacgtataatgagtcaggttgaaatatttggcagaagttcaaaagggcttgctgatggcgcattcactgaggcagttgaaggaaccttgttgaacgatgaaaacttcaagagaaaagttcatgttattagaggtcttagagaactaacaagggatgtgcttcactattataagggcgctatattagatgaactacctggcttagtagacttcagtgtgtttttgaagctcacacccaagcagaaggacattgttcacaagttggaaatgcatgataggttcaaaagaagtgcagtagggagtgcactgtacatccatccttgtctttcaggactttcagaggttaatgctgagaacagggctcacaccttgagagatgattcagttgatagtctgatggattccatcaatgtgagagacggcgtgaaggccaattttttcatgaatatcctgtcacttgctaattccgcaggagagaaagtacttgcttttagccaatatatacttcccatgaccttctttgaaaggctgctggttaagaagaagggctggcatgtggggagagagattttcatgatctctggcgacactagccaagaagacagagaagcggcagtggaccgtttcaacagctccgctgatgcgaaggttctgttcggttcgatcagggcatgtggagagggcatttccatcgtcggcgcgtcgagagtcgtcattctggacgttcacctgaacccatctgtcacccgtcaggcgatcgggcgcgcgttcaggcctggccagcagaagaaagtgttcgtgtacaggctcgtagctgccgactctgacgaggtgaaggtccacgagacggcgttcaagaaagaagtcatacagaagctgtggtttgaatggagcgagcagtgtaccacggaaaacttcaagcttggtcaagtcgatatcgacgactctggggacgagctattggataccagagcgatccgccaggatatcaaggcgctgtacagaaggtaggtaacaaacttcgtggccgatggacaccatgtaaatactggcggtgctgatcaatgagaagagtttttttttccttgtacaatcgcgctttaaattacatcatgaaaataatgctccgcattccattccattttatggtcaacagatactggcttctctacagacctgagtttgctctaaaactaggacttttcaagctatatctgtggaatggtttcttttcttttgtattatgtgccagcttcggacagcagtcagctgatcctcgactcatttcttgactcgtaggccaggattattgaggattaactgctatggtgtttagacttcttaagggctagtctaagggctagtctgagaaccccggatttctaatttgccaaggaaaattagttca

SEQ ID NO: 97742 - DNA, 954 bp, Zea Mays
gtctttccctcgcctctctctctctctctctctctctctctctctctctctctctcgaaacccacgtgaagcctgagcgccgaggcctcccctccgtccaccgatcccgccgctcccctccatccgcattcctggccacgagccgtgaaatcgggatccgctgcggccgctgatcccgacgacgagcccggattcgcccgccggccccatgggtcccgtcttctccggccgcatttgggacatatagccgtcgcgcgctcttcttcctgggtggagcgtccatgaggtggaagcagcagcgtccctagtgccagggtctgtcggctgagtgcgggggagaatgaaaggagtgtccgaaggcctgatcatcgggaccacggtcggggtggtcataggcgtgctgctggctctcgggacgctgctgtgcctgaggcggcgtcggcgttcccagacgcagataaggagcagcagctcgaggagggcgtcgactgtccccatccgcaccaatggcgttaacgcctgcgccatgctctcgaactcgaccacggggcaggagtctccgactccgcgggagctcgaagagcgtgggagttctctgtggatccaagggccaggtagaaagagcgtgatctctgcttctggggtacccagatatgcgtacaagtatgtttcgtgaattcttgttgttgtttttttgactaatttgtttagcaaatgatcggttttgttgcgtgatagataagtcggttagttactgcatcctttgtttaaatccacttaatatattgctgctgaaacgttcgaggatgacttcatggaagtggtttccatcagaatgtttgatgtgaggaatgaacaggcttgtctctagactctagttaaacaagagtgaagggtagatgggaacatctgtcataagaacttaaataaaaaggatgttaaatgtcaaagtag

SEQ ID NO: 97743 - DNA, 1765 bp, Zea Mays
gtctttccctcgcctctctctctctctctctctctctctctctctctctctctctcgaaacccacgtgaagcctgagcgccgaggcctcccctccgtccaccgatcccgccgctcccctccatccgcattcctggccacgagccgtgaaatcgggatccgctgcggccgctgatcccgacgacgagcccggattcgcccgccggccccatgggtcccgtcttctccggccgcatttgggacatatagccgtcgcgcgctcttcttcctgggtggagcgtccatgaggtggaagcagcagcgtccctagtgccagggtctgtcggctgagtgcgggggagaatgaaaggagtgtccgaaggcctgatcatcgggaccacggtcggggtggtcataggcgtgctgctggctctcgggacgctgctgtgcctgaggcggcgtcggcgttcccagacgcagataaggagcagcagctcgaggagggcgtcgactgtccccatccgcaccaatggcgttaacgcctgcgccatgctctcgaactcgaccacggggcaggagtctccgactccgcgggagctcgaagagcgtgggagttctctgtggatccaagggccaggccaaggagccttcggccctgtctacaaagcagacatgtcttctggcgaggtactggctgtcaaagtgctgtcgaacaattccaggcaaggtgaaaaggagttccaaaacgaggtcttactccttgggcgactgcaccacaggaacctggtgaatttggtcggctactgcgccgacaaagggcagcatatgctactgtacgcgtacatgccgaacgggagccttgcgtcacacttatacggcgaagacagtgcgccactaaagtgggacttgagagtaagcatcgctctggatgtcgctcggggtctggagtacctgcacgacggggctgttcctccggtagtccaccgcgacatcaaatcccccaacattctgctggaccaggcgatgcatgctagggtcgccgacttcgggttgtcgagagaggagatggtcactcgcggcgacggcgccgccaacaacatacggggaacctacgggtacctcgacccggagtacgtgtccacgcggtcgttcaccaagaagagcgacgtgtacagctacggcgtcctgctgttcgagctgatcgccggcaggaacccacagcagggcctcatggagtacgccgagctcgccgccatcaacgccgacgacgggaggaggaccgggtgggaggagatcgcggacgcgcggctaggaggcgcgttcgacgcggacgagctcaacgacgtcgccgccgtggcctaccgctgcgtcagccgcgcgtcccgcaagcgccccgcgatgcgggacgtcgtgcaggccctggcccgcgtggcgaggcgcggccgcggccgcggcaggaagcagcagcaccacccgccgcaggccagcagtgccgccgcgggcgacgagtccgccgtcgacctggaggcggaggaggggtccgaggcaggccggtcgtcgttctctggccttcttcagagagaggagtcggtcggcagcgtctctgatctaccagatgtctgagcctgacggattcttttgtttttgttgcctagagatgcagttttgagcagtgagggtgggtgtaacttgtggtggtgcctagtcaattgtaagtgtgttgtatagagtgcattgtgagttgtgactacttttgttgatatacacaagctgattgttaccatgtca

SEQ ID NO: 97744 - DNA, 1932 bp, Zea Mays
gtccgggttcggctctgatctgccgttccttgttcgttcctcagctcgaggaaaatctcctctccggtctgtctagtctagctgctagaccgctctctaccttgctatatctgtgggtttaggatctgttccttgcttcagcttccgattgtctcccaatcactcctcttttcgtcccctttttttgctcagattatcgtgttgtgatggtgcttaagtgtcagaggaggggaaagggggcaccttatatttggcgttggcggttttattagtgtttgtggagacaagcgcaaagggagtaattttgtttttaatgacatatagccgtcgcgcgctcttcttcctgggtggagcgtccatgaggtggaagcagcagcgtccctagtgccagggtctgtcggctgagtgcgggggagaatgaaaggagtgtccgaaggcctgatcatcgggaccacggtcggggtggtcataggcgtgctgctggctctcgggacgctgctgtgcctgaggcggcgtcggcgttcccagacgcagataaggagcagcagctcgaggagggcgtcgactgtccccatccgcaccaatggcgttaacgcctgcgccatgctctcgaactcgaccacggggcaggagtctccgactccgcgggagctcgaagagcgtgggagttctctgtggatccaagggccaggtagaaagagcgtgatctctgcttctggggtacccagatatgcgtacaaggagctacagaaagctacaagcaatttcacaacattgttaggccaaggagccttcggccctgtctacaaagcagacatgtcttctggcgaggtactggctgtcaaagtgctgtcgaacaattccaggcaaggtgaaaaggagttccaaaacgaggtcttactccttgggcgactgcaccacaggaacctggtgaatttggtcggctactgcgccgacaaagggcagcatatgctactgtacgcgtacatgccgaacgggagccttgcgtcacacttatacggcgaagacagtgcgccactaaagtgggacttgagagtaagcatcgctctggatgtcgctcggggtctggagtacctgcacgacggggctgttcctccggtagtccaccgcgacatcaaatcccccaacattctgctggaccaggcgatgcatgctagggtcgccgacttcgggttgtcgagagaggagatggtcactcgcggcgacggcgccgccaacaacatacggggaacctacgggtacctcgacccggagtacgtgtccacgcggtcgttcaccaagaagagcgacgtgtacagctacggcgtcctgctgttcgagctgatcgccggcaggaacccacagcagggcctcatggagtacgccgagctcgccgccatcaacgccgacgacgggaggaggaccgggtgggaggagatcgcggacgcgcggctaggaggcgcgttcgacgcggacgagctcaacgacgtcgccgccgtggcctaccgctgcgtcagccgcgcgtcccgcaagcgccccgcgatgcgggacgtcgtgcaggccctggcccgcgtggcgaggcgcggccgcggccgcggcaggaagcagcagcaccacccgccgcaggccagcagtgccgccgcgggcgacgagtccgccgtcgacctggaggcggaggaggggtccgaggcaggccggtcgtcgttctctggccttcttcagagagaggagtcggtcggcagcgtctctgatctaccagatgtctgagcctgacggattcttttgtttttgttgcctagagatgcagttttgagcagtgagggtgggtgtaacttgtggtggtgcctagtcaattgtaagtgtgttgtatagagtgcattgtgagttgtgactacttttgttgatatacacaagctgattgttaccatgtca

SEQ ID NO: 97745 - DNA, 854 bp, Zea Mays
ttgggcccacctgtcatccacagcacggcccgccttcctaatctcgggacttgggtccgctatgcgaaccactgaaaagtccccacgaacttttactctagccctcccagggtctctcttcggcggcggcgatgtctctcgccccggacccggcggacggcggcgccggcaccggcaccggcgacgactggttcctcgactgcggcatcctcgacgacctcccggccgcggcctgcggggccttcccgtgggacgcgtccccgtcttcttccaaccccaggtcagcgcagatgaccgatcgatccctccgccctcccctccactccccccttcgagttccaggacacgcgggtgctttcgtttagcctaggttcctggcgatcggttccgtttctctgcgatgagtatcgtggaaccgtgacgcgggcggatgaattgtttttgggatttcgtagatttgttctcgtgttgcagcggctgtgtttatgacggtggaatggatggattgcgtgtgatggtgaccaatgatttgcgcaaacaactgagatggtctgctgtagcgtgaaccgttttatgccggcgactcaatggatggaggattgtgtcaccagtcctgacgttaagtatgcgttgcgagcaatgggatgtgctgctaggtcatggatgacatcgtaaagctggactgcagagccaaagatataagttcccatctgtcatgtatgcactgatcctgctacggtactaatttcggagtaatttgcagtgattctgttgtttgatgcctttttttattaccgaatgcagtctaccccatatgggcagagctcaatgccttacatgttatttggttgaac

SEQ ID NO: 97746 - DNA, 1231 bp, Zea Mays
ttgggcccacctgtcatccacagcacggcccgccttcctaatctcgggacttgggtccgctatgcgaaccactgaaaagtccccacgaacttttactctagccctcccagggtctctcttcggcggcggcgatgtctctcgccccggacccggcggacggcggcgccggcaccggcaccggcgacgactggttcctcgactgcggcatcctcgacgacctcccggccgcggcctgcggggccttcccgtgggacgcgtccccgtcttcttccaaccccagtgtggaagtgggcagctatgtgaataccaatgatgttttcaaggagcccaatgatgtcttcaaggagcctggcagcaataagcgtttgaggtcaggattcaatgatgtgcatgtgccaacatctaaagcttctagggaaaaaatgaggaggaacaagctgaatgacaggtttcttgaattggggtctacattagaaccagggaagccagtaaaagctgacaaagctgctatcctaagtgatgctactcgcatggttattcagcttcgttcagaagcacagcagctgaaggaaactaatggtagtcttgaagaaaagatcaaagaactcaaggccgagaaggatgaacttcgtgatgagaagcagaagctgaaattggagaaggagagtttagaacaccagatgaagctgatgacatcgactccaacctacatgcctcatccgaccctgatgccggcgcctttccctcaggcacccctagcgccgttccatgcccaggggcaagctgcagggcagaagctgatgatgccctttgtcagctatccggggtacccaatgtggcagttcatgccgccttcagaggtcgacacctcgaaggacagtgaagcgtgccctcctgttgcataatcgcttcgattggcggctggtcgtgctcacaccatgcgaattagtcgcaactgaagccccccctagctgtcgattcattgattggctataactgctgttgttatatttgtagttcgttggtgaccaagtaagctgctgatatctgtggcggggcgccctactatagaggctactgataccccttcaatggctgtacatttttttactgttattctttttgcggagaaaagaagaatgtttgttcttgttctccacagcaacaatgtcacataccctattattctatatatatgtcgtgtattttatatttaacaatgccgtgtctt

SEQ ID NO: 97747 - DNA, 1589 bp, Zea Mays
gcgaaccactgaaaagtccccacgaacttttactctagccctcccagggtctctcttcggcggcggcgatgtctctcgccccggacccggcggacggcggcgccggcaccggcaccggcgacgactggttcctcgactgcggcatcctcgacgacctcccggccgcggcctgcggggccttcccgtgggacgcgtccccgtcttcttccaaccccaggtcagcgcagatgaccgatcgatccctccgccctcccctccactccccccttcgagttccaggacacgcgggtgctttcgtttagcctaggttcctggcgatcggttccgtttctctgcgatgagtatcgtggaaccgtgacgcgggcggatgaattgtttttgggatttcgtagatttgttctcgtgttgcagcggctgtgtttatgacggtggaatggatggattgcgtgtgatggtgaccaatgatttgcgcaaacaactgagatggtctgctgtagcgtgaaccgttttatgccggcgactcaatggatggaggattgtgtcaccagtcctgacgttaagtatgcgttgcgagcaatgggatgtgctgctaggtcatggatgacatcgtaaagctggactgcagagccaaagatataagttcccatctgtcattgtggaagtgggcagctatgtgaataccaatgatgttttcaaggagcccaatgatgtcttcaaggagcctggcagcaataagcgtttgaggtcaggattcaatgatgtgcatgtgccaacatctaaagcttctagggaaaaaatgaggaggaacaagctgaatgacaggtttcttgaattggggtctacattagaaccagggaagccagtaaaagctgacaaagctgctatcctaagtgatgctactcgcatggttattcagcttcgttcagaagcacagcagctgaaggaaactaatggtagtcttgaagaaaagatcaaagaactcaaggccgagaaggatgaacttcgtgatgagaagcagaagctgaaattggagaaggagagtttagaacaccagatgaagctgatgacatcgactccaacctacatgcctcatccgaccctgatgccggcgcctttccctcaggcacccctagcgccgttccatgcccaggggcaagctgcagggcagaagctgatgatgccctttgtcagctatccggggtacccaatgtggcagttcatgccgccttcagaggtcgacacctcgaaggacagtgaagcgtgccctcctgttgcataatcgcttcgattggcggctggtcgtgctcacaccatgcgaattagtcgcaactgaagccccccctagctgtcgattcattgattggctataactgctgttgttatatttgtagttcgttggtgaccaagtaagctgctgatatctgtggcggggcgccctactatagaggctactgataccccttcaatggctgtacatttttttactgttattctttttgcggagaaaagaagaatgtttgttcttgttctccacagcaacaatgtcacataccctattattctatatatatgtcgtgtattttatattt

SEQ ID NO: 97748 - DNA, 1434 bp, Zea Mays
gaaccactgaaaagtccccacgaacttttactctagccctcccagggtctctcttcggcggcggcgatgtctctcgccccggacccggcggacggcggcgccggcaccggcaccggcgacgactggttcctcgactgcggcatcctcgacgacctcccggccgcggcctgcggggccttcccgtgggacgcgtccccgtcttcttccaaccccaggtcagcgcagatgaccgatcgatccctccgccctcccctccactccccccttcgagttccaggacacgcgggtgctttcgtttagcctaggttcctggcgatcggttccgtttctctgcgatgagtatcgtggaaccgtgacgcgggcggatgaattgtttttgggatttcgtagatttgttctcgtgttgcagcggctgtgtttatgacggtggaatggatggattgcgtgtgatggtgaccaatgatttgcgcaaacaactgagatggtctgctgtagcgtgaaccgttttatgccggcgactcaatggatggaggattgtgtcaccagtcctgacgttaagtatgcgttgcgagcaatgggattttgaggtcaggattcaatgatgtgcatgtgccaacatctaaagcttctagggaaaaaatgaggaggaacaagctgaatgacaggtttcttgaattggggtctacattagaaccagggaagccagtaaaagctgacaaagctgctatcctaagtgatgctactcgcatggttattcagcttcgttcagaagcacagcagctgaaggaaactaatggtagtcttgaagaaaagatcaaagaactcaaggccgagaaggatgaacttcgtgatgagaagcagaagctgaaattggagaaggagagtttagaacaccagatgaagctgatgacatcgactccaacctacatgcctcatccgaccctgatgccggcgcctttccctcaggcacccctagcgccgttccatgcccaggggcaagctgcagggcagaagctgatgatgccctttgtcagctatccggggtacccaatgtggcagttcatgccgccttcagaggtcgacacctcgaaggacagtgaagcgtgccctcctgttgcataatcgcttcgattggcggctggtcgtgctcacaccatgcgaattagtcgcaactgaagccccccctagctgtcgattcattgattggctataactgctgttgttatatttgtagttcgttggtgaccaagtaagctgctgatatctgtggcggggcgccctactatagaggctactgataccccttcaatggctgtacatttttttactgttattctttttgcggagaaaagaagaatgtttgttcttgttctccacagcaacaatgtcacataccctattattctatatatatgtcgtgtattttatatttaa

SEQ ID NO: 97749 - DNA, 115 bp, Zea Mays
ttttttttccttcttccatgcaagagatttctaaaaaaggtcattggtgttctctattggttcgatattttctttgccacgtgtattgattaagtcaccatctcgcttgatacgg

SEQ ID NO: 97750 - DNA, 5033 bp, Zea Mays
atggctgagctcgcgtcgggcgccgtgacctcgttgcttggcgtcatccgcagcgagtggcggctgctggggcgcgtcggcggcgacgtccacttcatccgggaggagatggagagcatgaacagcttcctgatgcacctggccaggacgacgcccccaggcggcgagcacgacgagcaggtgcagacctggatgaaccaggtccgcgtgctcgccaacgactgcaacaactgcatcgacctgtacctgtaccgcgggaaccccgacatccacctgggcagggaccggctccggcgctacctccgctgggtcccgtggttcctgcagaagacggtggcgcagcaccgggcagccctggagctcagcgtgctcaaggagcgggcgcgcgacgtcggcaagcgccggctgaggtacggcgtggaggtcccaaagaaggcggccgtcgctcctgcaagtcctggggcggcggcgggcgcacagggcggcaatgaagctgctgctgctgctctcttccacgccgacgacgtggaagacggcggcgggcacgatcaggcgtgggaaagggcgactgccgcttccagccggatcagaagagccctctttggaatttacgtccgggaggactacttgagcgacctgctcgccgagtggatacagcaggtccgagcacagccacagtggagcgcacctgacgaccaaggccgccatgacacccggtgcggcgcctttctggtgcccaaggaggagtctgttgctattgcacggcaagcttcggctgtggcggagaagcatgtcaagaacaccatcttgctcgacatcccatcgttgcacagatggagggcgctggggcccaagaatgtcctctactacatcctgagggagatcgagctcaagcagcagaagactcaggctgatgccaaatcacaggggtggcggcccatccgcgaggaaaaaaggagaaggattgaagaaatcaagaatgagattgaaaaactgaaagcgatggataagattcaagagatcaagaacctgattgaaaacgtgaaggacaacaaccagaagctgcagccgtacctgagcaaaccaaagcggaaggaagaccacatcacgaaagagaagatcaggaacaaaaaccatgcattacctgagctcctcgtcctgctgctcatgtcatctgctgctgcggacaaaacggacgagaagatccaatggaaggcattggaagatcactacgatgtcatactccagaatgcagccaagagtctcaaagagcatatggatcaagtaaacaaaggagcagccaaggggcaagggatcattcacaacgttgcccagtacgctcgcatcctgcaagatgtgttcccaagtgtgagcagcagcagcaacaacaacagcacgaggcagccccaggacgcccaggagcaagaagccactgccgaagctacaacaggcaagattcagatcatcatcgacaaggtgaaacaagacatcctgagtgaggtgttcgaggcggtcggtggtgccaaggcccaggaagccaccaagactgataccactacaagaacaacagcagcaacaaccctggacgaggcccaagtcaaaaaaatgatccaggaggctatacatcagctgaaggaagagaaaccagctgacaagaaacaagaaacagatgtctcgggtggtcagggttcaaccgcagcagctcctagacaagaaaaccccgacgagaagaaggcccagccggacactactggtagtagttcagctcagcagggttcaagtcagggagctaaagctagtactgttgatgaagccacgaagaagaccggagaactcctggttcctattattaaacaaaccacagagaagatgggagatctccagaggaagatcaaaaggcagctggatatcaacggaattgtggccaagattagaagtcatctgactggtcaagagaccatgatcatcctcagagtagattaccagcatgtggacgagtgggagaagaccaggagtgccttgagcctgctgcctcgtgtcgctgtcatgatgatcctgaccaaaacagacaggaatctagaaagagccaggacagaatactgccatccacaaggggagcccatggactacacctatctcgcagcgttctaccaccacatcgcgctggagattacaggcctgcatcagaagagcacatccagcgatgacgacgccgcgcagcagatccggctcctgcgcgccatcttcgataagtgcgagccatacttcatgtgcatgaagatatttgcccaaactctgtacgccaggcccaggagaagcaaacaagagctgcagaagctgtacagcaccctggaggggctccagcagagatcgtaccgcagcattgctatgaagatgctcaagttctcctacagggacgtgaagaaagagtaccagtcctccttgctgtacctagctatcttccccccggggcacaggatccggcggtcgaccttgatcgcgcggtgggttgtggaacggatggtgaccacggaagactggcgctggtccagtgccgtgagcatcgctgagcaatgcttcgacgcgctcgtcatcagggggcttgtccatcccactgagatcagcgcgacagggagggtcaagagctgcatggtgggcgatgtcacctacgacttcattaccaagatggccaagaagcggcgcattctggagccacgcctgtcgcaccacctggcctgccacttctccgttttcagcgacctccatctcagtgtgtctgacaatatcagcaatttcctgaacaggctgtctgaatcatctcagtggcctcggctcaaggtgcttgatctggaaggctgcaggggcttcagggaaaaccggcactacctaccgaatatctgcaacaagatagtgctgctcaagtatctcagcctgaggagaacagatgttgacaagctcccccatgagatcaacaaccttcgcgagctggaggtgctggatatccagcagacggaggtgcctgcgtcatgcacaatggatctcctgctcctgaagctgaagcgtctgcttgctggaaacagaaatccaagtccacgcacccacggccatgtcctggttcctgggaagatcgacaaaatgtcagacatggaggtgctatccaatgtcagggtgaagagtgacaaagacttggaaggcatcggaaggctatggcagctgagaaagctcggggtggttatcaatgtcaaggacaaggacacactgcttaaggctgtcactaacctgcatgagtgcctccggtctctatcgattactcttgacgccaccaccagccacaaggggactttcagtaccatcagaggtcgaagagagctggaaggctcttccacgggccgcgatgagaagaagatcatgaaagagcatcccaaggttcttgagagcctcagcatcagtggagacgtacacataacaccgaagcggattcttccgtcagagctgaccgacaagagcactccactgatcaagttaactctgagtaacaccttgctcacgcaggacgacctggtggccctcgccaatttgcacatgctacggtgcctgaagcttcggcacaacacatatcccggcaacaaactcgcattcaagcaggttcggttccagaaacttgagtacttacttgttgagggctccaactggattgagatcagcttcgaagaagatacagcagctccagagctggtgaaggttgttctgtgctttgaaatcatagaatcgatcgctggagtggatcgccttaagaaactagaggagcttgagctgaataaatgtaacaaggacagcgacaagactgaccctgctactgctgctggtgtcaccaacgcccccgtcccctccaccgcaacagccccttatcctgcaccctctgccccaactgccgcttccgctgtcgccaccgaccatgtcccctcctccacccccacaatccgtaaccctgccccttcccgcactaccaccactgctagcgctgccaatcctacccaaaccaccacctccaccaaccaggtgttgcttcccgaattgctttccagtgccaaacaagtgtccaaggtgactcttcacggtacaatgctgaagcaaggacgagttcccaagactcaatgtcttgttgtgagatgccctacggtcaccgggatcaaattcgaggctgggtcttctcctcagctcgagaagctcgtgtgggccttcgccgaaatgaagactttctccagcatcgagaaccttacgaggttgaagaaacttgagctcatcgggcactccctacctgacaagattcgcaatgatgaagatttccacagctccaagttggccgcctgggtggtgtcgctgcccgagtcccgtgtggtgggtatgggaaacccgtatgggtatgggtttgggcaaaattttatacccgtcatgggtatgggttttttagcgggtgtattttttcttcgcggagcaaatgagaaggttttccagccactttcaagaggctctggcactggtgctaataataatgtgaataacacaccaactgttggaggaacgttcaatccggatgacatagatgcagatctcgctttaaggaggcaaatttatgaatatgataaagatgtccaagaccaagtatccttcgaccacagctcttctcctgtcatcgtcctcatgcagattccttccaaggctctgtgcagctgttcatccatttctcccttcgatgtcggtgtttgtccctgctatgtgtgttggatcaccattgacatatatgtggaagtaggttctctgctgaaagaatacatacctgtaacaaactggggattagaccggcatacagtgctggtaccccaccttggtcgacaatcttaaggcatgttgcaagcgcattcattctggttgcttttacttgcatctgtagctgcctacggaccacttcaaatgggtatgtagcagcttcagcacagcaacctgcaatggccccatagagtacagtcctcaca

SEQ ID NO: 97751 - DNA, 1409 bp, Zea Mays
caccatgcccaaatccacaaattatttccattcgataggcttactgtgttgtattcatgacctgactgttttatctaactgtggtttgattagttgctcctgccaagaagggtgatgccaagaccaggccttgaaggttgtcaaggctgtgaagtctgggccaggaaagaagaagaccaagaagattcgcacgtccgtgacatttcaccgccccaagaccctgaagaaggctagggaccccaagtacctaagaatcagcactaccggaaggaacaaccttgatcagtaccaaattctcaagtatcccctcaccacagaatcagcgatgaagaagattgaagataacaacactctggtcttcattgtcgacctcaaggcagacaagaagatcaaggctgctgtcaagaagatgtatgacattcaggccaagaaggtcaacaccctgatcaggcctgatggaaagaagaaggcttacgtgaagcttctcatgcatgggcgtcgcctatgagacgaccaagagtggcgtcggcgtcgcctccatgggcgtcatgcgcctcaagcttgtcatgaagtccatcgtcctcatcgtcatggccagagtcctcggcatctatgacctcatcatcgccgccatcatctctgccgggatcaaccccaaggccaagcccaagccctacttcttagacggctacacacacctctccttcgaactcgcatgcagccttgctggcctcgctgccggcatggccatcagcatcgtcagagacaccagagtcagtgttaggtctgaggtttatggcctaaatagtcaatcatcaaaaatggcagttaccctccccaactttattgaatggaatggaggctcgaatactatggatgaaattcttgttaggatacaacaactggaagaagcagcagtaaagcgtgagcgagctatggcgtacgcgttcaaccatcagtggagagcaaggtctgccacaagtctaggaaacttcagctatgaagtcggtaaggatggctggggctggagctggatggaccgctggatcgtagcatgaccatgggagtcgcgatccatggtccaccctgagaacccgaagaaagcacgggcgaagaaagagaacaccacaaacccattagctctcaagctacagggctccattaccctaagcaacaatatcaatgaccggaaaaccctgaaaaagaagccattgccttcagcttctcttactgatcagaagaagccatcaccgtcgccttcttccgatcagaagaaaccagtaccaaaggagcagagagcaaaggtagctggcactcctccaaaaccaaaggccaaatatatgaaggggagtcaagagaaaaagccacaaccacaatagagagtgtctcctccgctgagccaagtgagg

SEQ ID NO: 97752 - DNA, 175 bp, Zea Mays
taaacaaataaataaatcggattcccaaataaaatggcctccatgtatctagcatggactcgtggctcagtaaagctgacattttcaatccgaggtaacagtaataatcagtgtattaaatggtaaataggtaagtgcctatgcgttgcaacggaaatatataatactatgataa

SEQ ID NO: 97753 - DNA, 1962 bp, Zea Mays
ggattccttccgtggcggacggacagttggtttttcctttttcatgcgctctccaacttcccacccaaaccaccacgccgccacctcgggctcggcgccggacgcttccccgccccggcgcccatgtcgaccccgtaccacggcatccctctccgcgcgctcctcctcgcggtgcccctgatttccatcttcatcgtctttcacctcctctaccgtcccgctcccctgccctcgacgttccggacctacgccgatggggcggcgtcgcaccgtgcggaggagctgagttgccctccgctctcctccaacttaccgcccccggcgccgaagccggaggagacattggagccgacgtccctgcgccacgtagtgttcgggatcgcctcctcccggcgcacgctgccgctccggctccccctgctccggctctggctgcgcgcccccgcgcgcgccttcctcttcctcgacgcgccggcgccggcgccggacgcccgcgacctcccgccgggcctcgctctccgcgtctccgccgacgcatcccgcttcccctacacgcacccgcgcggcctttcctcggccgtccgcgtcgcgcgcatcgccggggagctcgtctccgggctcaagcagggggagggggaggatgtgcggtggctcgtgctcgccgatgacgacaccgccttcgtcctcccgaacctgctccacacgctccgcaggtacgaccaccgcgagcactggtacctcggcgcgcgctccgagtccgcggcgcagaacgcgtggcacgccttcgccatggcatacggcggcggcggcatcgccgtcagctggccgctcgcgcgccgcctcgcgcgcgtggtcgactcctgcgtcctgaggtacccgcacctctacggcagcgacgccaggatctacgcctgcctcgccgagctcggcgtcgagctcacccacgagccaggcttccaccagatcgatcttcatggggatatttctgggctcctaagagcacatcctctttcccctttagtttcactgcaccatctggatcatgtataccctctttaccctggtatggaccgggccagagcaatgcgacacttcttccgggcagccgatgctgatccggccaggattctgcagcagacagtgtgctacgaccgtaaagagtcgctcacagtatcagtctcatggggctattcagtccaggtgttcaagggcaacgtgctgctccctgaccttcttgctgtccagaaaacctttgtaccatggaaaaggggtcgcaatgtcacagatgtgtacatgtttaacaccaaacattaccccagagacgagtgcaaaagaggagctcttttcttcctaaaaggcattacctcgagggaaggcaagacggaaaccacttacaatagacagccacctaggaaatgcccgcctgacttgatcccactgaagagtctgcgtctgataaaagtgacatcagaacggctgcagctggctcctgggaaggccttaagacgccattgctgtgacatcgtaccttcttcatctgatgctaacatagacatcaacgtcagaaagtgcagagatgatgagctgatcgcgatgcattcatagtcattctttactcatatcagttcgtagttgcagcaggccatcatccacatcaactctgcgctgacaccaggccatgcaccgcggatcaacatggatcagcagcacacgttcatagtatagacacacaggatatacagaaaatgcagatgcagaggcagtatagacagacacggatcagttagcattgtttttcttttaaaaaagcagagctgaggcatcaggatttgagtgctccatagtctgacatgtaataacatcaaatagtcgtatttaccagacaaggtcggttccgttttatacagcatattcaaatctactttgttataatggaaaagaaatcacattttattctactgc

SEQ ID NO: 97754 - DNA, 735 bp, Zea Mays
gcattaaactcgaccacaccaaacgacggccggcccaaattaaaagaccgacccggcccttgcaacaaccacgcaaatagatcccactcatatacactccagtagctagtagtagtcgacccatctgcatctgtatgtgtgcttgcccccggccggccacctttccggccgatccatcatctagagctagctcatcatcagtctttggcgtgtgtgtatgtatatggtggtgaccagcagctagctatagcagcagggtggttgttctatagttcgttcctatggttatggcggcggcggcggcggtactgctcgcgctggccgccgtggcgacggaggtggccgcggcaggaacgacgtacacggtgggcgcgccggacgggctgtgggacatgcagaccgactacgcgcagtgggtgaagagcaagaccttccgccccggcgacaccatcagtcagtgatctctctgggtctctcgtttattattgtttcggtcacgcatcgtcgttgacgcgcggcgcggccatgcaccgcatatgcacgctcgatcgtcctgtcctgccctggcagcgttcacgtactcgccggagctgcacgacgtggtggaggtgacgagggccggctacgatgcctgctccagcgccaacaacatctccgccttccgcaccggcaacgacgccgtgcccctcaccgccgtcggcacccgctacttcctctgcggcctcacgggccact

SEQ ID NO: 97755 - DNA, 984 bp, Zea Mays
gcattaaactcgaccacaccaaacgacggccggcccaaattaaaagaccgacccggcccttgcaacaaccacgcaaatagatcccactcatatacactccagtagctagtagtagtcgacccatctgcatctgtatgtgtgcttgcccccggccggccacctttccggccgatccatcatctagagctagctcatcatcagtctttggcgtgtgtgtatgtatatggtggtgaccagcagctagctatagcagcagggtggttgttctatagttcgttcctatggttatggcggcggcggcggcggtactgctcgcgctggccgccgtggcgacggaggtggccgcggcaggaacgacgtacacggtgggcgcgccggacgggctgtgggacatgcagaccgactacgcgcagtgggtgaagagcaagaccttccgccccggcgacaccatcacgttcacgtactcgccggagctgcacgacgtggtggaggtgacgagggccggctacgatgcctgctccagcgccaacaacatctccgccttccgcaccggcaacgacgccgtgcccctcaccgccgtcggcacccgctacttcctctgcggcctcacgggccactgcggcaacggcatgaagatccgcgtcgacgtcgtcgccgccgcggcctcgccgtccgcgccgggccccgccgctgccgccgcggcgccgccgacgacctcgtcgccctgcatcgtcggagtcgtcgccgcctcgctactgctgcttctgctgcacgccgtcgtcagctactagcttcgccacgcgtcgcttgagttttgttatgtttcggctgcgtgtgtgttcgtccatgttccatacatatacacactactgttcttttttcgcgcatgctagctagctagtgatttgtataccctctcaacaagcataagcgcaggaaaagagcgcatcaactgcattagccctgattgcctcacaaactctc

SEQ ID NO: 97756 - DNA, 1060 bp, Zea Mays
ccgccccaccacctgcgcgccttttgcttcctcaacccctcatcatggacatggaggaggatccagcaggcggcgaagacctctcttccacggccgccagcggccactcctgctccggtgacgacggcgaggagagtggctggacgtcctacatcgactacttcatggagacgcagcagcgacgacgacgcaagcagggggacgtgagccgtgctgctgctggtgatggtccatccaccgacgacgatgctgggcgccgccgcagctctacggcggagtgcagtagtggcgctggagtgggagcctcgtcgtcatgcctggcgccaccggtgctcgtcgacccgccagtagtggtggtgtcgagaaggttgagcctcagggagggctggaggaggaagaaggtcctgcacgatgagtccttggaggataccgccacgtctcctatcagtagccctaagttgattgagttgagggatcccgacgacgcgacccaccaccagacgaaaacgagttgctgtgctgagatttcgcgttctaagcggaagaacagtacaggcggtgatgtaaacaacggggcaaacacaagaacagacacggcggcggtcaaggaagacagtgcagcatatagcaacgacgatgaagctgaggaagaaataagcaggcctaatttggtcggcccggcctatgcctgcttctcgtgtatagctgatggcgatgccaacaaattcattggttgctagctgaaaacaacaacaccctacgtacgtacacacatgcatatatacatgtagtacacactggcacacatgagaaaattaaaggtagcagctagagagtcttgtgaaggttagccattccgttcctgtttgtgaaaagggtacaaaagctactagctttcacttcacacatgagagaagaagctaaggagaagaggtacaggctgctgtgggtgggttcgatggtaggtgagacatcgcaatgctatgttagatatggggtctattccatctatcttgtgaccaagattgttatcatcagttacactcttctgttctgttca

SEQ ID NO: 97757 - DNA, 559 bp, Zea Mays
tacacaattccagcacactagttcttccacaacagaggttcaaacatacaaaggttccaccacaaaggtttgaagcattcaaacagattgcacttagttctgacaaagttctaaccacagatatgttctagcaaggtagaaaaaccttaagcaaaggcatcatcctcaaacttggtatgcatccctacctcaatctttctgaagtttcaggacagctcatagcagtgcattggtctcttcaaacttggtatgcatccccttcacttcctcttgggcctggcgcagcaaactttggttttcttcaagtgcggcctgttgagcttgtagttgtgcttgcaactcttcctgcttcctagcagcttcctctctttcagcttggagtttttcctcaaactgatataagatttcttcaagtgcggccagtagaagaaaggttgcttgctttcggagtggagccagcagttgtagtagcagtgaaggttgtggccgtaccagtgccgtgggtcaatctgctcctaaaaacaaatctcagtttgaaaagctagtactatgaaactaa

SEQ ID NO: 97758 - DNA, 2834 bp, Zea Mays
gtcatgctgcagaacatgatggatgggcaccatcagctcgctatgatgcagcagcagcatcagaaccacggccagcagcaggcagccacgagcgagagcgacgcgcgaggcccgcgccacgacgagctgctgatggagagcaagtccggcagcgacaacatggagggaggcgcccggtcaggcggctccggcggtgaggagctgcaggaggaggatctcggcctgcggcagccggcccgcaagaagcgctaccaccgccacacccagcaccagatccaggagctcgaagcgttcttcaaggagtacccgcaccctgacgacaagcagaggaaggagctgagccgggagctgggcctggagcctctccaggtcaagttctggttccagaacaagcgtacccagatgaagacgcagcaggaacggcacgagaacatgcagctgcgggcggagaacgagaagctgcgcgccgagaacgcgcggtacaaggacgcgctcgccaacgcctcgtgcccgagctgcggcggcccggcggccacggccgtcatcggcgagatgtccttcgacgagcaccacctccgcgtcgagaacgcgcgcctccgcgacgaggtcgaccgcatctccaccatcgccgccaagtacgtcggcaagcccgctggcagcctgctgctgctgccccccaacaacctgtcaaacaacgtctccggcccggcgctttcctcccaccaccacctcctgcccggcggaacagacgtgttcggtggcctccaccgtcatgctggcggtgggtttgactttgacaaggggttggttgtcgagctcgccgtcgccgccatggaggagctggtgcggatggctctgctcggcgagccgctctggatccctgcccttgccgtagacggggctaccaccgagactctcaacgaggaagagtacgcccgcgggttcttccccaggggcgttggtcccaagctgccggagctccggtcggaagcgtcgcgggaggccgtcgtggtcatcatgaaccacgtcagcctcatcgagatgctcatggacgtgaaccagtggtcgacgctgttctcaagcatcgtgtcacgggctgccaccctcgaggtgctctccaccggcgtcgccggcaactacaatggcgcgctgcagctgatgacggcggagttccagatgccgtcgccgctggtgccgacacgtgagtgccagttcctgcgctactgcaagcagcacacggacggcagctgggcggtggtggacgtgtccgtcgagggccagctgctacgtaccggcagcagacaggggcgcgggcgcggtcgacgccggccctcaggctgcctgatccaggagatgccgaacggctactcgagggtgacgtgggtggagcacgcggaggcggacgacatgatggtgcacgacctgtaccgccccctagtctgctccggcctggcgttcggcgcgcggcggtgggcatcgacgctggagcggcagtgcgagcggctcgccagcgccatggccagcggcgtcgtcgtgccggcggcagcagcagggccagccgcgggcgtggtgacgtcgccggaggggcgccgcagcatgatgcggctggcggagcgcatggtggcgagcttctgcggcggcgtgacggcgtcgacgacgcaccagtggaccacgctgtcgggcagcggcgcggaggacgtgcgcgtgatgacgcgcaagagcgtggacgacccgggccggccgccgggcatcatcctcaacgccgccacctccttctggctccccgtggcccccgcgcgcgtcttcggcttcctccgggacgacgccacccgcagcgagtgggacatgctctccaacggcggcgacgtgcaggagatggcccacattgccaacggccgcgaccacggcaacgctgtctcgctgctccgcgtcgataacgccaactcgaaccagggcaacatgctgatcctgcaggagtgctgcacggacgcgacggggtcgtacgtgatctacgcgccggtggacgtggtggccatgaacgtggtgctcaacggcggggacccggactacgtggcgctgctgccgtcagggttcgccatcctccccgacggcggtggcggtggcggtggcgggtcgctcctcaccgtggcgttccagatcctggtcgactcggtgcccaccgccaagctgtccctgggctccgtcgccaccgtcaacagcctcatcgcctgcaccgtcgagcgcatcaaggctgccgtcgccgccgacaacgccggtgtggcggcggcggcggcggcgacgtcccaccattgacgaccatccccagcgcgcggttagcgccgattacgtccttcttattactcgctaaaccatcttatctatctcgctgtgcgtgcgtgcgttcatgcacgcgtgcaggagactgccgggatctgtggagggacgaagagcagggtcgcgtcaaactcaaaccaaaactgaaactggggaggatttggcaaacgcagggagtcaagaacgcaccgcgtgctctccttgcaagctgttgcacatgccctcgatctgatgagcaacacaacaccttgcaagggggttggttcgggcattgactctcttgctctgtcctcccgtcgtcgacctgccactctctcctcggtccatggccgggctgtagtagaagctcgtccgtcagacagctagctaggagcttagaccatgcatgcatgcatatgtagcttgtaactgggattcttccattgtaacgtgcctgtacctctgcctctgtgcatgcacggagcgaggttgtacgtctatggagattgcagaagtctaaa

SEQ ID NO: 97759 - DNA, 2905 bp, Zea Mays
gtcatgctgcagaacatgatggatgggcaccatcagctcgctatgatgcagcagcagcatcagaaccacggccagcagcaggcagccacgagcgagagcgacgcgcgaggcccgcgccacgacgagctgctgatggagagcaagtccggcagcgacaacatggagggaggcgcccggtcaggcggctccggcggtgaggagctgcaggaggaggatctcggcctgcggcagccggcccgcaagaagcgctaccaccgccacacccagcaccagatccaggagctcgaagcgttcttcaaggagtacccgcaccctgacgacaagcagaggaaggagctgagccgggagctgggcctggagcctctccaggtcaagttctggttccagaacaagcgtacccagatgaagacgcagcaggaacggcacgagaacatgcagctgcgggcggagaacgagaagctgcgcgccgagaacgcgcggtacaaggacgcgctcgccaacgcctcgtgcccgagctgcggcggcccggcggccacggccgtcatcggcgagatgtccttcgacgagcaccacctccgcgtcgagaacgcgcgcctccgcgacgaggtcgaccgcatctccaccatcgccgccaagtacgtcggcaagcccgctggcagcctgctgctgctgccccccaacaacctgtcaaacaacgtctccggcccggcgctttcctcccaccaccacctcctgcccggcggaacagacgtgttcggtggcctccaccgtcatgctggcggtgggtttgactttgacaaggggttggttgtcgagctcgccgtcgccgccatggaggagctggtgcggatggctctgctcggcgagccgctctggatccctgcccttgccgtagacggggctaccaccgagactctcaacgaggaagagtacgcccgcgggttcttccccaggggcgttggtcccaagctgccggagctccggtcggaagcgtcgcgggaggccgtcgtggtcatcatgaaccacgtcagcctcatcgagatgctcatggacgtgaaccagtggtcgacgctgttctcaagcatcgtgtcacgggctgccaccctcgaggtgctctccaccggcgtcgccggcaactacaatggcgcgctgcagctgatgacggcggagttccagatgccgtcgccgctggtgccgacacgtgagtgccagttcctgcgctactgcaagcagcacacggacggcagctgggcggtggtggacgtgtccgtcgagggccagctgctacgtaccggcagcagacaggggcgcgggcgcggtcgacgccggccctcaggctgcctgatccaggagatgccgaacggctactcgagggtgacgtgggtggagcacgcggaggcggacgacatgatggtgcacgacctgtaccgccccctagtctgctccggcctggcgttcggcgcgcggcggtgggcatcgacgctggagcggcagtgcgagcggctcgccagcgccatggccagcggcgtcgtcgtgccggcggcagcagcagggccagccgcgggcgtggtgacgtcgccggaggggcgccgcagcatgatgcggctggcggagcgcatggtggcgagcttctgcggcggcgtgacggcgtcgacgacgcaccagtggaccacgctgtcgggcagcggcgcggaggacgtgcgcgtgatgacgcgcaagagcgtggacgacccgggccggccgccgggcatcatcctcaacgccgccacctccttctggctccccgtggcccccgcgcgcgtcttcggcttcctccgggacgacgccacccgcagcgagtgggacatgctctccaacggcggcgacgtgcaggagatggcccacattgccaacggccgcgaccacggcaacgctgtctcgctgctccgcgtcgataacgccaactcgaaccagggcaacatgctgatcctgcaggagtgctgcacggacgcgacggggtcgtacgtgatctacgcgccggtggacgtggtggccatgaacgtggtgctcaacggcggggacccggactacgtggcgctgctgccgtcagggttcgccatcctccccgacggcggtggcggtggcggtggcgggtcgctcctcaccgtggcgttccagatcctggtcgactcggtgcccaccgccaagctgtccctgggctccgtcgccaccgtcaacagcctcatcgcctgcaccgtcgagcgcatcaaggctgccgtcgccgccgacaacgccggtgtggcggcggcggcggcggcgacgtcccaccattgacgaccatccccagcgcgcggagactgccgggatctgtggagggacgaagagcagggtcgcgtcaaactcaaaccaaaactgaaactggggaggatttggcaaacgcagggagtcaagaacgcaccgcgtgctctccttgcaagctgttgcacatgccctcgatctgatgagcaacacaacaccttgcaagggggttggttcgggcattgactctcttgctctgtcctcccgtcgtcgacctgccactctctcctcggtccatggccgggctgtagtagaagctcgtccgtcagacagctagctaggagcttagaccatgcatgcatgcatatgtagcttgtaactgggattcttccattgtaacgtgcctgtacctctgcctctgtgcatgcacggagcgaggttgtacgtctatggagattgcagaagtctaaaaccggttaatttgatttttttttccaccgtcggagattcattgcttctgtgttttttttacgttcagcatttttttagtatcattgttgcaatattgaaatgcatgtttatactcgtatttacatatttcaatatttataagatcatttacaccaca

SEQ ID NO: 97760 - DNA, 104 bp, Zea Mays
ctcggtttattttttagtaggtgtgtgtctcaattagcaatcaacgagatttacctgtcagagatctcattttgtccctttcaatcattccattgcattttatc

SEQ ID NO: 97761 - DNA, 1649 bp, Zea Mays
atagtaggactagagagtagagaggccccgcccccaggaccgaccgaccagggagtccagcggcgcacatcgcggcgacccccaccccaccgagcgcccgcggccgcgatggagagaggcgatggcgggagcgggaggccgccggccgagaggaaggcggcgtggagggacggcgccgtcacctacttccacctcctcttctacatcgccatctccggcggccagatcttcttcaacaagtgggtcttatcctccaaagagatcaactttccctatcccgtggcactgactctgctgcacatggtcttctcctctgtagtgtgctttgcaatcacaaaagttttcaagatcataaagattgaggagggaatgactacagatatatatattacttcagtcattccaattggaggaatgtttgcaatgacactttggctagggaacagtgcgtacctctacatatctgtcgcatttgcacagatgttgaaggcaataatgcctgtagccgtgtttcttctgggagcagcatttggcctggaagaaatgagctataaaatgctttctatcatgtctgtcatcagtgttggagttattgtggcttctgttggtgaaattacaatcagttgggttggagtggtttaccagatgggtggagttgttgcggaagccctaagacttatcttcattgagatatttctgaagaaaaagggtgtcaagctcaacttgatatccatgatgtactatgttagcccttgcagtgctgtatgcctctttattccctggctgttcttagagaagccaaagatggatgatagtatttcatggaacttcccaccattcacattgttcttaaactgcctgtgcacctttgtactcaatatgtcggttttccttgtcatatcaaggactagtgcgctgacggctcgagttactggtgtcgtgagggattggtccgtagttttgctgtcagctgccatctttgctgatacacagcttaccttcataaacataattggttatgccatagccatagctggtgttgttgcgtataacaaccacaagctcaaggtaaaaccccaagcgaacccacagcaaggcgacgagaacaaggtcatctcaggaagcactcaagatgtggtgttatcagtgagctcagcaaaagaaacttcgtagcaccaaaagtagcacgattttgaaacaattttatttttcacaaaggagaattgtgctctctttcgttgggttggccagctctccttggactatacattctttttccttcccctgggtctggagggaagatattttgtacaatgatatgctcaagatgatgatacgctgccttcactgtcgtaatattgctgctcaaaaaagtgggagcacgccacagatggaaattaggccatgtaaagttgtgttttctcttgaactggtgtagcgactcatcaggtgctccaaaaatggcagccctgaatctttgtacatggttgcttggtggtggtcatgagatgtgatgtaaaacgatatatgtaagcctggcagatcaaagaattcaagatacgcaagtttctgtgtttttgaatccagcatttctcttgcgctgatagtttgcttgagatattgattctgcaatatatgtttttaaacta

SEQ ID NO: 97762 - DNA, 331 bp, Zea Mays
acggatccgaccgtcccggccagcggcgacggcgagctgccttggggcctggcactccggcagagtcgcagagaacaaacggctgccacagtgccacggcttgctctgcggcgagccttgggcaccgaggcgcctcccatcctctaagctccaggattctcaagttttcaagttgttgcgcagttccttcttctcggggaaatcgatccggagagaatggaagagccggattgcccagaaggttccgttcccgaccgcggaggagagcggcggacggcttccctgccgctgccggccgccttcctcgagttcctcagcgagaacggcctgg

SEQ ID NO: 97763 - DNA, 1132 bp, Zea Mays
ccggaaattcagattgctggctccaaggcttatcagcaagggaagatctatggaattgatgccgcttctggagctgctatattagcacttgatgttcgaccaggaaatcatgttcttgacctctgtgctgccccaggtgcaaagctttgcatgctcgcagatacgcttggaaccactggttctctgactggtgttgatgttgcaaagcaccgccttgcggcctgtcgtacaatgttgcagaagtattctcttggtgaccgtactcggctctttgttgctgatggaactttgttttcccttttacctgtgaactccaggatgcaaagaatggaagggtcaattggcgttgaagaaaatggaagcatattcccagaatggacttcaaggagatcatggaaggatcggcagaagactaggaaagcaaatgcaaatggtcaacagcacctactggcagcttcagaacctgaactgatatactatggtaaacattcaggattagttggacagtgtaaatctgatgtcttttgtccatcagttgatgatgaagcttgtacatctggctatgacaaggtcctagtggatgcggagtgtactcatgatggatccataaaacatattcaaaaatttgaattctggggatggaaaagtctagatcgccgcgtacttgatgctgaaagaactgagaaccttcttcagcttcagttacatctcctcacaaatggttttaaattgttgaaaaccggtggatcacttgtatatagtacttgcagttgcacagaatgaatgcgtggttcaacaattcctttcaacacacccttctgcagatttgcagaagatcaatttggccgacaattggccctgcagaagtggcggcatccccaaaacactgcgattcgatcctgcagtttcacaaaccagtggtctttttgttgccaagttctgtaaactaccgacttaaagcattttctggtctatcttcctggaccattcatgtcctctcacatgtaaaactgggttttcctgtcagcaactaaattacaagttggttcccaattcccctgcttttttttgtgataaattctcatttaatgtatgcttctaactttggcgagacaaaagtttctgttcttgc

SEQ ID NO: 97764 - DNA, 1140 bp, Zea Mays
ccggaaattcagattgctggctccaaggcttatcagcaagggaagatctatggaattgatgccgcttctggagctgctatattagcacttgatgttcgaccaggaaatcatgttcttgacctctgtgctgccccaggtgcaaagctttgcatgctcgcagatacgcttggaaccactggttctctgactggtgttgatgttgcaaagcaccgccttgcggcctgtcgtacaatgttgcagaagtattctcttggtgaccgtactcggctctttgttgctgatggaactttgttttcccttttacctgtgaactccaggatgcaaagaatggaagggtcaattggcgttgaagaaaatggaagcatattcccagaatggacttcaaggagatcatggaaggatcggcagaagactaggaaagcaaatgcaaatggtcaacagcacctactggcagcttcagaacctgaactgatatactatggtaaacattcaggattagttggacagtgtaaatctgatgtcttttgtccatcagttgatgatgaagcttgtacatctggctatgacaaggtcctagtggatgcggagtgtactcatgatggatccataaaacatattcaaaaatttgaattctggggatggaaaagtctagatcgccgcgtacttgatgctgaaagaactgagaaccttcttcagcttcagttacatctcctcacaaatggttttaaattgttgaaaaccggtggatcacttgtatatagtacttgcagcttgacagttgcacagaatgaatgcgtggttcaacaattcctttcaacacacccttctgcagatttgcagaagatcaatttggccgacaattggccctgcagaagtggcggcatccccaaaacactgcgattcgatcctgcagtttcacaaaccagtggtctttttgttgccaagttctgtaaactaccgacttaaagcattttctggtctatcttcctggaccattcatgtcctctcacatgtaaaactgggttttcctgtcagcaactaaattacaagttggttcccaattcccctgcttttttttgtgataaattctcatttaatgtatgcttctaactttggcgagacaaaagtttctgttcttgc

SEQ ID NO: 97765 - DNA, 1198 bp, Zea Mays
ccggaaattcagattgctggctccaaggcttatcagcaagggaagatctatggaattgatgccgcttctggagctgctatattagcacttgatgttcgaccaggaaatcatgttcttgacctctgtgctgccccaggtgcaaagctttgcatgctcgcagatacgcttggaaccactggttctctgactggtgttgatgttgcaaagcaccgccttgcggcctgtcgtacaatgttgcagaagtattctcttggtgaccgtactcggctctttgttgctgatggaactttgttttcccttttacctgtgaactccaggatgcaaagaatggaagggtcaattggcgttgaagaaaatggaagcatattcccagaatggacttcaaggagatcatggaaggatcggcagaagactaggaaagcaaatgcaaatggtcaacagcacctactggcagcttcagaacctgaactgatatactatggtaaacattcaggattagttggacagtgtaaatctgatgtcttttgtccatcagttgatgatgaagcttgtacatctggctatgacaaggtcctagtggatgcggagtgtactcatgatggatccataaaacatattcaaaaatttgaattctggggatggaaaagtctagatcgccgcgtacttgatgctgaaagaactgagaaccttcttcagcttcagttacatctcctcacaaatggttttaaattgttgaaaaccggtggatcacttgtatatagtacttgcagcttgacagttgcacagaatgaatgcgtggttcaacaattcctttcaacacacccttctgcagttatgctgatgcccagatcatgaaaattatcccttggtatcatgttttaaacttccagatttgcagaagatcaatttggccgacaattggccctgcagaagtggcggcatccccaaaacactgcgattcgatcctgcagtttcacaaaccagtggtctttttgttgccaagttctgtaaactaccgacttaaagcattttctggtctatcttcctggaccattcatgtcctctcacatgtaaaactgggttttcctgtcagcaactaaattacaagttggttcccaattcccctgcttttttttgtgataaattctcatttaatgtatgcttctaactttggcgagacaaaagtttctgttcttgc

SEQ ID NO: 97766 - DNA, 2328 bp, Zea Mays
ataacaaggagtcctttattattattcttattatcttagtgtaaatattattattattaggggcgtttacagcgtagcaagttcactcttgcaagcaagggacttttacaagagcatgtagctagttagttcatttggagtgtgaacatgtcttatttgcacacttgcttttttcccctctctttattttctccatcttcaggatggctattattagctcctttgcatgcgttcatggaattctgcgtcagaaaaccaaaacggaaaatagcattattggtcagtgtaatatacatgatatatatatgctacggtggagttattaggatgatatatctctactactacttatgttagtagtgtaggcgtccacacaccctctcggcgcatggttctgcctctgcagccgcgacacccgcgcgtgccttcgcctccgccgccgcgatggccgtgcctctgcccccgcctcctccgccctcgcgacgctgcgccctcccccgcgatgcctgcgccttcgtccccgtgatgctcgcgcctacccccgcctcctctgcccccgcgacaccgcgcgcgcagcctcctccccgcgatgcccgcccaagctcccaaatgccggcccccgtctcctccaccgcgactcccctcgctctcccgagactcccagatgctggcccccgtatcctcggccctgatgccgccgcgattcccagatgccggcccccgtatcctcggccccgcgctcgctctcctgagctccgacgggctcccgccctagcccctgacaccatgttgtgcccaaccctaaacctagccaccacgccgtcaacaacgccaccttccttcctcgccaccacaccttctttagatggaaggcgcgactggtggcatcttcctgatctcggagcacgtctaatcctcgctccaaatgctgctccgcccccaatccgtgcggcatcttcagatggaagccgggacaatgccccatccccctctcccgagccccgacgactgacattccagggatgtcgctctgcgatcctcacctcctcgtcgttggcggtcgcgcgacctcctgaccgtcgtctccgcccgcgagatccccccgactcgcccacctctccgtccacagccgcctccatcacgcacctccacgccgacgagaaggctcgcccacctctcagtccacgactgcctacgacgcgtcttctgaataaagatctctcgaagcacccggtggatgggttctctgctgggctggtcgacgacagcaatgtcttcgagtggcaggtcaccatcatcggaccgcctgacaccctatatagaacaattcaacatattcagatcagggtcatggatatgttctcggtcaagagtctttatctctactcggattggttgttggacctgtttggtgttcttcatgatgggaagaagtcgtacccgaccattctggcatttgtgaacaatgttgatgatgcagagtttatattagcccatggtactgaagtctttggttcaccttctagcaatcctcttcccaaaagtctcgagaagcttgagcaggttctaatgcttggcctagaaaagggacttccaatggtgctgcctaatccagaattccagattatgtcactgtcgaagcttgagatcttcgtgtcatgtctggagctgagggtcaatgtcagcgagctcactgttgaggagctgagggtccctgagtacctgcagttcaaggaacaacttatggaagaaggctttaaggttgaggctgggagaacttaccatcggacagttctagagatacttgaccaattggaaaaaatttggcttacattgatggatgaatatgatttatatgaagttcctggtatctatcggcttcatggtatatctctactactcttaagaagataccagataataacaaggcaaatagatggttactgtggcagtcaaaagtttgaagccagatgcgcttcaaggatgatcaaaggttacttgtatatgaatttcatggcacggggaagtcttgaaaatcatcttttcagaaggactcttcccctaccttggtccaacaggatgaagattgctctaggtgccgcgaaaggactagccttcctccatggaggtcccaaacctgttatttacaaggattttaagacattgaatgttcttcttgatgtggagtacaacgcaaaactatctgatttcggtttagcaaaagctggtcatcagggtgaaaaaactcatgtatctactcgggttgttggcacctatggttatgttgcaccagagtatgtaatgacagtaaaggttgtaaggctgtag

SEQ ID NO: 97767 - DNA, 1878 bp, Zea Mays
agtgtgcaaaatcatgttctcctattgatagaagcatttatttagatttggcttacattgatggatgaatatgatttatatgaagttcctggtatctatcggcttcatggtatatctctactactcttaagaagataccagataataacaaggcaaatagatggttactgtggcagtcaaaagtttgaagccagatgcgcttcaaggtcatagagaatgggtggcagaagttgactttctgggacagttgcatcataaacaccttattaagctgattggatattgtattgaggatgatcaaaggttacttgtatatgaatttcatggcacggggaagtcttgaaaatcatcttttcagaaggactcttcccctaccttggtccaacaggatgaagattgctctaggtgccgcgaaaggactagccttcctccatggaggtcccaaacctgttatttacaaggattttaagacattgaatgttcttcttgatgtggagtacaacgcaaaactatctgatttcggtttagcaaaagctggtcatcagggtgaaaaaactcatgtatctactcgggttgttggcacctatggttatgttgcaccagagtatgtaatgacaggtatcagggataaacttttgacttcagtagctacctatagcagaaattatgtaccttgtttatctgttgcatgttggttctttacactgttttctgagcttgtagttattctcgtgttcactccatattggatagtaaattggcttaacatttttgtccgaagacataaaactaaggtgccattacaaatgttcttctttcaagtgaaactgtgtttttcgtttttacatgcagtaaaggttgtaaggctgtagacttatataatgaatcttgcgctccacttctttgggacatgatttaacatttcttaacatttctcactctataacgctttcagatcacttttcatatgttttttagatgcactttttttttggagactaagccctaagggcaacaatggagatgaccagcgtcttggtttatcaagaggaagttaatccctctcaactgaaactcccatcaaatttggggcgtagtgtgtcgattcagttgtaactattatatgtcattttgggttagcaaactgtatctactaatttctcagacttatgccttttgagctagaaacttgtgtaagaattttttgcactcagtgacatgctggatagtgcgagtagcagattacaatagtgacggatgaacattgtattttactttacatgatggatttttttgatgtgtaaggcttttaaggcatgtaaaaattcttaacttttaaaagatgctaacacgaatataaaattgcaatcattattcttgaatttcaatgtatcttatcataacatgttcactccgtagcaacgtacgggcatttacctagtatatatatatatacgcacgtggtgcagtcgaagttgagggtgagcgggaacggcagcggcgcgccgcactgcgcggggaggtcgcggatggcgtcggcgttgagcggctggtaattggccgccgcctgcttgacgcactcgcacgcctgccgccgctccgccgggccggacggcatggccctgatccgcttcacgccggcgcagcactcggcggccggggccgcctccttgcccgtcacgtagccgacgcaggggcgcaggcttgcgtccacgtccgcgcagttcacgtccgccctaaccgccgccgccgccagcaggaccaacgccactgctgccaccgctgttgttgcggcgccgcccttcttcttcatcatcgccatcgatcgatctgtgtctctctctctcccgaacttgacttgctgctgctggagctcga

SEQ ID NO: 97768 - DNA, 123 bp, Zea Mays
ctcatttaaacattttgatttttatataattttccctcagttttgtagcgtagtatgggcgttagttataaattataggtatttttcaacatgtatattgatttttattaataactacaatag

SEQ ID NO: 97769 - DNA, 1411 bp, Zea Mays
actttcctgtgatgactgtattatactgcacataaaggaattgaagcaaaataaatttgtgtgattgtgtctagctgtgcatatatgctcctccctctcagatttttcgcacctttaccattaatgaaataggacttcgaagctgggaaacgtactaggggcaagccatttgtgaccattatttttgcgcgagcaaggcaaaatcagtcgctaaacccccacaaggggaaggcccaaaccctaagcacagagctccccatggcagcatccacggcggcggcggccgcgcggaagggcgcgctgacggatcagaggttctcggaactttcccccacgctgtccccggaggtggtggaggcactggaccgcgacggcttccagcggtgcacgcccgtccaggcggcggccatcccgcacctattgtcacacaaggacgtcgccgtcgacgccgccataggctccgggaagacccttgcgttcatcgtccccgtcgttgagatcctccgccaccgctcctccccgcccaagtcacacgaggttcttgctctgattatctctcccacgagagaattgtcctcgcagatattcaatgtggcccagcccttcttcgcgaccctgaatggcgtgccgtccatgctcctggtgggtgggttggatatcaaagcagagctcaagaaggtagaggaagagggcgcaaacatattggtgggcactcccgggaaactgtttgatataatgcacactgatgctctagagtacaagaaccttgagattttgatcctagatgaggctgataggctcttggatatgggattccagaaacatattaacttcatactttcaatgttgccaaagctgaggaggactgggcttttctcagctacccagacgaaagctattacgaacctatccaaagcagggttgagaaatgctataatggttgaggttaagacagaggcaaagtccacaagtaaagatgctggacagcaagagcttggtccatccataacaccattagggcttcggttggagtatatgatatgcgaagcatcaaataagtcatctcagcttgttgatttccttgtgcagaatagtgggaagaaaataatggtatattttgcaacatgtgcttatgtagattactgggctgttgtccttccactaattaacccgcttaaaggttctccaataattgcttaccatgggaagatgaaacagagccttcgagagaaagctttggcatcattttctgctctttcaagttgcttttattagtcaatcacaggggcaccttcattgtatcagtgaattggttaaaggtagcgatttcagcttccctggtctatccatctgggttctcgaggactacgactcagtagagtgggttctgaagcatagtctgagcttttag

SEQ ID NO: 97770 - DNA, 2024 bp, Zea Mays
cctccctgcgttcccccaccaccacggcggcagccactggttggcagcggttgtccttctccggtgtccatggcgccgccgctcgcgacacgcggcctccccctcgcctcccgcggcccgccttcttgcgcggcctcctgctcctcgtgcctgccctcgtatctccagctcggtcgccggccaagccgccggttccgctgctcctcgccacaggtcgatgcagcggcggtgccgccggggaagggcggggagtaccggccctctttcgcggacgacctcctcctcgccttcttccggagcaagatggtgaaggcgagttccactccatccaccgatcccttagttcctccctccagttagatgatgccaaaccgtgttattagtttttttttgaaactttggaaggacccagtttttaataaaattggtttatagaaattgagtccaaatataccgacttaatttatagaaattatattctcagtttcttaaaaaaccgagaaaccgttctttcctagctaaaagataaaaaccggtttcttaaaaactagattgcttttaaacagagccttaaccatgttattagcttcttttccttaaataagagagaaccaaaaaaactttttttgtgtttagtatagagttctagcatggcagataatggaatcttctgaacattaataatccattcatcgctaggttcagttctgcttggtaattttgatcaacagtctgacaaatcctgatgaattgacgccacgtgcataactgaacttgtgctagctattagtttatcgtattactttaatcgagcttggaactttgtatttctacaaaatggccatttagttttgttgaaatctgagctgaatgctctattttttgaagaataatttgttttcagtttatttatttatttatttatttgttgtgtgagcgaggcgaggggtgctttcaatcataaaacaactaagcaggtccgatccaatgtgagattaaatgttatcatagtttccagacagactgcaactccagaaacatagaataatctcactgtcatatttgaatgagaaatgtacacacttgcatacgagctgaaaattttcctggaagtggctacaaaagaaatttcctgtgctttaggacaaggtacaagtacttagaattcagaaagccagccccctgttgacgagtatctgttaagttttaggtcaatatggaatatcacagttttgcataaaagcaagacatgcagtgcaattacattctgttgattctctgaaaggctgtaggaggttggatgggattctgaaaagcctgggtatgctggactaatggaggtagcaaaccgtctcatggtcaagggaaagagtgctttggagactgagcaggctgctgtccgagtactacagtcactgtttccacctctcttgcttgttctttacaaagctcttttagcgccaattgctaatggccaactagccgctatgatgcttgctagggcgacagcaatttcatgtcaatggttgatgggctcatgctcagttaattcagtcactctgcctgatggaaaatcatggtcaagtggggtgttcgttgagaaatgcaagtacctggaagagagcaagtgccttggcatttgcatcaacacatgcaaactgccaactcagactttcttcaaagatcacatgggtgttgatttgtacatggagccaaattttgaagactatagctgccagttcaacttcggggtgccgcctccacctcttgatactgacaaagccctcaaggaaccgtgcttggacatctgcacaaacgcaaggcggcgtagagagctcggaagaaatagcagcccagatgagctcagttgcccccaagtttgatatgctccctgtaaaagactgcacatcatagattattgcgcgttgggcttgggcatggtgtgccttgcttgcatttgtcagtcttcgtgcaacgatgtcaagtaatttcggtaataccatttctatgttgcagacacacac

SEQ ID NO: 97771 - DNA, 1080 bp, Zea Mays
cctccctgcgttcccccaccaccacggcggcagccactggttggcagcggttgtccttctccggtgtccatggcgccgccgctcgcgacacgcggcctccccctcgcctcccgcggcccgccttcttgcgcggcctcctgctcctcgtgcctgccctcgtatctccagctcggtcgccggccaagccgccggttccgctgctcctcgccacaggtcgatgcagcggcggtgccgccggggaagggcggggagtaccggccctctttcgcggacgacctcctcctcgccttcttccggagcaagatggtgaaggaggttggatgggattctgaaaagcctgggtatgctggactaatggaggtagcaaaccgtctcatggtcaagggaaagagtgctttggagactgagcaggctgctgtccgagtactacagtcactgtttccacctctcttgcttgttctttacaaagctcttttagcgccaattgctaatggccaactagccgctatgatgcttgctagggcgacagcaatttcatgtcaatggttgatgggctcatgctcagttaattcagtcactctgcctgatggaaaatcatggtcaagtggggtgttcgttgagaaatgcaagtacctggaagagagcaagtgccttggcatttgcatcaacacatgcaaactgccaactcagactttcttcaaagatcacatgggtgttgatttgtacatggagccaaattttgaagactatagctgccagttcaacttcggggtgccgcctccacctcttgatactgacaaagccctcaaggaaccgtgcttggacatctgcacaaacgcaaggcggcgtagagagctcggaagaaatagcagcccagatgagctcagttgcccccaagtttgatatgctccctgtaaaagactgcacatcatagattattgcgcgttgggcttgggcatggtgtgccttgcttgcatttgtcagtcttcgtgcaacgatgtcaagtaatttcggtaataccatttctatgttgcagacacacacgttttcgattggatcaacatgactacatgagtaaat

SEQ ID NO: 97772 - DNA, 487 bp, Zea Mays
ctcttactacagatgagcttctggccagcggccatggcgagcgacgacatcacggtgcacgtggaaagcctggcgcgccgcctgacgcagcagcaggaggacgcggcggcgacggagcagcaccggatcatggtgaatgccctccgcgtgtcccgcgtccccgaccacgtccgcgtgcacaacgaggacgcatacagaccgggcctcgtcgccatcggcccgctccacgccgcagacaagcgacttcgcgccggctaccggctcaagatggcctatctccacagcctcatctcccgcggccactcggaccccgcgcgccacctcgccgtcatcgagggttacatccgcctcgtcgccgcgcgcgagcgggaggcccgcgccatgtacgccgccgaggacgtggatatcagcgccgaggatttcatccagatgcttgtcctcgatggctgcttcatcatcgaacacctcgttaacgtcgccgcgtcag

SEQ ID NO: 97773 - DNA, 1430 bp, Zea Mays
aaatctggatgcttccttccgtttccacctcaacccgtcccaccgctcccagtcccgggacgtacggtgaccccacaccacaccaccacaacccctccgtcctcttcgcggctgcggtgcggccccgggagttccttgattcggcgggcatcgccatgggagggcgtcgctggctagctgtggtaacctgacctcgccgctgcagctctgtaggtagctagtattccagaggtgatttctcctctcctgatcgacagagggcaaatctggttcgtgaccccccagtatcatatcagagagggccacggttttgcttatcaatgtgttaggagttaggaccaagtactggagctatttcgtggttccgatggagtctaagtgtgtgaacgaccaggacaccttgatcgacctggagagtggcaacggcactgcagtgatcaaccatagcaacgacctggagagtggttgcgtgtgtgcgtgcgccaacggatgtccgagggatgacaggaacaaccagcacatggactgctcttcaccggcttcggacgccgttgctagaagtggagacgacaggaagtccgagggggaggagaagctgggcctgggccttctggacagctcgggaggggacaaggcgaagaagaagcggtcgaagaagaagccgccgcggccgccgaggccgctgacgcctacgccgctggacgtctctgaccagaagctcctcaacgagctgagcgagcttgccgtgctgaagcgggcgagggtcgagcggatgaaggccttgaagaagatgaagaacgccaagcaagggttctcgggtggcaatctgtgccccctgatcgtcaccgttatcttctgcgtcgtcattctctggcaaggtttcttctcgggacacgggccggcggtgagcttccatggatcaccggaatcgtcgatcagggggacgcgcagcagtctgatctccatcaggttctacaagaaccattccaacacgaggccaccaccattcagcgagaccactgcagctcccgataacgtagtagagaccggtccgaggctcaggaatcgtaaccaagcgagaaggctactagctcggtgacccgatgattatggcggcggccacacctcaaatgaaagaagctcgccacattttgaagcgtcgccggcgcttcgcttcgtcctcctcgaggcgccggccccacccccccgctccttggctgctgctccttggctgctgtaaaaaacgagtggactcctagtgtgtcgtgcgctgggtagtgaatctgtgttggccatggctctagcgaagcgtagagagcaacgaaagcaagcgagcgagcaagcaagcaagctgtctgtccgtatgtgtctggcatgttacagtaataaaaggtttgcgcgcaataaatcagagagctgatctgaatctg

SEQ ID NO: 97774 - DNA, 1638 bp, Zea Mays
aaataaataaatactagatgagtagagagcaagcggagaacaaggggagcgagacgccgccttgccaagtgtaagcaaccgaggggagaacgagggtgcggccgtggcttgtggcgttcgatcaggataaaaaggttgccaacttcgcgtgtttccctcctgcgtttcctgcttaatttaacttaggcagcccggtttctcgctttgtgccacctcttctatctcttgttacatgtgtggctttcttgtcatggttagttaggctttctcggaaccggtccggtatgttggtttggcaattcgggtagacaagtttgaaaatgtttcttgtttgatccatttctgtggctgcacctgtgtcctggtttagacttttgactgactgagtaacctaattttttgcctaactttttcctctgcaggtagctagtattccagaggtgatttctcctctcctgatcgacagagggcaaatctggttcgtgaccccccagtatcatatcagagagggccacggttttgcttatcaatgtgttaggagttaggaccaagtactggagctatttcgtggttccgatggagtctaagtgtgtgaacgaccaggacaccttgatcgacctggagagtggcaacggcactgcagtgatcaaccatagcaacgacctggagagtggttgcgtgtgtgcgtgcgccaacggatgtccgagggatgacaggaacaaccagcacatggactgctcttcaccggcttcggacgccgttgctagaagtggagacgacaggaagtccgagggggaggagaagctgggcctgggccttctggacagctcgggaggggacaaggcgaagaagaagcggtcgaagaagaagccgccgcggccgccgaggccgctgacgcctacgccgctggacgtctctgaccagaagctcctcaacgagctgagcgagcttgccgtgctgaagcgggcgagggtcgagcggatgaaggccttgaagaagatgaagaacgccaagcaagggttctcgggtggcaatctgtgccccctgatcgtcaccgttatcttctgcgtcgtcattctctggcaaggtttcttctcgggacacgggccggcggtgagcttccatggatcaccggaatcgtcgatcagggggacgcgcagcagtctgatctccatcaggttctacaagaaccattccaacacgaggccaccaccattcagcgagaccactgcagctcccgataacgtagtagagaccggtccgaggctcaggaatcgtaaccaagcgagaaggctactagctcggtgacccgatgattatggcggcggccacacctcaaatgaaagaagctcgccacattttgaagcgtcgccggcgcttcgcttcgtcctcctcgaggcgccggccccacccccccgctccttggctgctgctccttggctgctgtaaaaaacgagtggactcctagtgtgtcgtgcgctgggtagtgaatctgtgttggccatggctctagcgaagcgtagagagcaacgaaagcaagcgagcgagcaagcaagcaagctgtctgtccgtatgtgtctggcatgttacagtaataaaaggtttgcgcgcaataaatcagagagctgatctgaatct

SEQ ID NO: 97775 - DNA, 238 bp, Zea Mays
atgggtcgatggctgtccaagtccaacaggctgaagatctggctgcttctgctgattggtgcgctctcacaatcgacgtgccttttctggttggaagttaagattctgaattcaaacttggaaactgatatgggtaatggctccaccggtccacccacgcccaacaagggcatctaaaaaaacaaagcatgaaatcagttaagctgtgtttaagcaattaaaacttgtcttgttttcg

SEQ ID NO: 97776 - DNA, 797 bp, Zea Mays
caagctggagtagctagcaactcgagggatgaagactagatgatgataggctttctccttctgtgccactcataaaactgctagctagctagcaccttgttgccaagcaatgcaagatctctctgctgagatcgatctgaatacctaaaatatctatccgaccggtcatcatctcgatctaaagcagatttctgatcccaagcttgttggctaacatggcgaatgatgatgaccctgtggacggcgaaaaccctagatcttttaccgcatcaatgataacaagatggcaaaaacattcgacgtggtttcagcgcacggccatcagctcaaaatggcgaccttcctcttctacgcaaacaaaactatcatcaaagcttcgcacacaagcttgcaggggtcacagtatcatcctagcctatgaaccggtgttatcctaattgagcttttcttttcgtcaaaacatccttgacccctcttccctagaggttggctcttacctccgtttttctggtttctcgtgccagaattaacgttcttgaccttgtaaggccctccttctatgtctacatcctcctcgcacctgatgtttctttctttcttgttacatgcgggatcagtctcatcattgccatgtttgccagactcccgcgtctacctactttctgctccattctatccctcctgagctagttgttgatcccatgtaataataaccatgtttggttgatataaaaaaatgttagttttgtttggtggcgttgaaattatttctaatttatagtaagagtagttcagtt

SEQ ID NO: 97777 - DNA, 1096 bp, Zea Mays
caagctggagtagctagcaactcgagggatgaagactagatgatgataggctttctccttctgtgccactcataaaactgctagctagctagcaccttgttgccaagcaatgcaagatctctctgctgagatcgatctgaatacctaaaatatctatccgaccggtcatcatctcgatctaaagcaggtgatcttcatttcccatgcatgcttgttccttaccaaaacttgtttcttccaattctttatcatatggtagtgctttctacctctatctttctcatgcatatttaactactctccacatagctctcaaagctattgtgttactgtgagttctcaagctagctagctagcttctacgtacctagggagtaggcactcctggtccttattactttctcctcaatatgatcccttactcctgacatgtgtatatatctatctcgttgtttgggaactagtacttttcttgcctttctgcagatttctgatcccaagcttgttggctaacatggcgaatgatgatgaccctgtggacggcgaaaaccctagatcttttaccgcatcaatgataacaagatggcaaaaacattcgacgtggtttcagcgcacggccatcagctcaaaatggcgaccttcctcttctacgcaaacaaaactatcatcaaagcttcgcacacaagcttgcaggggtcacagtatcatcctagcctatgaaccggtgttatcctaattgagcttttcttttcgtcaaaacatccttgacccctcttccctagaggttggctcttacctccgtttttctggtttctcgtgccagaattaacgttcttgaccttgtaaggccctccttctatgtctacatcctcctcgcacctgatgtttctttctttcttgttacatgcgggatcagtctcatcattgccatgtttgccagactcccgcgtctacctactttctgctccattctatccctcctgagctagttgttgatcccatgtaataataaccatgtttggttgatataaaaaaatgttagttttgtttggtggcgttgaaattatttctaatttatagtaagagtagttcagtt

SEQ ID NO: 97778 - DNA, 1225 bp, Zea Mays
caagctggagtagctagcaactcgagggatgaagactagatgatgataggctttctccttctgtgccactcataaaactgctagctagctagcaccttgttgccaagcaatgcaagatctctctgctgagatcgatctgaatacctaaaatatctatccgaccggtcatcatctcgatctaaagcaggtgatcttcatttcccatgcatgcttgttccttaccaaaacttgtttcttccaattctttatcatatggtagtgctttctacctctatctttctcatgcatatttaactactctccacatagctctcaaagctattgtgttactgtgagttctcaagctagctagctagcttctacgtacctagggagtaggcactcctggtccttattactttctcctcaatatgatcccttactcctgacatgtgtatatatctatctcgttgtttgggaactagtacttttcttgcctttctgcagatttctgatcccaagcttgttggctaacatggcgaatgatgatgaccctgtggacggcgaaaaccctagatcttttaccgcatcaatgtacgcaagcctgttgattagtatcattcgattaagagtggagagacggagcaaagaaatactgttcacactcacacatacaataattgctttgaatttaacatcgatctttattatttgtaggataacaagatggcaaaaacattcgacgtggtttcagcgcacggccatcagctcaaaatggcgaccttcctcttctacgcaaacaaaactatcatcaaagcttcgcacacaagcttgcaggggtcacagtatcatcctagcctatgaaccggtgttatcctaattgagcttttcttttcgtcaaaacatccttgacccctcttccctagaggttggctcttacctccgtttttctggtttctcgtgccagaattaacgttcttgaccttgtaaggccctccttctatgtctacatcctcctcgcacctgatgtttctttctttcttgttacatgcgggatcagtctcatcattgccatgtttgccagactcccgcgtctacctactttctgctccattctatccctcctgagctagttgttgatcccatgtaataataaccatgtttggttgatataaaaaaatgttagttttgtttggtggcgttgaaattatttctaatttatagtaagagtagttcagtttgtgtt

SEQ ID NO: 97779 - DNA, 210 bp, Zea Mays
caaaattcgttctaaatttaaaaaatttgaaaaaattcataaaaaccgaaaaccgttgagaaactgttttctgggaccggtaaaccgttatttgagaccggtaaaccgtcaatttttaccgaaaaaccagatttaatgccaaaactgattatttagtggtcaatttagtcatattagtcttgtttactattatatgatatatgtgaagat

SEQ ID NO: 97780 - DNA, 173 bp, Zea Mays
aatgaataagcacatgagatgagatgagatgcaacagttatcggagttgtcagtctatacgattctgtctgttgtatgtgtcagctgccaggtgcagctatgaaaacgttttgcaatagctgttttcggcagtgctctgatcaggttgagttttggacatcatttattatgtt

SEQ ID NO: 97781 - DNA, 2017 bp, Zea Mays
ctccgcatttctcctctcctctcctctcccctcgctcgttcgtcgcgtcctcctcagatcaacaaaccgtgtcctgctgctgcctctggaaaccaccgggggatcgccccgccctttccttcccgcacctcagatcctccgtccgaaaacggcagcttccggaggtgtcccgtctccctgctccttccggcgcgacgggtggcacggctcgcggatccggcggtcttcggtcgacggcgaggcggcgctcgtcttggatcgggagtggttgctgaggcgcggagatggtggccgaggcggaagtcatgcatcagtcccccgttccggtgctggaggtgcagtaccaccggcgcgcgacgaccaagggggttgacgacgtcgtcgggatgtccgcgcccgcccccgcggaggttggggttggggttggggttgaggtcgaggtcgaggtcgaggtcgccgtggaggtgcctcgcatggggttggagcagcctgatgtcgcaccaagtttatccacggacatgatacagcagtttgtgcccaacatccgttctggtagcttcgccgacattgggcctcggaggtatatggaggacgagcacatccgaatagatgatctttccgcccatctcggctcgatgttggtctgccctctgcctagcgccttctacggggtctttgacggccatggcggcccggacgccgcagcctacatgaagaggcatgcgatgaggttcttgtttgaggaaagcgagttcccacaggcgtcgcaggtggatgaggtgtacctcgagtccgtggagagctgtgtccgcagagccttcctgcaggcggaccttgccctggctgatgatctggacatcagccggtcctctggaaccacggcgctcactgcattagtgtttggaaggcaactggtggtcgcgaacacgggggactgccgcgcggtgttgtgccggaaaggagtggcgatggagatgtcccgcgaccaccgcgcgaaccacgtggaggagcgcgagagggtggccgcgtcgggcgggtacatcgaggacgggtacctgaacggggtgctgtcggtgacgcgggcgctgggcgactgggacatgaaggcgcccggcgcgtcggcgtcggcggcgctgatcgcggagcccgagttccggcgggcgacgctgggtgaggacgacgagttcctcgtcatggggtgcgacgggatctgggacgtgatgacgagccagcacgcggtgagcctggtgcggcgcggcctgcggcagcacgacgaccccgcgcgctgcgcccgggagctggtgatggaggccaagcggctggagacggccgacaacctgacggtcgtcgtggtgtgcttcgcgccggagatggggtcgccgtttacaccgcagcaacagcaggaggaggagctgcccgcgaggcccaggagctgcaagaagggcctgtcgacggaggcgctgtgcagcctgaggagctggctggatacggaccaccggtagagggaggaagagctggggggtgtgtaaatactggagtattatgctgacagcaacactggttgattatgagcgctgggccatctgttgaggattttacgtaggctggttcagcagccagcagttttgtaggtttcgttcttccttttcacccttgttatctagtcgtttgttgtacatacatgtatggatgctgctgatgacatctgtgtgctgcgctccattgccaccaactttctttttaccgagagcccagtgagaagaggatagcggagcaggcacagccactgcatttgaccacagttttcaggcacagcgacactgggaaagatcaatcaatcaactttgtcttgagccgagcaggtagcagatgggagtggactactactagtagtgccattgcggcgacaaaccgggttagacaatattattataggagacagacaggatatgatcggctgcctaatcgacaattattttgatgtttcgatttttatagatacaatgtttttactcta

SEQ ID NO: 97782 - DNA, 1414 bp, Zea Mays
agtggacatgaatccctttctaacgactggtcatccgatggggagcgtgcgtgcgtacgggtgcgacgcgtcggtgctgctggacccgacgccggcgaacccggagacggagaagacggcgccgatcaacatcgggctggcggcgttcgaggtgatcgacgagatcaaggcggcgctggaggagcggtgcccggggacggtgtcgtgcgcggacatcgtggtgtacgcggcccgggacgcgtcgagcctgctgagcaacgggcacgtccacttcgcggcgcccgcggggcggctggacggcgtggtgtcccgcgccgccgacgcgcagcgcgacctgccggactccaccttcaccgtgtccgagctgatccgcaacttccggcgcaagaacttcacggtggaggagctggtgatcctgtcgggcgcgcacgccgtcggcgtcggccactgctcctcgttccgcgcgcgcctgtcggcgccgccggcgcagatcgtgccggcgtaccggaacctgctgtcgggcaagtgcgcggcggcggcgggcggcgccgacgaccccgtggtggccaacaacgtgcgcgacgaggacccgcgcgccgtcgcggcggccttcccgtccttcctcgggaagctgcgcaaggccagggactttctggacaacagctactaccacaacaacctggcaaggatcgtcaccttcaactccgactggcaactgctcacggagaaggaggcgctggggcacgtcaaggagtacgccgagaacggcaccctctgggacgaggacttctccgacgcgctcctcaagctcagccggctgcccatgccgccgcacagcaagggcgagatcaggaagacgtgccgctgggtcaaccaccactgatcctgctcaagctctgcacccggccggacggaaatataccagatgggtcttcacgccgatttgtttcgatcttctttcattttgttgctgtatgtttgtttgattattatctgatgatatgcatgtgtttttttatgcggttgatctcttgttgtatcttgttctttcatgtatgtatggactatgggcaacagtaatctctactaacaattaagggagcagtgtagactgcccccgcctgtgcccccgcctgtgagcccacccgcccgcgcctccaccgccgcgaatcccgcccgcgcctctaccgccgcgaatcccgcccgcacgcccgcacctccgccgccgcgaatccctcgccctcgtctccttcgccagcgcctccccacccacacgcccaagcctccgctgccatgaatccctcggcccttgtctccttcgccagcgcctggtgagcctccgccgccacgaatccctcggccctcgtctccttcgccagcgcctcaccaggcgacgccccgcccgcgcccccac

SEQ ID NO: 97783 - DNA, 733 bp, Zea Mays
atcaaaagataatctatgtgccgttgcagcgcacgggcatctaactatgtaattatgattctctttactgtgaacaggatacgcgttcgaagaaattgttatagggtccaagaccatccggctaagcaggtggccgtttacaaggttgtttgcagatccagcaaaattttgccaagaaaagagctctaccgagaaggacatgtctccatctctgactggtgaagccatgtgaaatggttcagtaactcatttagctcatgaccacccgacggataagaactcagcagctcgtgtcactaacttctatctgttatccttcaaatcagtgactgtatgttttcactaggcccaagttaaccttgtacagttttgaaccaaagggatgtttgagcttttcacctgatacatgggtgtcactcatatccatgaccttggcatagtttcctattccttttcttctgaaatgatgtaatttgtggggcgccagcatcttgtctcctaatattctgtttgcagtaccaatgtcctttagcgctttggtgccaatgattggaatgcaccttgtgcacaacacgaatggcaatctggaggtgccataatgacgagcagcggagcagatggatgaacacacctgaactgcatgagctacctgttatcttcatgcatgcaacggtttgtcgcagtgctatgccctcttgtactttccagttgtttcgtttcttggtggtataag

SEQ ID NO: 97784 - DNA, 501 bp, Zea Mays
gaggtggctagtaggggatgtacttttctgtgtggcacgccgttccttgcatgtcctatcgtctccacgctcctcgcgctcgcgcatgcgcgaactctgctcgctggctctgccctgacacaggtacgccgcctccggcgccggctactcctttcgcctcgtgttggatgacccggccgccggctcgtggacgtcgttgctcgtgctgggtcctcccagtgcgcaagggcgcgacagcgatcgcctcccactattctgccatctcgccgcgtccggcgagaggctcgacactgaagttgatggtgctgggtgggtggtaccttgagacgtgctcgagcgtcgtgagcgaggcgggggtgcttgcggttgctgtggagcgcgacagccggtgcggagcacagtttcatggagggcagcttcgggtgtcgtgagcaaggcaaggcagacgggggtcaggggtgaggttgcggatgtcttgcggcgggagggagaaggacgaca

SEQ ID NO: 97785 - DNA, 472 bp, Zea Mays
acacctacatctccacctaccgaacatcaggtatgcaaattcatcatcatttacttgttgttagttatattatggtgtaactcagcaaatatcatttgtacatgtatattagacccctccaactatcttgccgacgctggaacgagaagatgagttagactttgtcaaaaccctctttgctagtgaaggtatcgaccatcactcgtcactgtaccccgatggtgatcgacgatcgtgagctttcatgttatgtgttgtgatacttgagacttttattatgactatgtatgtgatattgtctcttattatgactggatgagatgtctcttatgactatggatgagacttttgtgatgtaattgatgagactatggatttaaatattgttatgtgattgtgtgtgagatcttttatgtgaaaatatgttgtgctatagctgttgatatatttgttatgttgtggaatattgtgt

SEQ ID NO: 97786 - DNA, 115 bp, Zea Mays
atgcaaccagaagttcaaaattctgcagttcataacatattagtttacgtggatattagacccttactgtgcatctgaaacacttttacataataaaactctaataatttacttg

SEQ ID NO: 97787 - DNA, 1072 bp, Zea Mays
actataagcgcgctgaagaactaagcagcgcatatcatggcgatgctgatgatgacgtggacgtggacatgcaacgccaagctgctgctgatgacgctcgtcttcgctgctgcgctgagcgcgacggtgacgacgtcgcgggcgcagtcgccgccgctgcagtacaacttctacggcgcgtcgtgcccgcaggcggaggcgacggtccgcaacgtcaccgaggggatcatcgccaacgaccgcaccatgggcgccgccttcatgcgtctcttcttccacgactgcttcgtcaggggctgcgacgcctccatactgctggacccgaccagcagcaacacgcaggtggagaagaaggcgatcgcgctgcgcgggtacgcggccgtgaacacgatcaaggcggcggtggaggcggtgtgccccggggtggtctcctgcgccgacatcctggcgttcgcggcgcgggacacggccgtcgtctccggcggcttcgccggcttcggcatgccctcgggccgccgcgacggggtggtctccagcttcatcgaggtgctgcagaacatcccgtccccgaccttcaagctccccgacctcgtcagcaacttcgccaagaagggactcgacgtggacgacctcgtcacgctctccgccgcgcactccttcggccaggcgcactgctccttcgtcaacggccgcctctaccccaccgtcgaccccaccatgaacgccacctacgccgccgggctcaagacggtgtgcccgccgcctggcagcggcggcggcgacccggtcatcagcaacaaccgggtcacggaccccaacgcgctcagcaaccagttctacagcaacctgatgaccgggcaggtgctcttcgtctcggaccagcagctcatgaacaccacctacacggcggccaaggtggccaacaactccgccgattctgccgcctggatgacccagttccaaacggcgctgctcaagatgggcagcatccaggtgctcaccgggacggccggccaggtcaggaagtactgcaacgtcgtcaacagcagctaacagattctcggccggctcg

SEQ ID NO: 97788 - DNA, 1199 bp, Zea Mays
attagcaacgtgtcgcttgttctcctcgcgtcattttctataaatacccgggatggagtcagcatcatcaaataacactccatccattcatcgtcgttcacgtacgcacagaatacacagcttaatttgagtagctcacaccgcgcgccgatccagacgtggcaatggcggcgacctcgtcagccgccttagtgaccatggtggtggtgatcgctgcagctgcgatcagcacggcttccggcacggcactactgcagtacaacttctacggctcgtcgtgcccaaaagccgaggaggcggtccgcaacgccactcagaagatcatctccgacgaccccaccatgggcgccgccttcgtgcgcctcttcttccatgactgcttcgtcaggggctgcgacgcttccatcctgctcgaccagtccaacagcaacccgcagccggagaagctagccatcccgctacgcggctacgcgcaagtgaacacgatcaaggcggccgtggaggccgtctgccccggcgtcgtctcctgcgccgacatcctcgcctacgcggcgcgcgactccgcggccgcctccggcggcttcgccttcgccatgccgggcggccggcgcgacgggtccgtgtccaacctcaacgacattcccgggaacctccctgccccgaacatgcaggtccaggacctcatcgccagcttcggcagcaagggcctcagcgccgccgacctggtggcgctctccggcgcgcactccttcggccagacgcactgctccttcgtcacgccccggctgtaccccgccgtggacgcgaccatgaacgccaccttcgccgcggcgctcaaggcggtgtgcccgccgccttcgcaaggcgggggcggcaccgtgctcaacaacaaccgtgtgacggaccccaacaagctgagcaaccagtattacaccaacttggccaccgggcaggtcatgttcacgtcggaccagacgctgaccagtagcaacaccaccaacaagatggtgcaggacaacgctgccgatccgatcgcgtggatggcacggttcgcgggggccatgctgaagatgggaggcatccaggtgctcaccggcacccagggtgagattagaagagtctgcggcgccaccaacggcggcaactaaaaactcgcaaataagcaagatccaccactatcacctgtttccaccactgtt

SEQ ID NO: 97789 - DNA, 259 bp, Zea Mays
cacatgagggccaagcgacaaatggctcaaagccttggtcagatactcagattgctaagttcaaacgtcgatatgagcaagaagaagaggaaagcaaagacagatccccttttattccacctcagaatcttgagcaaagtatgatacttgttccgcctgaaagccccaagacaagtctatggatttgttttgcattccggggacaaagaaataaggaatccgagtaacagtcatgtaaactatgattcagaatttacag

SEQ ID NO: 97790 - DNA, 1706 bp, Zea Mays
gtgcgctgcggacgggtcggatctgagacgagacgagacgatcccccctcccctcaaccggaacttgttttaccccatctcatcccactgactccacccacccacccgcccgctgcctccgccggatctcgtcggactcggatccgcccgaccacgaccaccccgcgtcgccgccgcgcagcagcagcagatcagagaagatggccggactcgacaccttcctcttcacctcggagtccgtgaacgagggacaccctgacaagctctgcgaccaggtctcagatgctgttctggacgcttgccttgctgaggaccctgacagcaaggttgcttgcgagacctgcaccaagaccaacatggtcatggtctttggtgagatcaccaccaaggccaatgtcgactacgagaagattgtcagggagacatgccgcaacattggtttcgtgtcgaacgatgtcgggcttgacgctgaccactgcaaggtgcttgtgaacattgagcagcagtcccctgatattgctcagggtgtgcacggccacttcaccaagcgccccgaggagattggagctggtgaccaggggcacatgtttgggtatgcgactgacgagacccctgagctgatgcccctcagccatgtccttgccaccaagcttggtgctcgtctcacggaggttcgcaagaatggaacctgcccctggctcaggcccgatgggaagacccaggtgacagtggagtaccgcaacgagggtggcgccatggttcccatccgtgtgcacacagtcctcatctctacccagcacgacgagacagtcaccaacgacgagattgctgctgacctgaaggagcacgtcatcaagccagtcatccccgagcagtacctcgacgagaagacaatcttccacctcaacccgtctggccgcttcgtcatcggcggacctcacggcgacgctggcctcactggccggaagatcatcatcgacacctacggtggctggggagcccacggcgggggcgccttctccggcaaggacccgaccaaggtggaccgcagcggggcctacgtcgcgaggcaggctgccaagagcatcgtcgccgccggcctcgcccgccgcgccattgtccaggtctcctacgccatcggcgtgcccgagcccctttcggtgttcgtggacacgtacggcaccggcgcgatccccgacaaggagatcctgaagatcgtgaaggagaacttcgacttcaggcccggcatgatcatcatcaacctcgacctcaagaaaggcggcaacgggcgctacctcaagacggcggcctacgggcactttgggagggacgaccccgacttcacctgggaggtggtgaagcccctcaaggcggagaagccgtcttctgcatgaggcgcctcctctgttttggaagaagcttttggtctggtctggtctggtctggtgtgcctgcgctctatcatgcttttttatggctcctacttgtgattcttgatctgccccttgcttatcatttgtactgtactgtcactgtcctaataagtggtacgtgtgcggggtcgtattgtgtctgcttattcacctactagaggattatttctggttttgctgcttatgtaatgcttttaaaaccatgaaagaagctacaggctcctacagctgctttgagaagtaacggaacctcgtgcattttgggttatatat

SEQ ID NO: 97791 - DNA, 1715 bp, Zea Mays
gcgctgcggacgggtcggatctgagacgagacgagacgatcccccctcccctcaaccggaacttgttttaccccatctcatcccactgactccacccacccacccgcccgctgcctccgccggatctcgtcggactcggatccgcccgaccacgaccaccccgcgtcgccgccgcgcagcagcagcagagaagatggccggactcgacaccttcctcttcacctcggagtccgtgaacgagggacaccctgacaagctctgcgaccaggtctcagatgctgttctggacgcttgccttgctgaggaccctgacagcaaggttgcttgcgagacctgcaccaagaccaacatggtcatggtctttggtgagatcaccaccaaggccaatgtcgactacgagaagattgtcagggagacatgccgcaacattggtttcgtgtcgaacgatgtcgggcttgacgctgaccactgcaaggtgcttgtgaacattgagcagcagtcccctgatattgctcagggtgtgcacggccacttcaccaagcgccccgaggagattggagctggtgaccaggggcacatgtttgggtatgcgactgacgagacccctgagctgatgcccctcagccatgtccttgccaccaagcttggtgctcgtctcacggaggttcgcaagaatggaacctgcccctggctcaggcccgatgggaagacccaggtgacagtggagtaccgcaacgagggtggcgccatggttcccatccgtgtgcacacagtcctcatctctacccagcacgacgagacagtcaccaacgacgagattgctgctgacctgaaggagcacgtcatcaagccagtcatccccgagcagtacctcgacgagaagacaatcttccacctcaacccgtctggccgcttcgtcatcggcggacctcacggcgacgctggcctcactggccggaagatcatcatcgacacctacggtggctggggagcccacggcgggggcgccttctccggcaaggacccgaccaaggtggaccgcagcggggcctacgtcgcgaggcaggctgccaagagcatcgtcgccgccggcctcgcccgccgcgccattgtccaggtctcctacgccatcggcgtgcccgagcccctttcggtgttcgtggacacgtacggcaccggcgcgatccccgacaaggagatcctgaagatcgtgaaggagaacttcgacttcaggcccggcatgatcatcatcaacctcgacctcaagaaaggcggcaacgggcgctacctcaagacggcggcctacgggcactttgggagggacgaccccgacttcacctgggaggtggtgaagcccctcaaggcggagaagccgtcttctgcatgaggcgcctcctctgttttggaagaagcttttggtctggtctggtctggtctggtgtgcctgcgctctatcatgcttttttatggctcctacttgtgattcttgatctgccccttgcttatcatttgtactgtactgtcactgtcctaataagtggtacgtgtgcggggtcgtattgtgtctgcttattcacctactagaggattatttctggttttgctgcttatgtaatgcttttaaaaccatgaaagaagctacaggctcctacagctgctttgagaagtaacggaacctcgtgcattttggagatatgttgcagtgctgtgctgtc

SEQ ID NO: 97792 - DNA, 993 bp, Zea Mays
cgcgttctgagtttctgaagagacgaccagcgccacacggagaagacggagggccggcagacagtagactcgctgagcagcagcagtatataagctcacggctcacccaccgctgggggccgcacagccagctgctcagctccgtccggcggaactcggaagccctacgctacgcctaccctcgctcttcaaggtcttgtctttgggtagaacatgtcgtgctttgcgtgctgtggtgatgaagatacccaagtaccagacaccagggctcaatacccaggacaccatccagcgagggccgatgcataccgcccttctgatcaacctcccaagggtcctcagcctgtgaaaatgcaaccaatcgcagtccctgctattcctgtggatgagattagggaggtgaccaagggttttggtgatgaagctttgattggtgagggatcctttggcagagtatacttgggtgttctaagaaatggtaggagtgccgcggtcaaaaagttggattctaacaagcagccagaccaagagttcttggcccaggtgtctatggtgtcaaggctgaagcatgaaaatgttgtcgagttgcttggttactgtgctgatgggacactccgcgtccttgcttatgagttcgctacaatgggttcccttcatgatatgcttcatggaaggaaaggggttaaaggggctcaacccggtccagtcttatcgtggtcgcaacgtgtgaagatagcggttggggcagcgaaaggcctcgagtatcttcatgagaaagcgcagccccatatcatacaccgagacatcaagtctagcaacgtccttcttttcgatgacgatgtagctaagatcgctgactttgatctgtcgaaccaagctcctgacatggcagctcggcttcactcaactagggttctcggaacattcggataccatgcgcctgagtatgttttggtttccttttccaattgctctacagaccttttgagataa

SEQ ID NO: 97793 - DNA, 2294 bp, Zea Mays
cgcgttctgagtttctgaagagacgaccagcgccacacggagaagacggagggccggcagacagtagactcgctgagcagcagcagtatataagctcacggctcacccaccgctgggggccgcacagccagctgctcagctccgtccggcggaactcggaagccctacgctacgcctaccctcgctcttcaaggtcttgtctttgggtagaacatgtcgtgctttgcgtgctgtggtgatgaagatacccaagtaccagacaccagggctcaatacccaggacaccatccagcgagggccgatgcataccgcccttctgatcaacctcccaagggtcctcagcctgtgaaaatgcaaccaatcgcagtccctgctattcctgtggatgagattagggaggtgaccaagggttttggtgatgaagctttgattggtgagggatcctttggcagagtatacttgggtgttctaagaaatggtaggagtgccgcggtcaaaaagttggattctaacaagcagccagaccaagagttcttggcccaggtgtctatggtgtcaaggctgaagcatgaaaatgttgtcgagttgcttggttactgtgctgatgggacactccgcgtccttgcttatgagttcgctacaatgggttcccttcatgatatgcttcatggaaggaaaggggttaaaggggctcaacccggtccagtcttatcgtggtcgcaacgtgtgaagatagcggttggggcagcgaaaggcctcgagtatcttcatgagaaagcgcagccccatatcatacaccgagacatcaagtctagcaacgtccttcttttcgatgacgatgtagctaagatcgctgactttgatctgtcgaaccaagctcctgacatggcagctcggcttcactcaactagggttctcggaacattcggataccatgcgcctgagtatgttttggtttccttttccaattgctctacagaccttttgagataatcaagcttaagctagtttacatttttttttggtgggtcaggtatgcgatgactgggcaactcagctctaagagtgatgtatatagttttggggttgttcttcttgagctgttgactgggaggaaacctgtcgaccatacattgccaaggggacagcagagtcttgtgacctgggtaagttccatccacacatgttggttgtgtttataagatggtatgaacttgttttttttttcgggtggatggaattaatgacttgttcaacactggcaggctacaccaagacttagcgaagacaaggttagacagtgtgttgactcaagacttggaggggactatcctcctaaagctgttgcgaaggtaccatcgacaaccttttcttctcgaaccatgcatggcattttaaagttgattctattaactgtttaacgaagtgctaaagaaagctggttaatgaagagcaaaaggtgatgcatgtagaggaatagatgagtcaatcgctttctgttactgatatcatgctcctaaataaatactctactactgaacattgttctcgaagcgtatttgcattcagtgtcagtttattacgccaagctttgattctttgccgctggtgctaccaaatgttatagttcttggagctcgtgtgtcggttggcgatccaccccgaggttttaacgctgcttgtgctcttgtccttggaacagtttgcggctgtcgccgccttgtgtgttcaatacgaagcggacttccggccgaacatgagcattgttgtcaaggcgctacaacccctgctgaatgcgcatgcgcgggcgactaaccctggagaacatgctgggtcataagctttgcgtttgcttctctccctcttgttcttgtatgataggtaaggtatatgactcgtcgatgtcgttgttgcggacatgtggctggcagcgtgtaatgtctgtgattattcttcccctgagctgtaaacaagattcttgtatccccacagtatttgattctttctattggtgccgtttttacctatctcaaggcgcaactgctcaagcaatcatccaaacaggccctacaagtcaagttgagcaaattgcgggtaaaaggaatctaatttttttaaattcctctgaacagaatgcctccaggctccggtgaataatcatattcatttgatttgagggtgttcaacaacaccatatatttctaattcaagctgggcttgcgtcatactccgtttcgttttagttgtcgctggatagtgcaaaattgaactatccagcgacaactaaaaagaaa

SEQ ID NO: 97794 - DNA, 1756 bp, Zea Mays
cgcgttctgagtttctgaagagacgaccagcgccacacggagaagacggagggccggcagacagtagactcgctgagcagcagcagtatataagctcacggctcacccaccgctgggggccgcacagccagctgctcagctccgtccggcggaactcggaagccctacgctacgcctaccctcgctcttcaaggtcttgtctttgggtagaacatgtcgtgctttgcgtgctgtggtgatgaagatacccaagtaccagacaccagggctcaatacccaggacaccatccagcgagggccgatgcataccgcccttctgatcaacctcccaagggtcctcagcctgtgaaaatgcaaccaatcgcagtccctgctattcctgtggatgagattagggaggtgaccaagggttttggtgatgaagctttgattggtgagggatcctttggcagagtatacttgggtgttctaagaaatggtaggagtgccgcggtcaaaaagttggattctaacaagcagccagaccaagagttcttggcccaggtgtctatggtgtcaaggctgaagcatgaaaatgttgtcgagttgcttggttactgtgctgatgggacactccgcgtccttgcttatgagttcgctacaatgggttcccttcatgatatgcttcatggaaggaaaggggttaaaggggctcaacccggtccagtcttatcgtggtcgcaacgtgtgaagatagcggttggggcagcgaaaggcctcgagtatcttcatgagaaagcgcagccccatatcatacaccgagacatcaagtctagcaacgtccttcttttcgatgacgatgtagctaagatcgctgactttgatctgtcgaaccaagctcctgacatggcagctcggcttcactcaactagggttctcggaacattcggataccatgcgcctgagtatgcgatgactgggcaactcagctctaagagtgatgtatatagttttggggttgttcttcttgagctgttgactgggaggaaacctgtcgaccatacattgccaaggggacagcagagtcttgtgacctgggctacaccaagacttagcgaagacaaggttagacagtgtgttgactcaagacttggaggggactatcctcctaaagctgttgcgaagtttgcggctgtcgccgccttgtgtgttcaatacgaagcggacttccggccgaacatgagcattgttgtcaaggcgctacaacccctgctgaatgcgcatgcgcgggcgactaaccctggagaacatgctgggtcataagctttgcgtttgcttctctccctcttgttcttgtatgataggtaaggtatatgactcgtcgatgtcgttgttgcggacatgtggctggcagcgtgtaatgtctgtgattattcttcccctgagctgtaaacaagattcttgtatccccacagtatttgattctttctattggtgccgtttttacctatctcaaggcgcaactgctcaagcaatcatccaaacaggccctacaagtcaagttgagcaaattgcgggtaaaaggaatctaatttttttaaattcctctgaacagaatgcctccaggctccggtgaataatcatattcatttgatttgagggtgttcaacaacaccatatatttctaattcaagctgggcttgcgtcatactccgtttcgttttagttgtcgctggatagtgcaaaattgaactatccagcgacaactaaaaagaaa

SEQ ID NO: 97795 - DNA, 1806 bp, Zea Mays
gcacagccagctgctcagctccgtccggcggaactcggaagccctacgctacgcctaccctcgctgtactactagctgccttcctacccgcttcccctctcctcccgacgccgtctccctccctccctccgcctccgccgtcgccgccgggacacgcgaagcttcaaggtcttgtctttgggtagaacatgtcgtgctttgcgtgctgtggtgatgaagatacccaagtaccagacaccagggctcaatacccaggacaccatccagcgagggccgatgcataccgcccttctgatcaacctcccaagggtcctcagcctgtgaaaatgcaaccaatcgcagtccctgctattcctgtggatgagattagggaggtgaccaagggttttggtgatgaagctttgattggtgagggatcctttggcagagtatacttgggtgttctaagaaatggtaggagtgccgcggtcaaaaagttggattctaacaagcagccagaccaagagttcttggcccaggtgtctatggtgtcaaggctgaagcatgaaaatgttgtcgagttgcttggttactgtgctgatgggacactccgcgtccttgcttatgagttcgctacaatgggttcccttcatgatatgcttcatggaaggaaaggggttaaaggggctcaacccggtccagtcttatcgtggtcgcaacgtgtgaagatagcggttggggcagcgaaaggcctcgagtatcttcatgagaaagcgcagccccatatcatacaccgagacatcaagtctagcaacgtccttcttttcgatgacgatgtagctaagatcgctgactttgatctgtcgaaccaagctcctgacatggcagctcggcttcactcaactagggttctcggaacattcggataccatgcgcctgagtatgcgatgactgggcaactcagctctaagagtgatgtatatagttttggggttgttcttcttgagctgttgactgggaggaaacctgtcgaccatacattgccaaggggacagcagagtcttgtgacctgggctacaccaagacttagcgaagacaaggttagacagtgtgttgactcaagacttggaggggactatcctcctaaagctgttgcgaagttcttggagctcgtgtgtcggttggcgatccaccccgaggttttaacgctgcttgtgctcttgtccttggaacagtttgcggctgtcgccgccttgtgtgttcaatacgaagcggacttccggccgaacatgagcattgttgtcaaggcgctacaacccctgctgaatgcgcatgcgcgggcgactaaccctggagaacatgctgggtcataagctttgcgtttgcttctctccctcttgttcttgtatgataggtaaggtatatgactcgtcgatgtcgttgttgcggacatgtggctggcagcgtgtaatgtctgtgattattcttcccctgagctgtaaacaagattcttgtatccccacagtatttgattctttctattggtgccgtttttacctatctcaaggcgcaactgctcaagcaatcatccaaacaggccctacaagtcaagttgagcaaattgcgggtaaaaggaatctaatttttttaaattcctctgaacagaatgcctccaggctccggtgaataatcatattcatttgatttgagggtgttcaacaacaccatatatttctaattcaagctgggcttgcgtcatactccgtttcgttttagttgtcgctggatagtgcaaaattgaactatccagcgacaactaaaaagaaa

SEQ ID NO: 97796 - DNA, 1731 bp, Zea Mays
gcacagccagctgctcagctccgtccggcggaactcggaagccctacgctacgcctaccctcgctgtactactagctgccttcctacccgcttcccctctcctcccgacgccgtctccctccctccctccgcctccgccgtcgccgccgggacacgcgaagcttcaaggtcttgtctttgggtagaacatgtcgtgctttgcgtgctgtggtgatgaagatacccaagtaccagacaccagggctcaatacccaggacaccatccagcgagggccgatgcataccgcccttctgatcaacctcccaagggtcctcagcctgtgaaaatgcaaccaatcgcagtccctgctattcctgtggatgagattagggaggtgaccaagggttttggtgatgaagctttgattggtgagggatcctttggcagagtatacttgggtgttctaagaaatggtaggagtgccgcggtcaaaaagttggattctaacaagcagccagaccaagagttcttggcccaggtgtctatggtgtcaaggctgaagcatgaaaatgttgtcgagttgcttggttactgtgctgatgggacactccgcgtccttgcttatgagttcgctacaatgggttcccttcatgatatgcttcatggaaggaaaggggttaaaggggctcaacccggtccagtcttatcgtggtcgcaacgtgtgaagatagcggttggggcagcgaaaggcctcgagtatcttcatgagaaagcgcagccccatatcatacaccgagacatcaagtctagcaacgtccttcttttcgatgacgatgtagctaagatcgctgactttgatctgtcgaaccaagctcctgacatggcagctcggcttcactcaactagggttctcggaacattcggataccatgcgcctgagtatgcgatgactgggcaactcagctctaagagtgatgtatatagttttggggttgttcttcttgagctgttgactgggaggaaacctgtcgaccatacattgccaaggggacagcagagtcttgtgacctgggctacaccaagacttagcgaagacaaggttagacagtgtgttgactcaagacttggaggggactatcctcctaaagctgttgcgaagtttgcggctgtcgccgccttgtgtgttcaatacgaagcggacttccggccgaacatgagcattgttgtcaaggcgctacaacccctgctgaatgcgcatgcgcgggcgactaaccctggagaacatgctgggtcataagctttgcgtttgcttctctccctcttgttcttgtatgataggtaaggtatatgactcgtcgatgtcgttgttgcggacatgtggctggcagcgtgtaatgtctgtgattattcttcccctgagctgtaaacaagattcttgtatccccacagtatttgattctttctattggtgccgtttttacctatctcaaggcgcaactgctcaagcaatcatccaaacaggccctacaagtcaagttgagcaaattgcgggtaaaaggaatctaatttttttaaattcctctgaacagaatgcctccaggctccggtgaataatcatattcatttgatttgagggtgttcaacaacaccatatatttctaattcaagctgggcttgcgtcatactccgtttcgttttagttgtcgctggatagtgcaaaattgaactatccagcgacaactaaaaagaaa

SEQ ID NO: 97797 - DNA, 516 bp, Zea Mays
caggtagaagttaaataataaaatagaattaaagcaaatcatgtatcatttcaaaattacaagtaataagactaaagcaaaccatatatacgcacaaagaatttaataccttttagagttggtaccggatcccaagagggaggttcaccttccccaactataattggtgttgtagggatctatatataacaactcaaataaagagctagcatacatgatcataaaatatacacttaattctagaagaaaacacatgaatctagacacacaaatgaattgcttactacttactactaaataccccgatggtgaaggcactggtcgtggttgccatcctgaatcacaggccgtaaactaccgggataaacgacgatcgggctgcgtgttttattttcagttggccattctggatcgttcggcgctcaatggattcgctcaagtagggtaggagtattgatgtagcccggtcctgactcagatctcggcaattcatgtcgtaagtgtgtggtgtccacc

SEQ ID NO: 97798 - DNA, 77 bp, Zea Mays
tactgaaagagagaggtctgactgccgaagctgtggtaacagattttgttttcaagaacattcagccgctaaaagac

SEQ ID NO: 97799 - DNA, 1820 bp, Zea Mays
atttgtagccactaaaactatacacacccggccgggtatgtgttggggttaggcctatatatactcgtgctgccatgtctccacacattccatcggtcgtgaaaagaaaaagggaaacaaaccaagctagagaaaagaagaaggtactacatactagctagctagcttagctatgggcaccatcgtcgacgctgacgtcgggttcgcggtgaagaggacgagcaggtcgctggtgccgcctgcgtcggcgacgccgcgggagacgctgcggctgtcggtgatcgaccgcgtggcggggctgcgccacctggtgcggtcgctgcacgtgttcgccgcgggcggcgacaagaagcggcagcaggcgacggcgacgccggccaaggcgctgcgggaggcgctggggaaggcgctggtggactactacccgttcgcggggcggttcgtggtggtggacgcggagggcggcggggagacgcgggtggcgtgcaccggcgagggcgcctggttcgtggaggccaacgccgcgtgctcgctcgaggaggcccgccacctcgaccaccccatgctcatccccaaggagcagctgctgccggagccctcgccggacgtcaacccgctggacatgccgctcatgatgcaggtgacggagttctcgtgcggcggcttcgtggtggggctcatctccgtgcacacgatcgcggacggcctgggcgcggggcagttcatcaacacggtggcggcgtacgcgcggggcgccacgtccgccacgcccaaacccgtgtgggcgcgcgacgtgatcccggacccgcccaagatgccggcgccgccgccgcgcctggacctgctggacctgcgctacttcacggcggacctgagcccggaccacatcggcaaggtgaaggcgcggtacctggagtcgacggggcagcgctgctcggcgttcgacgtgtgcgtggcgcgcacgtggcaggcccgcgtgcgcgcgctgcggctccccgacccggccgcgcccgtgcacgtctgcttcttcgccaacacccgccacctgcttccggcggcggccacggccgggttctacggcaactgcttctacacggtgaaggcgacgcgggcgagcggggaggtggcggcggccgacgtggtggacgtggtgcgcgccatccgcgacgccaaggcgaggctgggcgccgacttcgcgcgctgggcggcgggcggcttcgaccgcgacccctacgagctcaccttcacctacgactcgctcttcgtctccgactggacgcgcctcggcttcctcgaggcggactacggctggggcaccccgacacacgtcctgcccttctcctaccacccgttcatggccgtcgccgtcatcggcgccccgcctaagcccaagcccggcgcccgcatcatgaccatgtgcgtccaggagcagcacctgcccgagttccaggagcagatgatgagccagcaggccgcctaggctagctccttcctgatcatcccatcaccatgttcatctatatcgtcatcgtcatcatgcatgcgcgtgcacgtttggaatatttgttaatcaatcaataacggtgaggtgaggttgctattatatgaagtagtagtaacacctcaacaacaacaacccaatgcaatgggaactcgcgtgtaatttgctccttcttcttcaaatataattccgcctcaattgtatgtatgtattacgtctgtctgtctgtaaaaactaaagctttttgtttctttacatacacggcgcctgtagcaagcaattcacagacgaccatgaacgaaaggaagctccttgattt

SEQ ID NO: 97800 - DNA, 1592 bp, Zea Mays
cggtgtatgctttagccaagttatcccatgtttgttttgcgaagtcttccttgtaaactacaagtagcttcccagtgatttccccattccttcctgcggggatatgtagcaaaccttacttgctttcttaaaagaaaagcatagtactaaaacctccgttcaaaaaaaatatagcctagaaaaaaatctccccacacccaggcggcgaacccaaacccaactccccatgtcctcgctgccgctgccggaatcacctatggccgccgagaacgaagcctgcgactggggtgagatgccgtctgacgcgctcgtgtccgtgtttgggaagttggacgtgatcgagatcctgaccggggccgggctggtctgccgcgcctggcaccgtctcgcggcctcggaccccatgctgtggcgccgcgtcgacatgaggcacatgagctatggctacgagggggagcggctgcagaccgaaaaggtcgaggacatggcgcgcgccgcaatcgacccctccgcgggcaccatggagccgttctttgccgataccattgtcaacgacgacctcctgcgctgcctttctcagaggtcggggaagcgactgcagaccgagaaggtcgaggccatggcgcgcgccgcaatcgaccgctccgcgggcaccatggaggcgttctttgccgatatcttcgtcaacgacgacctcctgcgctacctttctcagagggccccctcattgaagtgcctccatctctccgcctgcaatttcaccgatcaatgttttgcagaggcgattaattgcttccctcagctggaggagctagatgttacattatgcttattgtatggcagcgcgtgtgaggctgttgggagagcctgcccacagcttaaacgcttcaggctgaatgaactctggtctatttctcgaaaggaggatattggcatggaagcattagggatcgctagcaccatgccaagactccaagaacttgagttgattggtaacaatctgacaaatgatgggctcatgtcaatccttgaccgttgccctcgcctcgaatcccttgacattcgcgagtgcttcaacatacaaatggacgatgcgcttaaactgaagtgttccaggatacgagatctaaggcttcctcatgaccccatcttcttcgacgacaccaggtattggccttattacatcaacagtggcgtatttgactcagacattgattccgaggtcggcacatatgatgatccgctggatgatatgggtgagtcgatgtcaatcatgttcaatgatgacttttatgtctgaagcaagacaacgtgttggatgatatgtagtgttgtgggatgatggaatggttccctttttgtgtctgaggtttgggatgctacaagcactttccatatgggaggctgcttttttatgtagtagcaagctcaagtttgtctttgctccttagcaaatctctgtaccgagctcagatatgaaacatctgcattaggacatgcatgaggttaagtctcacctcagcctcccatatgacctgtgacatcttattaggtgatagtcacagattaaatgatgagtctgaacttctatc

SEQ ID NO: 97801 - DNA, 1608 bp, Zea Mays
cgcaccagctgcttcccccctatatatatctatataaaaaaagaaagaaaaaaaatcggacaaacgtgtggcgtcggcagccgggcaggtaggaaaaggtatcagcgtcgccaatctccatggagctcacaggcgccgcgctccggcgatacgcgctgccgtcggcgtccccggtggccgcgagggtggggaggaggaggcgaccagccagggtggcctgcgtcgggggcggggggttcgcggaggaggggcacctcagatactacgaggcggccccgcggaggaaggcggtggaggccgtggcgagggacctgggaaagctccgggccatggggctcgtcgcgggggacgcagccaaggagaaggtcctctcggacgccacggatcttctgctgcaggagctgagccagatgaaggatgcggaatacaagataaacaaggtggagaaagaacagaatgctgctatgaaagcactgaagaagcaggagaagcgcaccaagaagactgccatcatgatgatgaagtgtgaagaagatgagtcatctgagtcgagcgagagcgattgtgaggacgaggcaaccatgaatgtcgagcagggcttggtgatctcaacagcggttcccgaggttgttgcatcaagcatctcagctgtccccgcgatggagtgtgataaggctgcagtgaaggccatgaagaaaatggagaaggaacaaatgaaggccatgaagaagatggagaaggaacagaagaaggctgctaagaaggccatgaagatggagaaggaagcaaagaagatggcaatggctacactgaatggctgcagggatgaagacgattcctcatgctcatcagagtcgagtgaaagtgaatgcgagggccaagttatgaggatgagccgctgcgttacaatcaccgcaccggaaatgccacctccaagcacgggtcttccaatcatagttcctcaaattccagaacctttggcaccacagccgtctcaatctcaaccttcagagccagcaaccgcagtgcaagccaccagagtcagcagcgttgcagtaactgagacatccacaaccagcagaattgaggtctgcatggggggcaaatgcaagaagtcaggcgcggttgctcttctgcaggagttcgagaagactgtgggcaccggaggtgcggtcgtcggctgcaagtgcctggggaagtgcggcctaggtcccaacgtgcggctgaggagcggtgcctctgcggaaggttctgcaaaggggaacccactctgcatcggtgtaggctttgaagatgttggcaccatcgtggctggtctctttggaggcgctgatctgggcatgacacccacctagacctggtggtactacctcgacctagtcgtacttcaagaaatcaagagcacaacttgtaatcacagatgttgcattgaacaaatgtatagtgcagctacggccttgctagtgctactgctaagtttatgtactctctgtctatatagaacacgtatggtaatcttgtttctggtatgtgatccatattggtcagtgattgttttcatggttttcagatttgagcatctgtggcaatatagggatggttaatgct

SEQ ID NO: 97802 - DNA, 1976 bp, Zea Mays
ggacgatgccaatcccagtgtttgtgtttgtcgcctagacgcctcaaggccctctttccccctctccgccttgactcactcacttggccactcttcttcctcctcatcaaaccgctctccagcacttgttcggaagaaaaagaaggtagaacacgctaacaagacaacaaggatcatggggcgcgggcgcggccacctcctgctgctgcacgcgtcccctcacggcgctggcgccggcgccggcggcctgctgagggtcgggctcagcaggcgcggcggcgggctcgaccagcgcgcgctggcggcggccaaggccgcgaggcagcaggaggcaagccgtctcggggcctccggcggcggcgacgtccctctcgtcgactacctcaacacccagtactacggggtcgtcggcatcggcacgccgccgcagaacttcaccgtcatcttcgacaccggcagctccaacctctgggtcccctcctccagatgctacttctcgattgcctgctacctgcaccacagatacaagtcggccaagtctagcacgtacaaggcggacggcgagacctgcaagatcacctacggctccggctcgatcgccgggttcttcagcgacgacgacgtgctggtcggggacctgaccgtcaaaaaccagaagttcatcgagacaacgcgcgaaagcagcataacgttcataatcggcaagttcgacggcatcctcggtctcggataccccgagatctccgtcggcaaggctcctccgatctggcagagcatgcaggagcaggagctgctggcggaggacgtcttctccttctggctgaaccggagcccggacgcggcggcggccggcggcgagctcgtcttcggcggcgtcgaccctgcgcacttcagcgggaaccacacctacgtccccgtctcccgcaagggatactggcagttcgacatgggggaccttctcatcgacggccactccaccggtttctgcgccaaggggtgcgctgccatcgtcgactccgggacttccttgctcgctggcccaacggccataattgcccaggtgaacgaagcgatcggggcagacgggatcatcagcacggagtgcaaggaagttgtgagccagtacggagagatgatcctcgacatgctcatcgcacagacggatccacagagggtgtgcagccaggttggtctgtgcgtgttcgatggcgctcgatctgtcagcgaggggattgaatctgtcgtcgggaaagaaaacctgggctcagatgtcatgtgctcggcctgtcagatggctgtcgtgtggatagagaaccagctccgcgaaaacaagaccaaggagctcatactgcagtacgctaaccagctgtgtgagcgtctgccgagccccaacggagagtcaacagtcagctgccaggagatctccaagatgcccagccttgcgttcaccatcgcaaacaagaccttcaccctaacaccccagcagtacattgtgaagctggagcaaggaggccaaaccgtctgcatcagtgggttcatggcgtatgacgtgccaccgccgcgtggtcctctctggattcttggggacgtcttcatgggagcttaccacacggtgttcgacttcggcaacgacaggattggcttcgcggaatctgcatgagtgtggagagcactctcatctttataaagacgataccctatgtattagggatgtgtagtttactgtctatccactacatgccaacagtacgctgcaaataaatcggtggccaaaattgctgaaaccagaaacgtgaacagtactgctttctttgtttctggagaagagcaaatggatgcttcaagacatgcatgtccgatgtgtattgagaaatagagcgacgagtgctgctcgatcgtcttgaaatttgtttgttcatggtagcacagcttatcacttataaaataatttgtggatcgccttttataggaccaaa

SEQ ID NO: 97803 - DNA, 1995 bp, Zea Mays
ggacgatgccaatcccagtgtttgtgtttgtcgcctagacgcctcaaggccctctttccccctctccgccttgactcactcacttggccactcttcttcctcctcatcaaaccgctctccagcacttgttcggaagaaaaagaaggatcatggggcgcgggcgcggccacctcctgctgccggcagcagccgcctgcctgtgggcgctgtcgtgcgcgctgctgctgcacgcgtcccctcacggcgctggcgccggcgccggcggcctgctgagggtcgggctcagcaggcgcggcggcgggctcgaccagcgcgcgctggcggcggccaaggccgcgaggcagcaggaggcaagccgtctcggggcctccggcggcggcgacgtccctctcgtcgactacctcaacacccagtactacggggtcgtcggcatcggcacgccgccgcagaacttcaccgtcatcttcgacaccggcagctccaacctctgggtcccctcctccagatgctacttctcgattgcctgctacctgcaccacagatacaagtcggccaagtctagcacgtacaaggcggacggcgagacctgcaagatcacctacggctccggctcgatcgccgggttcttcagcgacgacgacgtgctggtcggggacctgaccgtcaaaaaccagaagttcatcgagacaacgcgcgaaagcagcataacgttcataatcggcaagttcgacggcatcctcggtctcggataccccgagatctccgtcggcaaggctcctccgatctggcagagcatgcaggagcaggagctgctggcggaggacgtcttctccttctggctgaaccggagcccggacgcggcggcggccggcggcgagctcgtcttcggcggcgtcgaccctgcgcacttcagcgggaaccacacctacgtccccgtctcccgcaagggatactggcagttcgacatgggggaccttctcatcgacggccactccaccggtttctgcgccaaggggtgcgctgccatcgtcgactccgggacttccttgctcgctggcccaacggccataattgcccaggtgaacgaagcgatcggggcagacgggatcatcagcacggagtgcaaggaagttgtgagccagtacggagagatgatcctcgacatgctcatcgcacagacggatccacagagggtgtgcagccaggttggtctgtgcgtgttcgatggcgctcgatctgtcagcgaggggattgaatctgtcgtcgggaaagaaaacctgggctcagatgtcatgtgctcggcctgtcagatggctgtcgtgtggatagagaaccagctccgcgaaaacaagaccaaggagctcatactgcagtacgctaaccagctgtgtgagcgtctgccgagccccaacggagagtcaacagtcagctgccaggagatctccaagatgcccagccttgcgttcaccatcgcaaacaagaccttcaccctaacaccccagcagtacattgtgaagctggagcaaggaggccaaaccgtctgcatcagtgggttcatggcgtatgacgtgccaccgccgcgtggtcctctctggattcttggggacgtcttcatgggagcttaccacacggtgttcgacttcggcaacgacaggattggcttcgcggaatctgcatgagtgtggagagcactctcatctttataaagacgataccctatgtattagggatgtgtagtttactgtctatccactacatgccaacagtacgctgcaaataaatcggtggccaaaattgctgaaaccagaaacgtgaacagtactgctttctttgtttctggagaagagcaaatggatgcttcaagacatgcatgtccgatgtgtattgagaaatagagcgacgagtgctgctcgatcgtcttgaaatttgtttgttcatggtagcacagcttatcacttataaaataatttgtggatcgccttttataggaccaaa

SEQ ID NO: 97804 - DNA, 2021 bp, Zea Mays
ggacgatgccaatcccagtgtttgtgtttgtcgcctagacgcctcaaggccctctttccccctctccgccttgactcactcacttggccactcttcttcctcctcatcaaaccgctctccagcacttgttcggaagaaaaagaaggtagaacacgctaacaagacaacaaggatcatggggcgcgggcgcggccacctcctgctgccggcagcagccgcctgcctgtgggcgctgtcgtgcgcgctgctgctgcacgcgtcccctcacggcgctggcgccggcgccggcggcctgctgagggtcgggctcagcaggcgcggcggcgggctcgaccagcgcgcgctggcggcggccaaggccgcgaggcagcaggaggcaagccgtctcggggcctccggcggcggcgacgtccctctcgtcgactacctcaacacccagtactacggggtcgtcggcatcggcacgccgccgcagaacttcaccgtcatcttcgacaccggcagctccaacctctgggtcccctcctccagatgctacttctcgattgcctgctacctgcaccacagatacaagtcggccaagtctagcacgtacaaggcggacggcgagacctgcaagatcacctacggctccggctcgatcgccgggttcttcagcgacgacgacgtgctggtcggggacctgaccgtcaaaaaccagaagttcatcgagacaacgcgcgaaagcagcataacgttcataatcggcaagttcgacggcatcctcggtctcggataccccgagatctccgtcggcaaggctcctccgatctggcagagcatgcaggagcaggagctgctggcggaggacgtcttctccttctggctgaaccggagcccggacgcggcggcggccggcggcgagctcgtcttcggcggcgtcgaccctgcgcacttcagcgggaaccacacctacgtccccgtctcccgcaagggatactggcagttcgacatgggggaccttctcatcgacggccactccaccggtttctgcgccaaggggtgcgctgccatcgtcgactccgggacttccttgctcgctggcccaacggccataattgcccaggtgaacgaagcgatcggggcagacgggatcatcagcacggagtgcaaggaagttgtgagccagtacggagagatgatcctcgacatgctcatcgcacagacggatccacagagggtgtgcagccaggttggtctgtgcgtgttcgatggcgctcgatctgtcagcgaggggattgaatctgtcgtcgggaaagaaaacctgggctcagatgtcatgtgctcggcctgtcagatggctgtcgtgtggatagagaaccagctccgcgaaaacaagaccaaggagctcatactgcagtacgctaaccagctgtgtgagcgtctgccgagccccaacggagagtcaacagtcagctgccaggagatctccaagatgcccagccttgcgttcaccatcgcaaacaagaccttcaccctaacaccccagcagtacattgtgaagctggagcaaggaggccaaaccgtctgcatcagtgggttcatggcgtatgacgtgccaccgccgcgtggtcctctctggattcttggggacgtcttcatgggagcttaccacacggtgttcgacttcggcaacgacaggattggcttcgcggaatctgcatgagtgtggagagcactctcatctttataaagacgataccctatgtattagggatgtgtagtttactgtctatccactacatgccaacagtacgctgcaaataaatcggtggccaaaattgctgaaaccagaaacgtgaacagtactgctttctttgtttctggagaagagcaaatggatgcttcaagacatgcatgtccgatgtgtattgagaaatagagcgacgagtgctgctcgatcgtcttgaaatttgtttgttcatggtagcacagcttatcacttataaaataatttgtggatcgccttttataggaccaaa

SEQ ID NO: 97805 - DNA, 1564 bp, Zea Mays
cttcttgggttttcggatagtccaaagcgcatctctttcttgctcaattcgtccaggcgagacctgcaagatcacctacggctccggctcgatcgccgggttcttcagcgacgacgacgtgctggtcggggacctgaccgtcaaaaaccaggtcaaaatctaacacctcctgcctgccttcagtgtcgttgacacatatctctgctccgacgctctcaaattaaaccaacccacacattgcagaagttcatcgagacaacgcgcgaaagcagcataacgttcataatcggcaagttcgacggcatcctcggtctcggataccccgagatctccgtcggcaaggctcctccgatctggcagagcatgcaggagcaggagctgctggcggaggacgtcttctccttctggctgaaccggagcccggacgcggcggcggccggcggcgagctcgtcttcggcggcgtcgaccctgcgcacttcagcgggaaccacacctacgtccccgtctcccgcaagggatactggcagttcgacatgggggaccttctcatcgacggccactccaccggtttctgcgccaaggggtgcgctgccatcgtcgactccgggacttccttgctcgctggcccaacggccataattgcccaggtgaacgaagcgatcggggcagacgggatcatcagcacggagtgcaaggaagttgtgagccagtacggagagatgatcctcgacatgctcatcgcacagacggatccacagagggtgtgcagccaggttggtctgtgcgtgttcgatggcgctcgatctgtcagcgaggggattgaatctgtcgtcgggaaagaaaacctgggctcagatgtcatgtgctcggcctgtcagatggctgtcgtgtggatagagaaccagctccgcgaaaacaagaccaaggagctcatactgcagtacgctaaccagctgtgtgagcgtctgccgagccccaacggagagtcaacagtcagctgccaggagatctccaagatgcccagccttgcgttcaccatcgcaaacaagaccttcaccctaacaccccagcagtacattgtgaagctggagcaaggaggccaaaccgtctgcatcagtgggttcatggcgtatgacgtgccaccgccgcgtggtcctctctggattcttggggacgtcttcatgggagcttaccacacggtgttcgacttcggcaacgacaggattggcttcgcggaatctgcatgagtgtggagagcactctcatctttataaagacgataccctatgtattagggatgtgtagtttactgtctatccactacatgccaacagtacgctgcaaataaatcggtggccaaaattgctgaaaccagaaacgtgaacagtactgctttctttgtttctggagaagagcaaatggatgcttcaagacatgcatgtccgatgtgtattgagaaatagagcgacgagtgctgctcgatcgtcttgaaatttgtttgttcatggtagcacagcttatcacttataaaataatttgtggatcgccttttataggaccaaa

SEQ ID NO: 97806 - DNA, 1428 bp, Zea Mays
ctcctgcctgccttcagtgtcgttgacacattgcagaagttcatcgagacaacgcgcgaaagcagcataacgttcataatcggcaagttcgacggcatcctcggtctcggataccccgagatctccgtcggcaaggctcctccgatctggtaggtatctatctcattgctcttgcacccgccggcgggcggcggccggcccatcacatgtaggttgccaggcagagcatgcaggagcaggagctgctggcggaggacgtcttctccttctggctgaaccggagcccggacgcggcggcggccggcggcgagctcgtcttcggcggcgtcgaccctgcgcacttcagcgggaaccacacctacgtccccgtctcccgcaagggatactggcagttcgacatgggggaccttctcatcgacggccactccaccggtttctgcgccaaggggtgcgctgccatcgtcgactccgggacttccttgctcgctggcccaacggccataattgcccaggtgaacgaagcgatcggggcagacgggatcatcagcacggagtgcaaggaagttgtgagccagtacggagagatgatcctcgacatgctcatcgcacagacggatccacagagggtgtgcagccaggttggtctgtgcgtgttcgatggcgctcgatctgtcagcgaggggattgaatctgtcgtcgggaaagaaaacctgggctcagatgtcatgtgctcggcctgtcagatggctgtcgtgtggatagagaaccagctccgcgaaaacaagaccaaggagctcatactgcagtacgctaaccagctgtgtgagcgtctgccgagccccaacggagagtcaacagtcagctgccaggagatctccaagatgcccagccttgcgttcaccatcgcaaacaagaccttcaccctaacaccccagcagtacattgtgaagctggagcaaggaggccaaaccgtctgcatcagtgggttcatggcgtatgacgtgccaccgccgcgtggtcctctctggattcttggggacgtcttcatgggagcttaccacacggtgttcgacttcggcaacgacaggattggcttcgcggaatctgcatgagtgtggagagcactctcatctttataaagacgataccctatgtattagggatgtgtagtttactgtctatccactacatgccaacagtacgctgcaaataaatcggtggccaaaattgctgaaaccagaaacgtgaacagtactgctttctttgtttctggagaagagcaaatggatgcttcaagacatgcatgtccgatgtgtattgagaaatagagcgacgagtgctgctcgatcgtcttgaaatttgtttgttcatggtagcacagcttatcacttataaaataatttgtggatcgccttttataggaccaaa

SEQ ID NO: 97807 - DNA, 609 bp, Zea Mays
atgggttcttgggtgcgcaccatcacgtcgcccttcaggaagatgctcaacccacagcgcgacggcaagacgaagacgccgcgccaccaccaccaccaccaatctccttctccttcttcgtcagccatggagcagagcggcgagatggacaggtcgcagctctacggcgaggtgatggcgtgcacgtacgaggacgtgcaggtcatgtggaccatgctcgacaaggccaggacctgcgccgccgccgccgcctcgtgaccgcgcgccatagatgaccttcacatgaaacctttatttttttttacagtagttggttttgtatagcatgtttccagccgtctgatgaatccccgctgctgccacagacgcgcgcgcgacacacggagtgcgtgtgtgagctatcttggagagatttagtgactgtgccaacattaatttagcatgtgtttacttaatcttgaggccatcatcttctgtttcctctttggtgtcagagatgcatgcatgtgtactcatcatccgatacatgccagggtttatatatgttatttctggagatctgaactgcctctgcatatatatatagttctgcactagcttttattggtt

SEQ ID NO: 97808 - DNA, 948 bp, Zea Mays
cattccgggtagtcggccacgctccactgctgtcgctggcatggaagcggtgacgtagattctcgacgcgatggcgcatatggagctccacttgatcggtgcgctggcgggcggtggtggcgagcaaggccctgcatcctcctctgccaccatcacttcctctgccaccgcgccacggtacgagtacgacgatgaggtcttcggctcttcggcggccccagcatacgacgacgacctgcttggtgccggccccttcctcaaccccgtgacccccccagacgcatgctaaggtggacaagccatcccgcgacgagatcgacaaggtgctcgcgctactggagtaccacaagatggcttcggtgccagcattttttgacgactataccaccaccagtaactcgtgcaccaagtgttcgacgatgggtttcccctacaccaacgtctcctccgttcactccgcggctcaaggcgttcgaccaaatgcccaacccaagcttcgatggagagcctattttcgacaagtagccggacatccccatcgctgagttcgtcgacatcttgtgccacagcaacggctccgttcaggccagcaaagtgtccgcgctggagatcatgggcagtgggacggtcgtgcgctgatgatcgcggaggccatgcccttgaatgtgatctgtttggctgtattgccaacgacatcgtccgtggagatgagcgcgcccagcttcgggcacaatgcatcagacccacccatgcacaggcatgggaacatctcggcgccaccgtcgggaggcttctagtctcaggtctgcacgatgggccctagcttatggtctcgggtctacacgacgagccccagacccttgccgaggtcggatatgtagcatgtggcctcttcgtgcaggtcgtagtgctggaaggcgatgtgttgatggatgccgcggtgccagg

SEQ ID NO: 97809 - DNA, 567 bp, Zea Mays
cattccgggtagtcggccacgctccactgctgtcgctggcatggaagcggtgacgtagattctcgacgcgatggcgcatatggagctccacttgatcggtgcgctggcgggcggtggtggcgagcaaggccctgcatcctcctctgccaccatcacttcctctgccaccgcgccacggtacgagtacgacgatgaggtcttcggctcttcggcggccccagcatacgacgacgacctgcttggtgccggccccttcctcaaccccgtgacccccccagacgcatgctaaggtggacaagccatcccgcgacgagatcgacaaggtgtaccagcttggggacaagccggttttcaaggccgggggaatgtcagcaacatgctagggaagagacggtgatgtccagcaaggagcagcagcagaccaggaaaggtgaaagcacgcaccaaggctgaggcgtgggctgtgtaaacgagtggccgtgtgttggcttcaccgtgaagggtatttgagtcttgagtctgtacgaactgggtatcgaaaaatcagaatacaaaccaattatcgcc

SEQ ID NO: 97810 - DNA, 369 bp, Zea Mays
atggcgcggctcagccgcctccctacacccgcggaacaaccgcgccagcatcccgccgctaccgaaacaaaatacaatagagctgtgaagaaggtatttttgacaactatgcatcgtacctatcttggtggcgaaatcaacttcactgatggatctattaacgttgctgatgtgtggtcatgtggagtgacgccatacgtgatgctggaattactgatgttacctatacagacgatcaccatccctgagataagaaaccatccatggttcttgaaaaacctcctagctgaccaaatggatgacaatacgatgagtaagcagtacgaggagcctgaacaaccgatgcagagcatgaatgagttcatgtag

SEQ ID NO: 97811 - DNA, 1246 bp, Zea Mays
ttttataaaatatacttatttttaaattataggacatttttaaagttggagatgctttataaaaagggaacgcctccccacgtacgatttgctgttgcattattgcaagaatttggatcagctctaccatattttgtggtggttgagacttgagagcgctgtgttaatggaggcagcaaacaacatggaggacacaagcctgctcatggaatgggcgatggacacgctgctgcaggaggaggaggagcctgcggcgctctacgacagctgcggcgaggcagtagccgtcttcccctcgttgcaagggctccgcgacgcctcccacgcggcggagatggtgcgggagctgatggccgccgtcgaaaccgacgacgcggcaaacagctggacgacgagcggttctggcggcgaggtcaccgacggcggcagcagcggggccactgaccctgcagcccccgcggctgcggaggccgcggatttctacggcggctccgggccgccacactcgcccaactcgttcccgagcggcaaaaccaacaccagtctgcccacggtgagggtgagctggaacttcgtcaccggctcggcggcggcgcagcctcgcagcgacggcgtgctggaggaaggcgccgtcccgatacgccgcgtgccgccggagctggcccaccgccgccggtcgccgccaccgccgccgagaagagcccaccacccaacacgcggcatgggagccgcgtcgtgcacgccggaacacatcgtcgcggagcgcaaacgccgggagaagatcaacaatcgcttgatcgagctctccaccgtcatcccaggactcaagaagatggacaaggcgacgatcctctccgacgcagccaagtacgtgaaggagctccagcagcggctcaaggccctggaagaggctgccgccgccgccgccggcagcagcaggaccaaagcgccgacgacgacggacgagaatggcggctcccggtcgccgacgtcggcatcgtcgtcgtcggggtcaccggcgcttccggagatcgaggcacgcttctccgagaggagcgcgatggtgaggatccattgcgggggcggcaaaggggtggcggcggcagcgctcgccgtggtcgagggcctcgggctcaccgtcgtccatgccaatgtcatgcccttctcgatttgcactatcatcataaccatcacggcagaggcaagtccgttttctttttcttttttttttgtcagacatgtttga

SEQ ID NO: 97812 - DNA, 1682 bp, Zea Mays
tccagctcctatcctcttggctccgcccgtccgcggtccgcgtgtgtgcgctccatccttctccaccacctgtcgccgggccaaccgcaccgccctctgatgtcagtgcctgcccgcaccatttctcgttcttggttccatccagaggttagctccggattctgatgcccgtttcgatttccatctgtaggactgggccgggcgaggagctggccgagctgctgtgggaccgtggcccggcgctgcggagggcgccgccgccgttccagcccttcacctgcagcgccgccggcagcagcaggtcgcaggagctgaagcggcatgcctcggacaccaccaaggcgtcagcgttcgtgaccgccgtctccgtcccgctgggcacgcacgacgccggctccgggctcgggctcgccggcctccccgtccacgacgacgacgacgccgtgccgtggttgcattgccccgtcgccgacgacggcgacggcgacacggcgccgctgccgccggagttctgcgccggcctcctgtccgagtactcggaggtggccgcgccggcgccggccttccacgccgcggccacgccgccggccgaggccgcggccaacaagctggccccgccgagcgccgccggcggaggggagggcgtcttgaacttcaccttcttctcgcggcccctccagcgaccgcaggcggcggcggcgcccgccgccgcggccgcgagcaaccccgtcgagtccacggtcgtccaggcggcagcgaaccggctgcggagcacgccgctgttctccgagcagaggatggcgtggctgcagccacccaaggcgccgcgcaccacagcggcagcggcggcgccacctcctcctccgctggcgcctctgctcccagatagccgccatggggagacggtcggcacggtagctcaacctcagccccggtcgcaaccagaagcaagacctccggatgcggcggcggtgacgacctcttcggtctgctccggcaacggtggtcggagccagctcaagaggagccgccacctggccgcggactgctcggtcagtccggacgaggacctggacgacgagcccggcgcgacgaggaggtcggcggcgcggagcgccaagcgctgccgcaccgccgaggtgcacaacctgtcggagaggaggagacgggaccggatcaacgagaagatgcgcgccctgcaggagctcattcccaactgcaacaaggtcgacaagtcgtcgatgctggaggaggcgatcgagtacctgaagacgctgcagctgcaagtgcagatgatgtcgatggggaccgggctgtgcatgccaccggcggcgatgctgctgccagcgatgcagcagcagctcctgcaccaccaccccatggcgcacttcccccatctcggcatgggcctgggcttcggcatgggcgcggcggcggggttcgacatgctcccgttcccgtgcgtcgcggccggcgcccacttcccgtgcccgccgggggccatgttcggcgtgccggggcaggcgatgccctcgctgccggcggcgttcgctcacatgtacggcgctggcagtggcgccgggccggctgggcagacggaagctgctgatgcggctgctcctgcacggccaggagaggcagagcagggtgatcagcaggtgcagcacgcgaagcagacgtga

SEQ ID NO: 97813 - DNA, 585 bp, Zea Mays
cgacaagcgcatccgacgccctgggcccccaccgccgcacgccgcgcgggcaacgcaccaccgccacgccgcgccgcagcaaaagcgaagccagcgggaatgcacgatcgccgccgccgcggcgcctacttccctgccccgcgtcgctgcggccgtcgccgactcggcttgaggaagcggttgcttgccaatgccaggtcttcaactgaggagcagctgtggaggatgatttctgtatcaacttaatgtatctattccttgtcatacatgtctggtgttgcctgaagctgttgctgtggctgctgattctggaaccaagaagcacatatcccttccatgctgaattggctctctgccttgatcacgtcatcatagagcgtctggctctggttctgcatggctgtggtcgtctcggcaaaggttccatggagcaagtcaggccacttaagttcctctaccaggtaactcacctctgcaaaatttctcttgactaatgtactgggaacgagctagtcaatgggcgtattattggtgggatctttttttgctaggagtgttttttatccatgattccatgcatgatta

SEQ ID NO: 97814 - DNA, 1085 bp, Zea Mays
cgacaagcgcatccgacgccctgggcccccaccgccgcacgccgcgcgggcaacgcaccaccgccacgccgcgccgcagcaaaagcgaagccagcgggaatgcacgatcgccgccgccgcggcgcctacttccctgccccgcgtcgctgcggccgtcgccgactcggcttgaggaagcggttgcttgccaatgccaggtccaaaattgagtgctatgttggttacaaggctttcccagtatgctttcatatgtttatcatcatgctgatgccatatagaggtcttcaactgaggagcagctgtggaggatgatttctgtatcaacttaatgtatctatatattctcaaaagacagttgcattctttgcaagtccttgtcatacatgtctggtgttgcctgaagctgttgctgtggctgctgattctggaaccaagaagcacatatcccttccatgctgaattggctctctgccttgatcacgtcatcatagagcgtctggctctggttctgcatggctgtggtcgtctcggcaaaggttccatggagcaagtcaggccacttaagttcctctaccaggacatgcagttgagccagggaaaaaaggactgtcaggtgaagtaccaacctacctacctaccttttgactgtaaccgctagtgcgcacttcctttttttttttgcaccccagagaagaagtgctcattcgtccactccagaatctgcactgggtgtacctacaggtgattatactattggattgatggacggaggtggcattattctgatgagagaagggaaggcgggcggcggcagcgcagcatggcaattagcaaggctggcgcaagaagatcacggggaaggcaagtttgacaacgggggcatctttttctggggtccccagcaggaagcatatacaggcccaccccttccctagtccctatggcacacacgacgcgatgcatgcatggtgagtgatttacggcttggcaatgtccgttcatttcttctcgtatttgtttacttacaataatgataatgataataataacaatagtggtcactcagcgttattgagagagagaga

SEQ ID NO: 97815 - DNA, 165 bp, Zea Mays
gctagctgctgctcgttttcgtgcgtgcatgtgcacctcattttcttctcacctctgcaagattttattctgtcagacctaagtgctgtcctttttcttcttcttcttcttgcttttcaggtaactcacctctgcaaaatttctcttgactaatgtactgggaac

SEQ ID NO: 97816 - DNA, 103 bp, Zea Mays
cttggtttcatgcgacatcactttctcgagtgtgtagtatatatattcatgcgcggcgtgaaagttttaatatgacaaaaaaaggcgcgaaagctgcccgtgc

SEQ ID NO: 97817 - DNA, 119 bp, Zea Mays
cacatatatatcacatatatacatcacagatatcatcacagacataaatagccaacacaaacataaaaccgtgaccacaaacataaatatccgtcacaaacataagtgttcaacacatg

SEQ ID NO: 97818 - DNA, 1489 bp, Zea Mays
atggccagcgcgacgacgactgagcagcgtgtcagcttcatcgtcgacggagaggctgatgagcagcagcagcagcggcagcatgacgacgaccttgttagccgcgccgccgtggtggcgagggaggtgagcaagcgggtgtctcgcctgtccgtcgaaggaggaggagacgctcagggcgtctacaaggtcggcagtgaaggcggcgttgccaggccaaggaacggacatcctcacgaggccgacgcgggggaggggacgccgcggttccggcgctcgtccggcggcgcgcgggcgctgccgccgccgcacgcgtggctggcgatcgaggacacgaggaagcttcaggaggagcaggggcatgacgacggcgacgacccgcatgcggagcaatgggcgcggctcttccgtggcggcgggacgacgcagcagcagcagcagcggctgaggctgcggcggagcagcttcagcatggtgcggcgcgagcgcgagcgcgcggcgcgggaggcgtggctggaccacgcatgggagatgaagcggagctggcaccagcgcaacggcggcgctcccgacgcgggcacccccgtggtggtggtggtggggacgtcgtcgtcgtcgtcgtcgcactcggaccatcaggccaccgcggcgggcggcggggtggccatggacgtggaggaggtccgcgcgtgccgggacctcgggctggagctgccctccgactgcaccgtggagatccagtgctacgggctgtccggcggcagcagccccacccacggcagcggcgctgattcaccctgcgccggctccagccgccctgttggtgaaggagaaggagcggatccgatggacgtgaaggctcggctcaaggcgtgggcacatgcggtggccctcgcatccaccacccatctcaactcatgatatatggataaaatatatatatagtaatggtcctcgaatttggtatgccgtgttacttagattctcaaacttagaaaactaggaaaacatgtgctggaacttggtggcccattcaaagctgtccaatatcaaatttgcttgaaccagatgccaacatagtgtgccacgttagagtcatttggatccctaaactcaacatgttgtgtcactttagatccccgaacttggcatgttgtgtcatttgggtccataaacctttattactgtgctccaacatggcacgttatatccgcgtccagtttaagcaaatccagttttaaacagttttgcacgggccgaccaagttacctaacctgtttttctgagctccagcgtgccaaattgaaaggactatatatatataagcaaacacctttttcttcttatatatatagccatgtttgtaaccaaatgtcctttttcctttcctttacatacgtatctaattaaatccccacgtgtaagtgtactgctaagtaagtagagtatacttactcttcgatttggaatgtaagcatccattatgtgt

SEQ ID NO: 97819 - DNA, 979 bp, Zea Mays
ttgaaaagtcgcctagcaattcccgaaatccccaaaagtcgcccttcccccaaccctatccaaccgaatccagcggcggcggcggcggcggcggctatggcggcggttatgaacgccgatgtggaggtggtcgacttcgacctagacgacgacgacctcatggacgaggatgccgggccggatccagcgccggcccccacctcgcgtctccgctccaccatcgcgggcgacgacgcgccgcgtaggaccaagggccgcggcttccgcgaggaccccaactcctctgcgccccgcgattcgcgctttggcgcggggggacgcgccgacctcgactcgctcggcggcccgggacccatccaatcaattgaaggatggattgtgttggtcactggagttcatgaagaagctcaagaagatgacctccaaaatgctttccaagaatttgggcaggtcaaaaacctgcatttgaatttggaccgtcgtaccggatttgtcaaggggtacgctttgattgaatatgagaagtttgaagaagctcaggctgcaataaaagaactggatggagctgagctttatgaacaaaaaatgagtgttgattgggcctttagcagtggccctgctaagcgcagatttactcggaaaagatcaccaccaagggctcgttcaaggaccccacccaggagaaggcactgatgtttccccagcaagtcatgaattactatgcgtgatgtagtgaaaaaagtctggggatttcaattctcaaatgttagcctggtgtatgtgtatccggctttgagttgatggacacatggagttacttagccgcttaccattacgtttggcatgccagttggagactattgtaagcgatgattttttttttttttgaggtctgccaagtggcggtgttggatttttatgttcgtgtgtgccttcactttgttatcgccattctgacgagtgatgctttgggttttga

SEQ ID NO: 97820 - DNA, 642 bp, Zea Mays
gtgacaaccagcatagttccagttacattgaggtgattaggtggtgctgcaagagaagtgagaagtcggtttgcatggtagaataagggtgattctgagccctttttgtgttttacagacttatcacttgtctgttctcatagtgttgctatttgtattttatttctgaaaaattttacgggttgcttgcctaagtaagtcttcataaacatttaagtggtgtgtacttttggattgttggcagggtccgattttgtgaaaggaatgcttttgctccccttgccttttcggatcgaaatcttggtgttgactgctaatgcagttttagattgttggtagggtccaattttgtgaaaggaatgttgaactgctgatgagtgatgaggggcgatgatgctcaaccttttccaaaatgcatggcactgagcaatgaaggctgctacaagtgtctactttgagctaaccctctccccacatgaagcctattttaatcacccctttttggtttgtggttgtgcctaggatggtcattcggatatgtgacaaccagcacagttccacttacattgaggtgattaggtggtgctgcaagaaaagtgagaagtcggtttgcatggtagaataagggtgatgctgagccct

SEQ ID NO: 97821 - DNA, 3467 bp, Zea Mays
ctttgaggcgcctaagacttccaaagtaaacacttcacgagcactactccttgctgtctccggcaacaagactttgagttgtaatgtattttttcgtttgggtgcagaggaaacacgaacagagaatagattcaactgtgcttgcaaagaaaacaagaccaaaggatagattcaacagtgcttttgctttattggtttacgttagaggagaagaacgtaccaaaacgttctccccctacccaaccacccccaaacccgtagaattcaaaataaaaccttacaccttgtactagaaagaaaccatggcgactctgcattccatggtgaccctgctgctgctgccgctgcttctactcacagctcggccggcgtcttcctcctcctccatcgacaggtacgaaaaacaccatgaccgtgaagcactgctggcactcaaagaggctctgataggcagctcgggactactaagctcatggaacagcagcagctccgacgtgtgccgttgggccggcgtgacatgcagccgccggcacgcgggcagggtggttgctctgagcctgcgccagagaaacctgggaggcagcatctcccctgccatcggcaacctcaccttcctcaggtcgctcgatctcttcgacaacatgctgtcaggggagataccgcgcactatgacacggctgcgtcgcctgagcttccttgagctggcgtacaactatcttgctggcgagatccctgaaggcttggccaactgctccaacctcgcgtacctgagcgtagaggtcaatcagcttcatggcgggatccctagcggtctgggcttgctgtctcggctacaagtcctgtatgtcggcgagaacagtctgacagggcatgtaccgccatcgctcggcaatctctcggcgctgcagaggctggcactgtatcagaacaagctggaaggagccatcccagagggcctttcccgtctgaggtatctccggtacatccaggcggcgaggaacagcctctccggcacgattccgcctcgcttcttcaacatatcctctctccagtacttcggtttcagctcaaacaggctgcatggtagactgccaccagacgcaggcaggcacctgccggacctccaagtgctccttcttggtggcatcgggaacaacttttctggaacactcccggcttccctctccaatgccactaaactacaagagcttggtcttgctcacaacagcttcgaaggaaaggtgccgcctgagatagggaagctctgcccagagagcgttcaattggggggtaacaagctgcaagctgaggacgatgcggactgggagttccttagacatttcaccaactgcacccgtctagcggttctagatgtcggtggcaacgcccttggaggagtgcttccacgcttcgtagctaacttctctgggccggtgaatactctgatcatggagaagaaccggatgtctggatcaatccctctgggtgtcggaagcctcgttcaccttgaagacctggaattcgggggaaacaacctgcgtggtgttatacctgaggatattggaaggcttcggaacctcaagtttttcacgctggaggagaatctcctgtcaggaggtatacctacctccttcggcaacctcacgcagctgctcagccttttcctgtcgaacaataggctcaatggctccatccctgagaaccttgggagcttgcgcaggttaacgtccatggcattgtccttcaacaggctcaccggtgcgatccccggagcattattcagcctcccgtcgctagctgattcattgctgctttctcataactacctttctggcgtacttcctccacaaatcggtagcctcaagcatgcgacaacattggatctgtcaacaaacaacttatctggagaagtaccaggagcgcttggagactgtgcaagtctagtatacttgtatctggatggcaatagcttcactgggagcatccctccatcgattggtaatctgaagggcttgagcacgctgaatttcacaaggaacggtctgtccggtagcatccctcaggagttgagccagattcatgggctgcaaaggctttgcctagctcacaacaacctgtctggagccattccacagctcctccagaactcgagcgctcttgtagagctggatctctcctacaaccatctgggcagcgaggtgcccacacacggggtgttcgctaacatgagtgggttttctgcaactggaaatgatgggctttgtggtggcgttgcagagctgaaattgcctccgtgtgaggtcaagccacacagccaccggaagcggttgcgactgaagatttttcttccagccattggcatcgctatatgtttatctcttctattggttgcgctccttctgttcaaagggagaaaagggtcggacaggatcagtgctacgcgaaaccatttgttggagaacaagtatccgagagtttcatacctccagctctttgaagcgacggatggttttgcccctgctaatctgataggagctggaaaatatggatctgtttacaaaggaagactgtctatcacaggtgttggggattctgtagtggctgtcaaagtgttcactcttcagcatcctggttcttccagaagctttttggctgaatgtgaggcgctacggcaagtgaaacataggaacttgatcaatattatcacctgttgctccagtatagaccctagagggaatgacttccaagctctagtgttcgacttcatgcccaggtacagcttggacaggtggctgcatccaagaagcgatgaggagacacacaagttgagtctaacccaactgttggacattgcgactgatgtagcagatgcgctagactatcttcacaacagtagccgtccaacagtgatccactgtgatttgaagcctagcaacatcctccttggtagcgactggactgcttatgttgctgactttgggcttgcaaagctgatcagtgaatccatggaccaaccaaatttgaatattgggactgaaagcactattgggatacgaggaaccactggatacgtccctccagaatatggagcaggtggtcaagcatcagttgctggtgatgcctacagctttggggtcactctgcttgagatgttcaccgggaaagcaccaactgatgacatgttcatagaaggcttgaccctgcacttgtttgctgaggcagggttacctgacagggtatcagaaatcattgacccagaacttttcaatgcggagctgtatgaccatgatcctgagatgctcagttgcttagcttctgtgatacgagttggtgtctcatgttcaaaggacaacccgtcagaaagaatgaacatggaacatgctgctgctcagctacacagaatcaaggattgttttccccttatgcatgggttcaacttcactttccacggaagacattctgactaa

SEQ ID NO: 97822 - DNA, 1696 bp, Zea Mays
tctcctcctacgccagtaccagtacacacgaccaccccaaaattagattcaaaatctctctcttcctgccattctgggtcctcagaaacgggcgcgtctcctcccctctcgcacctgctcctcccgtgacagcgacggcgacgagggttcaagggatgactaggggcgcaggtctatggaggtaacttcaagtgaaaggcttggcttgtttgcagcagcctccctccatggctccagctggtgatcggagcgccgccgcccggaaccccacaaaataaaacagctcgtcggtgccccaccccacccaccatctcctcctcaccggctttatatatgcacgcgccgcgcaccccggcgccagctacccatgccatgtcacacgacacggcatcgcacgtccaccaccaccccgccgcagcagaagaccccggcggcagcgagtgccggttctgcgagatgacgcggcagcaccatcctcagtgcgcgcggcggctgccgaagcgcatcatcctggtgcggcacggcgagagccaggggaacctggacatgtcggcctacaccaccacgcccgactaccgcatcccgctgacagcgctgggagtcgagcaggcgcgcgccgcggggcaccgcatccgcgacgtggtggcggctggcggcggcaactggaaggtctacttctacgtgtccccctacgcgcgcacccgggccacgctgcgcgaggtgggccgcgccttcccgcgggaccgcgtcatcggcgcccgcgaggagtgccgcgtccgggagcaggacttcggcaacttccaggtggaggagcgcatgcgcgccgtcaaggagacgcgccagcgcttcggccgcttcttcttcagattccccgagggcgagtccgccgccgacgtcttcgaccgcgtcgccagcttcctggagtcgctgtggcgggacatcgacatggggcggctggaccaggaccccagctgcgagaccaacctggtgatcgtctcccacggcctcacctcgcgggtgttcctcatgaagtggttcaagtggacggtggcccagttcgaccgcctcaacaacttcgacaactgcgagttcagggtcatgcagctgggccccggcggggagtactccctcctcgtgcaccacaccaaggaggagctgcagcagtggggcatgtcgccggagatgatcgccgaccagcagtggcgagccacagccagccgccgcaactgggccgaggagttctcctccttcgtcgacaccttcttccaggaccccaacgactcgtcggacgaggaacaagaagcacaagacaaggagacgaacctgctgctggacctggagtaactacaactattcatccgcccacaccctgtttatttctttctttcaatgcctctttgaaattgtttccattggatttggatgacgctttctgttgctgctagtaggggggaagagcagagcagggaggtatggtgtattcatcagtcattgctgatctctttcttcctcagcagagtcattgctagctggaaaactgacaaagctcgcagtgcttggctgtctttaacagttaactagtagaataaagatgacttttttttaatttgcggctttcttcattaattatttatataatcaagatcctttcatacttcatacagcacagggtacgttggcattctaataacaacat

SEQ ID NO: 97823 - DNA, 1649 bp, Zea Mays
tctcctcctacgccagtaccagtacacacgaccaccccaaaattagattcaaaatctctctcttcctgccattctgggtcctcagaaacgggcgcgtctcctcccctctcgcacctgctcctcccgtgacagcgacggcgacgagtgaaaggcttggcttgtttgcagcagcctccctccatggctccagctggtgatcggagcgccgccgcccggaaccccacaaaataaaacagctcgtcggtgccccaccccacccaccatctcctcctcaccggctttatatatgcacgcgccgcgcaccccggcgccagctacccatgccatgtcacacgacacggcatcgcacgtccaccaccaccccgccgcagcagaagaccccggcggcagcgagtgccggttctgcgagatgacgcggcagcaccatcctcagtgcgcgcggcggctgccgaagcgcatcatcctggtgcggcacggcgagagccaggggaacctggacatgtcggcctacaccaccacgcccgactaccgcatcccgctgacagcgctgggagtcgagcaggcgcgcgccgcggggcaccgcatccgcgacgtggtggcggctggcggcggcaactggaaggtctacttctacgtgtccccctacgcgcgcacccgggccacgctgcgcgaggtgggccgcgccttcccgcgggaccgcgtcatcggcgcccgcgaggagtgccgcgtccgggagcaggacttcggcaacttccaggtggaggagcgcatgcgcgccgtcaaggagacgcgccagcgcttcggccgcttcttcttcagattccccgagggcgagtccgccgccgacgtcttcgaccgcgtcgccagcttcctggagtcgctgtggcgggacatcgacatggggcggctggaccaggaccccagctgcgagaccaacctggtgatcgtctcccacggcctcacctcgcgggtgttcctcatgaagtggttcaagtggacggtggcccagttcgaccgcctcaacaacttcgacaactgcgagttcagggtcatgcagctgggccccggcggggagtactccctcctcgtgcaccacaccaaggaggagctgcagcagtggggcatgtcgccggagatgatcgccgaccagcagtggcgagccacagccagccgccgcaactgggccgaggagttctcctccttcgtcgacaccttcttccaggaccccaacgactcgtcggacgaggaacaagaagcacaagacaaggagacgaacctgctgctggacctggagtaactacaactattcatccgcccacaccctgtttatttctttctttcaatgcctctttgaaattgtttccattggatttggatgacgctttctgttgctgctagtaggggggaagagcagagcagggaggtatggtgtattcatcagtcattgctgatctctttcttcctcagcagagtcattgctagctggaaaactgacaaagctcgcagtgcttggctgtctttaacagttaactagtagaataaagatgacttttttttaatttgcggctttcttcattaattatttatataatcaagatcctttcatacttcatacagcacagggtacgttggcattctaataacaacat

SEQ ID NO: 97824 - DNA, 1826 bp, Zea Mays
acacgaccaccccaaaattagattcaaaatctctctcttcctgccattctgggtcctcagaaacgggcgcgtctcctcccctctcgcacctgctcctcccgtgacagcgacggcgacgaggcattcggaaaattggcgttcctggagcaatccgattgcgagcactctgggaagcatcgacgatcgggaattattgaactgccactacgttgtgacatacatacaagagggttatggagtgttacctgacagatatctagctttatgtcccggagggttcaagggatgactaggggcgcaggtctatggaggtaacttcaagtgaaaggcttggcttgtttgcagcagcctccctccatggctccagctggtgatcggagcgccgccgcccggaaccccacaaaataaaacagctcgtcggtgccccaccccacccaccatctcctcctcaccggctttatatatgcacgcgccgcgcaccccggcgccagctacccatgccatgtcacacgacacggcatcgcacgtccaccaccaccccgccgcagcagaagaccccggcggcagcgagtgccggttctgcgagatgacgcggcagcaccatcctcagtgcgcgcggcggctgccgaagcgcatcatcctggtgcggcacggcgagagccaggggaacctggacatgtcggcctacaccaccacgcccgactaccgcatcccgctgacagcgctgggagtcgagcaggcgcgcgccgcggggcaccgcatccgcgacgtggtggcggctggcggcggcaactggaaggtctacttctacgtgtccccctacgcgcgcacccgggccacgctgcgcgaggtgggccgcgccttcccgcgggaccgcgtcatcggcgcccgcgaggagtgccgcgtccgggagcaggacttcggcaacttccaggtggaggagcgcatgcgcgccgtcaaggagacgcgccagcgcttcggccgcttcttcttcagattccccgagggcgagtccgccgccgacgtcttcgaccgcgtcgccagcttcctggagtcgctgtggcgggacatcgacatggggcggctggaccaggaccccagctgcgagaccaacctggtgatcgtctcccacggcctcacctcgcgggtgttcctcatgaagtggttcaagtggacggtggcccagttcgaccgcctcaacaacttcgacaactgcgagttcagggtcatgcagctgggccccggcggggagtactccctcctcgtgcaccacaccaaggaggagctgcagcagtggggcatgtcgccggagatgatcgccgaccagcagtggcgagccacagccagccgccgcaactgggccgaggagttctcctccttcgtcgacaccttcttccaggaccccaacgactcgtcggacgaggaacaagaagcacaagacaaggagacgaacctgctgctggacctggagtaactacaactattcatccgcccacaccctgtttatttctttctttcaatgcctctttgaaattgtttccattggatttggatgacgctttctgttgctgctagtaggggggaagagcagagcagggaggtatggtgtattcatcagtcattgctgatctctttcttcctcagcagagtcattgctagctggaaaactgacaaagctcgcagtgcttggctgtctttaacagttaactagtagaataaagatgacttttttttaatttgcggctttcttcattaattatttatataatcaagatcctttcatacttcatacagcacagggtacgttggcattctaataacaacat

SEQ ID NO: 97825 - DNA, 702 bp, Zea Mays
atggccgctgcgctaagcgagctcgcatgcagagggacagggcactgggcaggccccgggcgctatgccaggatcgtgccgaggccggatcggggtggtcgcgggcaagctgcacaggctgccgtgccgggggcacgccgcgcaaggtcacgatcggacgcgctggtgcgcagggctgcaccgggggcacgccgcgcagggcgcgagcggccacgccgggagcacgaggctacaccacgggcggccatgctgcagcgggagggagtacagggagcgcagcaggccggccatggccgtcgagaacgaaggggagggagggaaaaagaggagggagttagacggcaaggaggtctcccctccgtggactcgagcgcgggtgcctgggatgggctccggcgaggtggacggcgaagacgggcggagcgacgcctgcagactgtgatggcggttccggctggcctcctgctgcgcgcgacgggcgaggtggggaaggggcgattgaaagtaggaaccggcgtagcgggcatgcgaggcagttttctaggaagaggatcaggagccgagacgactgagccacacgacgagcgtgcacatggccacatgggacgccttgcggcctggctcctggaacgtgcgatgtggggggaagctggtggagcccacatggcgctgggcagtcgccggcttacgcaagcgcgctag

SEQ ID NO: 97826 - DNA, 1591 bp, Zea Mays
ccgccagcgacgctcccttcctctcccaagttcgtgttcttgttgacgtgtatattttgcatcaatttcaaattacctccctatcttagttaaaactagatttgagcggttttcttaaaaaaattgttgataaaatatttggttttagaatttgagaagtgaaataaaaccgcgataataatcatttaggtctacatacactcagtccgtaccagtgcccttcccaaaacatcaaacaaaagagaaaccgccgcctccgcgtcctcctcccttgcgcgctcagagcagaagcccacccagccgccgatggctaacgcggcggcgcagaacagtaccgagcagctgctccacctgaagctcgcgttcctcgctggagagcctccctcctgcgtgctcacgctcgctagagaagctgggggaggttctatcacaccgcatgtccaaaatttccttttggagacttgcactggctcaaacgtagaaagatgtcgagactctacttatacaacaattatttttaaaaagattatatctgaggttgaattatcttcaaatgttgtgattgatgaactttatgaggagtttgctcaacgtatgttgtccgaagcaaaattttcatttttagacaagacaagtcatatttataaagaaatatcttttctatctcctacatatgatcatattttcccaaagcgagtaagtgttgtggcccgactatcatgttcttctaatatgcttgaaggtgatacagggtgttcaatttggccatcaagtttattcttgtctgaatttgttctttcataccctaaaattttctccacaaagtgttgcttcgagctaggttccggtgtcggtctggtgggcatttgtcttaatcatgttggtgcctctaaggttattcttactgatggtgacccatgtacactcagaaacatgaaggaaaatatggaactgaataacttatgcattgagcaggaagattctagagcgctaaaagaaagtaagaataaggtcgagtgcaaatatctttcttgggaagaagtgtccgaaagtgatttatggggctaccagccggacgtagttcttggcgcagatataatctatgacccggtttgtgtgccgcaccttgtccgagtgctctcaatgctgttgagacgagatggtagacaagggggaaccaacggaacatctgttgacgaatttgtatatgaaacggaggctccggtcgcctacattgccacggtggttcgaaatccggagactttcgactgcttcgccacagcagctgccgatacaggattgtccgtcttgaacatcaccagtagcacggctccttcaagatttctcccttacatgctgtcttatgataggtctagtgtgcagcttcttagaattagtttgttgtcatagaacaactacagaaagttgatgtgtgcttccagtatctgtcgttacgagactcgttgtaagggcatcaatcatgtcatttgcattttaaatgcctaacagtttttttttcctaatttgcctctactactgagcatgtaataagcaacttgagtcttgaaaaagttttttttaagttccaaaa

SEQ ID NO: 97827 - DNA, 1574 bp, Zea Mays
ccgccagcgacgctcccttcctctcccaagttcgtgttcttgttgacgtgtatattttgcatcaatttcaaattacctccctatcttagttaaaactagatttgagcggttttcttaaaaaaattgttgataaaatatttggttttagaatttgagaagtgaaataaaaccgcgataataatcatttaggtctacatacactcagtccgtaccagtgcccttcccaaaacatcaaacaaaagagaaaccgccgcctccgcgtcctcctcccttgcgcgctcagagcagaagcccacccagccgccgatggctaacgcggcggcgcagaacagtaccgagcagctgctccacctgaagctcgcgttcctcgctggagagcctccctcctgcgtgctcacgctcgctagagaagctgggggaggttctatcacaccgcatgtccaaaatttccttttggagacttgcactggctcaaacgtagaaagatgtcgagactctacttatacaacaattatttttaaaaagattatatctgaggttgaattatcttcaaatgttgtgattgatgaactttatgaggagtttgctcaacaaattttcatttttagacaagacaagtcatatttataaagaaatatcttttctatctcctacatatgatcatattttcccaaagcgagtaagtgttgtggcccgactatcatgttcttctaatatgcttgaaggtgatacagggtgttcaatttggccatcaagtttattcttgtctgaatttgttctttcataccctaaaattttctccacaaagtgttgcttcgagctaggttccggtgtcggtctggtgggcatttgtcttaatcatgttggtgcctctaaggttattcttactgatggtgacccatgtacactcagaaacatgaaggaaaatatggaactgaataacttatgcattgagcaggaagattctagagcgctaaaagaaagtaagaataaggtcgagtgcaaatatctttcttgggaagaagtgtccgaaagtgatttatggggctaccagccggacgtagttcttggcgcagatataatctatgacccggtttgtgtgccgcaccttgtccgagtgctctcaatgctgttgagacgagatggtagacaagggggaaccaacggaacatctgttgacgaatttgtatatgaaacggaggctccggtcgcctacattgccacggtggttcgaaatccggagactttcgactgcttcgccacagcagctgccgatacaggattgtccgtcttgaacatcaccagtagcacggctccttcaagatttctcccttacatgctgtcttatgataggtctagtgtgcagcttcttagaattagtttgttgtcatagaacaactacagaaagttgatgtgtgcttccagtatctgtcgttacgagactcgttgtaagggcatcaatcatgtcatttgcattttaaatgcctaacagtttttttttcctaatttgcctctactactgagcatgtaataagcaacttgagtcttgaaaaagttttttttaagttccaaaa

SEQ ID NO: 97828 - DNA, 796 bp, Zea Mays
gcgcccccaaattcccgccaggagccgcgcctgcaggctgcagtgaaccgacagcgcccccgcccgccgagtagtcggcatcagcatccgccgagccgccagcgagagagggacacacacagggggaacaagacgaccatgtcctcctgggacgacgacgacgactctgctgctgcggcggcggccacggacgtcgagctgctcaagcgggcgtggcgcgacgagaaggccgcgccggagatcctccgcttcgacttgcccctcgtttcccgcgtccgagagcagatccagctcctcgtacgctcttctccctacccgtctttgcagtgccggagcctgagctggacaccttcgtcttctgcaagaccaagagcgacgtaggcgcgttccagctagatgacataggcgaggaggtcgtggacttggtcgctgatgacctctacgttcttcggtacaagtccatcaagggactcgtcgagagcaaccggatcgaccttgtttggtgtcagtggcggtggcgccgcgagccgtcagggtctgcaggacacagcatgcaagcatgggagatgcgacggcaaaggcttgtaagttgtaacatgtcatgaatcttttggttcaggattcttttcgagtcgtggaaagtaagggatcaatggaagaaaaatactaagcaccgtcgcagaggtaaacctcagttgaaagccgatgtctatgtgccattcgcatatggcttaggctttccatgtatctcataacttgtgttagagaatttgggcctggcccaataataaatctt

SEQ ID NO: 97829 - DNA, 2581 bp, Zea Mays
atctctctctctctctgtctcccaccacctatcttccctccccatgtgggcggcctcgagctctgcttaggtctcacagctgtgctctcgttggttgggtgatccgccccttgtcggctcctttcaactcgagagctccgggacagcgagatctgcgctgtcgccgccttacctttcttacgagctcgcgtgcaggcaggcactgagcagtgagctcccccccgtcttcctcagcctcgtttcccctctcgttgctggatctggctcgcaagatccaatctttcgtgccccctttttccaaagatcctcgcttgggtggttcttcctggagattgctgggaggatgcagcacgaccagaagaagaaggcaccttcagagatggattttttcacagagtatggcgaaggcagcaggtacaagatagaagaggtcataggcaaaggcagctacggcgtggtttgctctgccgtggacactcatactggcgaaaaggtcgctataaagaagataaacgacatcttcgagcatgtgtctgatgcgacgcggatactccgggagatcaagctgcttaggctcctgcggcatccggatattgtggaaataaagcatatcttgctccctccgtcgaggagggagttcagggatatatatgttgtctttgaactcatggagtctgatctgcaccaagttataaaggctaacgatgacttgaccccagagcattaccagtttttcttgtatcaattgcttcgaggattgaaatacatacatacagcaaatgtatttcatcgagatctcaaaccaaaaaatattctggcaaatgctgattgtaagctcaaaatatgtgactttggcttagcaagagtagctttcaatgatactccaaccgccatcttttggacggattatgttgcaactaggtggtaccgagcaccagagttgtgtggatctttcttctccaagtatacaccggcgatagatatatggagtattggctgtatatttgcagaattgttaactggaaaacctcttttcccggggaaaaatgtggtacatcaacttgatataattacagatctccttggaacaccttctcccgaagcaatatcaaggattcgtaatgaaaaggccaggcgctacttgagcagtatgaggcgaaaaaagcctataccgtttacgcaaaagttcccaaatgcagatccacttgcactatgtttgttagagcgaatgctcgcttttgagccaaaagacaggccaagtgctgaagaggctcttgctgatccttatttcaagaatatagccagtgtggatagagagccttctgcacaggctgtcacaaagcttgaatttgaattcgagaggcggagagttacaaaggaagacataagggagcttatatatagggaaattcttgagtatcatccaaagatgctgagggagtttcttgagggaactgagtcaagtggtttcatgtacccaagtgcagtagatcattttaaaaagcagtttgcataccttgaagaacattatgccaagggatctacaggaactccacctgagaggcaacataattcattgccgcggccgtctgttgtctattccgacaaccgatcacaaaccacagccaacatcaccgaggatctttccaagtgtatgctcagagaaaatacacagaagacacatccatattctgcttctgttgcaagtaaatttccaccacatgttcctcaaggtgatgttgcaaggcctggtaaagcagttggttcggtgatgcagtacagcccatgtccagcgcctgctgccgagcgatatgagcaacgaagaatcgctaggcacccagcagttgccccaaacaatatcccttctggaagctcataccccagaagaagccagacctgcaagagtgagacaggtgatgccgaaagccatatggatgcgaaccaagctcggcagccaaagccatatgcagcgaacaaactacctgctaccgttgatagtcgtggtggtcactggtaggatttctgcggtgcaccagaaagccattccaaaccgtttcttaacatgttatcagtatcgattacttctgctgagtgctacattattctgacaaatccagaaatgtagttctgtacagatttgtgttctttttccggatacctgaataccgaaagactgtacaactgtagtttctgattcctactccttgtcgctattcaatcgctaaaggatctgtccctggtggagaagaaccggcagattcaatgcaatgttcttgactgacgtcatggattttgttcttcaacctggtagctctgaagacgaattgaatagctgctagtttctgctaatcatctacagtcaggtgcagagtgttctgggagctagttctgaatatcactgtcacgctgtaatctgcacgtttctgagctcctaacttctaagcatgccactaccgtatccctttgtaatttaatcagctgtaccatccagtactctgtttacatttgtagaaacgctctgcaaagaagctattatgtgggagtttctttgctattattataaatgttctgttgttataaa

SEQ ID NO: 97830 - DNA, 1456 bp, Zea Mays
taaatatagatatttattacataataaattgaacctaatactaaaagattcaccataaggcctataaatacttggtattgtgcttgcccttttctccatccatgtatgttggttcatacattaacttgttgtgtagttctcacccctcattacccatggaccccaacatcaattgtgcatggagtgcctttgaaatagatatggtgaagtcattcatcactagtcacaaaaccaacaatacctacacaaatggtgtagccaagaatcacaatgatattgttgatgagctccaagcaaggttcccatgcaaagagaagcaacaggtaattcagttgtatgttaagctcatagttgagatgaatacaatgcagagaaacaaccaacaagttatggcgagcaatgcccttatgaatgataactttggggtgccaatggaggatatagacatgaacaacatggacatgtttcatggttatatactagacgatgtggaggtgatgaagatggtagaggaaccactgcacaagcagaatattgttcctaagaaaaagaggcaacacccagtgatagtttggacacaagatgagcacaagaatttccttcgtggcctagaagtgtatggtcgtggtaactggaagaacatatctaagtacttcgtccccacaaggacgccaatacagatctgcagccatgcacaaaagtatttccataggaaagagggcaccacaagaaaacaacgatttagcatcaatgatatcgacctctatgacacagatccacgggtgcaaaagaactcttctagtttggaggctctcacctttggtcatactgcttacaacaacaaatattatgactttgagagacaaaatgttgtcttgaacaaactcacacatactagccagacgagcagtggccatgtagctacatggacaagaggtcaacacataatagccagttcatccatagatccaacaatggtgcagagtaactctcttggatgggaggcgctcaccttcactagcgatgctaacaacacaaacaactatgactttgattggcaacatgattctataaacaacctcagatgtgctaaccaagcgagcaataaccaagtggccacttggactagaggtcaacaaacaactagctcttctgcagctccaacgatggtgcagaatacttctcatagctgggatgtgctttccttcactggcaatgcttacaacacaaactactatggatttgatgaacaacaagttgccttaagcaatatcactagaggcaaccatggtgagcagcaaccaggtagttacctagacaagagatgagctatcaactagttcttctgtaattttaatgatggagagggttgagagtgaccatacaacttgtattggccatcaatagggaaggcttccttcataatcaatggacgaacatgtattatatttttact

SEQ ID NO: 97831 - DNA, 1052 bp, Zea Mays
cagcgcaagtgttgtagtatactgaaccctcaaaaaactaactagctagcttagctaaccccggccgatggacatggacccaaggttcaacgtcgactggagtgccaacgagatcgagatggtgagatctctcatcgcttgtcacggcgccagcaacagcacgaacgacgacattgtggatgagctccaggcaatgttcccagggaaggataagcgccaggtaactgacttgtacgttgagcttgtggtggagatgataaacagtggggcagagctgagcagcaaccagctcctgctcaactctggtggggtgcacagcaggacgatggatgggtatttagcagacgagatgaaggcgaagaggatgctgctggaggaacagcgccgtaggaaattagttgctgttcctcgacaggataaccaacaacgtgcagggaggttttggactctggaggagcacaggaatttcctgcgtggcctgcgtgtgtacgggcgcggcaattggaagaacatctccaaggacttcgtcaccactaagacgccggtgcaggtctccagccatgcacagaagtacttccggaggcaggagagcaccacaaggaagcagcgctacagcatcaacgacgtcggcctctacgatgctgagccatgggaggagcagcagcagcagcagcagaacagctcactgccggctttcactagcaccaacaataatgcttattacaacccatactgctatgcctttggtggtggccagcagcagctcgcatcatcccccttccagtgccatgccagtcaggcgagcagcagcagccagacagcagtcacctgggctgcaggaggtcagcagccaccgatttgctcttctgcagctccacccatgatggaggggggtggggctgaaatgtcatggaccacttattattagctagctactagcttggagattttgttcctaagctgttaaatctcgttgttgaagacaacatgtatggtagtttaagtagtagtttcttcatttcaatgaactagtaacaattaatgtgttcccg

SEQ ID NO: 97832 - DNA, 363 bp, Zea Mays
agccggcccgattccgcgcccacccgcggcggattcgactcccagtcgcggatctggtccgtggcgcgacggggaggaacccgagcgcggttgcgacggcgtagagagcatagcccggcgaccgcgcggattccatcgacgacggccgtgcctagaaggagctctgtccagccgccagccaccgatccactccccgcatccttccgggcctggagaagacgtccgccgcaggaacccgtgtgtagcgagggacgtccaaaggccggcgcaagctcaaccacacacgagtaccacttcagcgcgacggcaacagcaaaggcgcaggtaaaaaaatcaatattttagctcatgaggtctgctcgg

SEQ ID NO: 97833 - DNA, 3594 bp, Zea Mays
atggaagcagctgctcttgctcgtagaactagagcagtggaagaactacggcgtttatctacagttgctgaatctgatgacacaccagaacagcgcctatctacagttgctaaatctgatggcatgccagcagaagagcaggaatgcgatcacttctccctgaggggttatgttgctatgcttcagaagaaggatccaaaactttgctctcctcatattttccatagccagccacaatatgatgagcaccatggttcgtccccacttttggtgtcaaagtatcgtcgatgggattgctcaaaatgtcttgaaagagtgaaagtttcaggccatcgacctacatctggaaatgtttctatcgagcaggatggaatgaatgatggctgctctatttcaattgttcggattttgcctaatagggttgatcccagaagaatgttttattgcaaacaacaatcatctcaagggaatgatcaattgaccctttcaaagaccgcccaagaatgcaattcaaaatgcagttctcctggcaacaaagcaattactgcgatgaatattccagtagctgaagaaaatgttctagaggcactcgttgaaagaagtgttccagcgacagaagatttacaggcctctcccaataatattgatgtctcagcaaatatcttgaatgttgtccccaaggatgccagcgatttacctgatgatgttcaaacgatatcaaccattgaagaaaatggcacaaaaaatccatgtagcccaaaacttcgtgtgatgccaaatgaagatgagagtaacatagttcaagatgttcctaattttgaccccaatgagtctaatgtttgtaaaccattatcttgccacaaaggcaaacaaatatctgggcacaaaagcagccaagtctgcaacaagggtccacgccgagcatcgttaaaaaggaaagttggatctgatggtaagaagaaaagggacaaatcaactgacctgcctgatatttcaggtctaaaattttgtcagagaaagccaaaaaagatgaggcttttatcagaactcatagatgctgaccaggtagggatttctgcaaatgccgttcaagtggaccgtactgacagtgttgatctttgtgagggtggtaaaagaaaaaggcaccttgaggttggaaaagataatgatactcctaatcagaaactggacaaaatccagtcaagagctgtcaagaacaaggcaaaacacacagcagtagacaaggtagacgatggaccctctctaatgaactggctgaagaacactcataagaaaattagaacagatagaaaagactcagaacacaagaatcttgattcctctgctatttcaagatcttacccagatatagttgcttctgatgatatgtatcatgattttataccctcagttggggatgtggatcaggtaaagttaccatctactaccagtgccaagcatgggaaggtaaatgcacagaatgacaacctggagcaaaatatgcagaaggtggatgaatccaggaacttgaaacagaggttcttctcaagtgaaaaatcaacgattttgctaaagcgaaaggtacagtccacttcagttgcccatgacgagaacattgagaacagtattataaagagagacatgctcaggccagatgatgtgcctcaaatgggacatgaaggctctgtccagagatgtttggcaaaggtttctcttgataaacagaagatccagaatgtgcctggcctccgcaagaagaatataccaaagaataagaagaaagtaagtcaggaggtgcatgagaaacagaatgtgatagatgacatccccatggacattgttgaacttctcgccagaaatcagcatgagagacacttgatgactcagactgacaccaattctttggaaaactgtcatgatcaacccaaggcaggtgaagttgattgtgctgaatctgcagccaaggattgtcccgtgaattcatcgaatgctaattttgagaaacctttggcattggaaagtaagcagaagtccttacaggatcatgcatcatccagtacacaggctacaaacgtgaatccgcaggatttacatactcagaagttgccacagtgtcctgcagcatccagcaccaaggttccaaatggtcctccttcagaatcgcaaacgcagaattcgcttcaggttcacgcattaccagtaccacccatcgtacagtctttcaatgcgtacccttcaaaattacctgcccttgacatactggagtgtgcccaggaacaaccgacacgattccacagggacgatgaagtcaccatcgcatgtacctcgcctatattttcaaactatcaacatattgctgaaacgcctgctcggagctggagggacagcagggaaaagaagctaatgtgggattctttcaagacagcttcaaggaatccaccatcaccaccaccgtcatatggttttcaattcggaaacaggcttcaagaagttgattcagctcccattcatgcatatggagctcaccagccagtaattgtggccgtagatcagccgagaagtgttccaagcacagcgttggctatggaggctggtaggctgtacgatcaaaggatccctggacagccaggcctttacccaaaagagcccatgcctgcaacacatctcctgaggctgatggactcatcaacagctccaggcttcacaaactaccaaagagctaataggcggcagatggagcttcaaacgcaagctctcggctcgcagtacacacagcatgagcattacaatgcgtcaccgagcacgtcatatggaagccaaccgctgacactggaagacttgtctcggcgtcatttccagcaagacttgcgcaggcctttacgccctcaccctcgtgtcggtgtgctcggttcattgctgcagcaggagatcgcaaactggtctgggaactgcgggccgcagtctgggtacagactaggtgattgtaaagggacaaggccgcctgatgccaacagagcaggaaactacgagaccttgagctcggcaggatggaacaccctgcagttgggttctgttagctctgctgccaatctggagtaccggtttccatggtatggtacgggtcagccttcgaccagtggcaatgggaggaccattcatccgttggataagctcgtgaggaaggatatctgtgtgactaacagaaacccagccgatttcactgtaattagtgacaagaacgagtacatgagaaccctttgaaagagagaaaggctttgtttaagcaatcatcattggtagagcgaggaaggctttgagcagcagctaccgggagccgggtgcagcctccagttttgttctgtgcaaatgttttatacataggcgaagaactaatgtcgggttgccatggaaaaccccaataaacttgtgtgttgtaggtagataggcagatgtacaagacaagcatgcgtggctgtggccatagtaatgtttttctttttctttttggttttgcctttttttttggtactcctgtcccagaataaactgcaatttctacaattcaaaatttatcccaaaagaatgggccgtata

SEQ ID NO: 97834 - DNA, 1977 bp, Zea Mays
ccactgcgtcagtgacccaccaagatcgcggaaaccctagcttctcaccataactcagcctcacctagcctccacactccttcccccgccgcctccttccgagacctccttaccgccggcttcccttccctccggacctccaccgcgtgcgcgtgaaggatagcggccgcggcgatggggaaggcgtccaagggctcacggaaggggaagaaggcgtggcgcgccaacatcggcaccgacgacattgacgattttttcgagaagcagacgcgcgatgcccacgcgggcaccgccgccatcccttctcttccttcggactcgctcttctttgtcgacaagcccgccacctccgcatctacttccgccgccggcgcctcggacacaaccaccaaagatattcctgtcaaaaggaagatcgagaagaagagggagaaggttctttatcatgagagtgtactgaagcggaatccgtttgtgcagccaatcccatcttctgtgccgggcaagaaggataagaagataaagaagaagaaattgcaggagacacagggagagaaaagtgttcctatggaaaatgattctgtagttaagaactttgacatctgggctgtggatggtaaaggtgattccaaggccaaaaagagatctactatatcagttattcctgctgttgaagttgagcctgcaggatgttcatttaatcccccattcgaagcgcatcaagattctcttgctcaagctgtagcagatgaaaaacgcaaagagtacatgaaagagctggggccaacacctgtaccactcatagttcctggtgaagctatagccgaagaagataaattttttcttgatgctggtgaaggagatgaagatgaagatgctgcagaaaatggagatcaggatgctgatacttccattggacaaaggaagaacacaacaaaaagagttacaagagtagaaatgaacagaagagctcgccggaaggagaggttaagagcagaagcgaaagcaaagaaaatggaaaatattttgaaagaaattgacaggtaggtgtttatgttcttggatcatcgaggttactgtaaatgtgcttaggaaaaccggagttctgtacttttgcagcttgccaaatataatggatgagatagctaaagaggacaaggaaaaggagaagaggcacaaacgtcgaactgtggttaaagaggagagacgtaaatcaggcccacctcgtctgggcagacacaaatttgagccagctcctgttcaagttctattgacagaagagattagtggctcacttagaaagctaaaggtaacaagtgcttctcgttttgttgattttctatttttctctctgggttagttaactataaaattcgtgcaggggtgttgtaatcttgcaagggatcgctacaagagcattgagaaacgtggaatacttgcaccaagcaagagaataagcaaacgtcggtagagaaggcaagttccaatctgagggatgatatggtgaagctggattgaagaggatttactagatttgagaagaccctttggatgttcactgtcggaatgttcccctctttcagtgtcttgcgaaagtacctaacgattggttctgtcgttgtgggctcgttgttgacgctagtttcataggatctgggatgcactcatatacctgggctggtcttgatgcatgatggcgtatcgcttggtatgtatgttatccacacatgcgtattccaatccaaccccaataaaaattcggcaaaaaaaaaaacaaacgaataggaaagtcgcgtcgattcctagctattgtgtttatccctgtaatataatacatacgggaagtttattggaaaactcactatcattcaaataaacgtgaatgcagattcctaaactctatagcgtgcagaccctttaatcttcttcacaaatccagctagattatccaagaatctaatttcacacaaaaaaaaa

SEQ ID NO: 97835 - DNA, 1905 bp, Zea Mays
ccactgcgtcagtgacccaccaagatcgcggaaaccctagcttctcaccataactcagcctcacctagcctccacactccttcccccgccgcctccttccgagacctccttaccgccggcttcccttccctccggacctccaccgcgtgcgcgtgaaggatagcggccgcggcgatggggaaggcgtccaagggctcacggaaggggaagaaggcgtggcgcgccaacatcggcaccgacgacattgacgattttttcgagaagcagacgcgcgatgcccacgcgggcaccgccgccatcccttctcttccttcggactcgctcttctttgtcgacaagcccgccacctccgcatctacttccgccgccggcgcctcggacacaaccaccaaagatattcctgtcaaaaggaagatcgagaagaagagggagaaggttctttatcatgagagtgtactgaagcggaatccgtttgtgcagccaatcccatcttctgtgccgggcaagaaggataagaagataaagaagaagaaattgcaggagacacagggagagaaaagtgttcctatggaaaatgattctgtagttaagaactttgacatctgggctgtggatggtaaaggtgattccaaggccaaaaagagatctactatatcagttattcctgctgttgaagttgagcctgcaggatgttcatttaatcccccattcgaagcgcatcaagattctcttgctcaagctgtagcagatgaaaaacgcaaagagtacatgaaagagctggggccaacacctgtaccactcatagttcctggtgaagctatagccgaagaagataaattttttcttgatgctggtgaaggagatgaagatgaagatgctgcagaaaatggagatcaggatgctgatacttccattggacaaaggaagaacacaacaaaaagagttacaagagtagaaatgaacagaagagctcgccggaaggagaggttaagagcagaagcgaaagcaaagaaaatggaaaatattttgaaagaaattgacaggtaggtgtttatgttcttggatcatcgaggttactgtaaatgtgcttaggaaaaccggagttctgtacttttgcagcttgccaaatataatggatgagatagctaaagaggacaaggaaaaggagaagaggcacaaacgtcgaactgtggttaaagaggagagacgtaaatcaggcccacctcgtctgggcagacacaaatttgagccagctcctgttcaagttctattgacagaagagattagtggctcacttagaaagctaaaggggtgttgtaatcttgcaagggatcgctacaagagcattgagaaacgtggaatacttgcaccaagcaagagaataagcaaacgtcggtagagaaggcaagttccaatctgagggatgatatggtgaagctggattgaagaggatttactagatttgagaagaccctttggatgttcactgtcggaatgttcccctctttcagtgtcttgcgaaagtacctaacgattggttctgtcgttgtgggctcgttgttgacgctagtttcataggatctgggatgcactcatatacctgggctggtcttgatgcatgatggcgtatcgcttggtatgtatgttatccacacatgcgtattccaatccaaccccaataaaaattcggcaaaaaaaaaaacaaacgaataggaaagtcgcgtcgattcctagctattgtgtttatccctgtaatataatacatacgggaagtttattggaaaactcactatcattcaaataaacgtgaatgcagattcctaaactctatagcgtgcagaccctttaatcttcttcacaaatccagctagattatccaagaatctaatttcacacaaaaaaaaa

SEQ ID NO: 97836 - DNA, 1829 bp, Zea Mays
ccactgcgtcagtgacccaccaagatcgcggaaaccctagcttctcaccataactcagcctcacctagcctccacactccttcccccgccgcctccttccgagacctccttaccgccggcttcccttccctccggacctccaccgcgtgcgcgtgaaggatagcggccgcggcgatggggaaggcgtccaagggctcacggaaggggaagaaggcgtggcgcgccaacatcggcaccgacgacattgacgattttttcgagaagcagacgcgcgatgcccacgcgggcaccgccgccatcccttctcttccttcggactcgctcttctttgtcgacaagcccgccacctccgcatctacttccgccgccggcgcctcggacacaaccaccaaagatattcctgtcaaaaggaagatcgagaagaagagggagaaggttctttatcatgagagtgtactgaagcggaatccgtttgtgcagccaatcccatcttctgtgccgggcaagaaggataagaagataaagaagaagaaattgcaggagacacagggagagaaaagtgttcctatggaaaatgattctgtagttaagaactttgacatctgggctgtggatggtaaaggtgattccaaggccaaaaagagatctactatatcagttattcctgctgttgaagttgagcctgcaggatgttcatttaatcccccattcgaagcgcatcaagattctcttgctcaagctgtagcagatgaaaaacgcaaagagtacatgaaagagctggggccaacacctgtaccactcatagttcctggtgaagctatagccgaagaagataaattttttcttgatgctggtgaaggagatgaagatgaagatgctgcagaaaatggagatcaggatgctgatacttccattggacaaaggaagaacacaacaaaaagagttacaagagtagaaatgaacagaagagctcgccggaaggagaggttaagagcagaagcgaaagcaaagaaaatggaaaatattttgaaagaaattgacagcttgccaaatataatggatgagatagctaaagaggacaaggaaaaggagaagaggcacaaacgtcgaactgtggttaaagaggagagacgtaaatcaggcccacctcgtctgggcagacacaaatttgagccagctcctgttcaagttctattgacagaagagattagtggctcacttagaaagctaaaggggtgttgtaatcttgcaagggatcgctacaagagcattgagaaacgtggaatacttgcaccaagcaagagaataagcaaacgtcggtagagaaggcaagttccaatctgagggatgatatggtgaagctggattgaagaggatttactagatttgagaagaccctttggatgttcactgtcggaatgttcccctctttcagtgtcttgcgaaagtacctaacgattggttctgtcgttgtgggctcgttgttgacgctagtttcataggatctgggatgcactcatatacctgggctggtcttgatgcatgatggcgtatcgcttggtatgtatgttatccacacatgcgtattccaatccaaccccaataaaaattcggcaaaaaaaaaaacaaacgaataggaaagtcgcgtcgattcctagctattgtgtttatccctgtaatataatacatacgggaagtttattggaaaactcactatcattcaaataaacgtgaatgcagattcctaaactctatagcgtgcagaccctttaatcttcttcacaaatccagctagattatccaagaatctaatttcacacaaaaaaaaa

SEQ ID NO: 97837 - DNA, 1806 bp, Zea Mays
ccactgcgtcagtgacccaccaagatcgcggaaaccctagcttctcaccataactcagcctcacctagcctccacactccttcccccgccgcctccttccgagacctccttaccgccggcttcccttccctccggacctccaccgcgtgcgcgtgaaggatagcggccgcggcgatggggaaggcgtccaagggctcacggaaggggaagaaggcgtggcgcgccaacatcggcaccgacgacattgacgattttttcgagaagcagacgcgcgatgcccacgcgggcaccgccgccatcccttctcttccttcggactcgctcttctttgtcgacaagcccgccacctccgcatctacttccgccgccggcgcctcggacacaaccaccaaagatattcctgtcaaaaggaagatcgagaagaagagggagaaggttctttatcatgagagtgtactgaagcggaatccgtttgtgcagccaatcccatcttctgtgccgggcaagaaggataagaagataaagaagaagaaattgcaggagacacagggagagaaaagtgttcctatggaaaatgattctgtagttaagaactttgacatctgggctgtggatggtaaaggtgattccaaggccaaaaagagatctactatatcagttattcctgctgttgaagttgagcctgcaggatgttcatttaatcccccattcgaagcgcatcaagattctcttgctcaagctgtagcagatgaaaaacgcaaagagtacatgaaagagctggggccaacacctgtaccactcatagttcctgaaattttttcttgatgctggtgaaggagatgaagatgaagatgctgcagaaaatggagatcaggatgctgatacttccattggacaaaggaagaacacaacaaaaagagttacaagagtagaaatgaacagaagagctcgccggaaggagaggttaagagcagaagcgaaagcaaagaaaatggaaaatattttgaaagaaattgacagcttgccaaatataatggatgagatagctaaagaggacaaggaaaaggagaagaggcacaaacgtcgaactgtggttaaagaggagagacgtaaatcaggcccacctcgtctgggcagacacaaatttgagccagctcctgttcaagttctattgacagaagagattagtggctcacttagaaagctaaaggggtgttgtaatcttgcaagggatcgctacaagagcattgagaaacgtggaatacttgcaccaagcaagagaataagcaaacgtcggtagagaaggcaagttccaatctgagggatgatatggtgaagctggattgaagaggatttactagatttgagaagaccctttggatgttcactgtcggaatgttcccctctttcagtgtcttgcgaaagtacctaacgattggttctgtcgttgtgggctcgttgttgacgctagtttcataggatctgggatgcactcatatacctgggctggtcttgatgcatgatggcgtatcgcttggtatgtatgttatccacacatgcgtattccaatccaaccccaataaaaattcggcaaaaaaaaaaacaaacgaataggaaagtcgcgtcgattcctagctattgtgtttatccctgtaatataatacatacgggaagtttattggaaaactcactatcattcaaataaacgtgaatgcagattcctaaactctatagcgtgcagaccctttaatcttcttcacaaatccagctagattatccaagaatctaatttcacacaaaaaaaaa

SEQ ID NO: 97838 - DNA, 1468 bp, Zea Mays
ttatactgcagtgctcttctccatggagtttgcaactctggagttggggtgtttggctaggtctggccagctcctgagttttgttctagagcaatgccaaacactccttgaataaaataaaataatttctgctcgctcctatttcacgcctagggcttggggggagcctccacgtgagggagtgttggaatacaattggattgctcatgtcttttcatcaacttaatcttttgtattgaactggtcggtgcatgcaactcaatgcatataaatatcttttaagtgtttcatcagggcgagaaagcatgtctgttagcatataagcatgaaaatgtgttctgtttacatgttgaggttgcttctaatgtttacctttgaaatacttgtttggcatcttatttgtataaactgtgtgctttgtgatgataaatgcttttgagtagtgtttgactaaccatttatgtggcttgcagaaattttttcttgatgctggtgaaggagatgaagatgaagatgctgcagaaaatggagatcaggatgctgatacttccattggacaaaggaagaacacaacaaaaagagttacaagagtagaaatgaacagaagagctcgccggaaggagaggttaagagcagaagcgaaagcaaagaaaatggaaaatattttgaaagaaattgacagcttgccaaatataatggatgagatagctaaagaggacaaggaaaaggagaagaggcacaaacgtcgaactgtggttaaagaggagagacgtaaatcaggcccacctcgtctgggcagacacaaatttgagccagctcctgttcaagttctattgacagaagagattagtggctcacttagaaagctaaaggggtgttgtaatcttgcaagggatcgctacaagagcattgagaaacgtggaatacttgcaccaagcaagagaataagcaaacgtcggtagagaaggcaagttccaatctgagggatgatatggtgaagctggattgaagaggatttactagatttgagaagaccctttggatgttcactgtcggaatgttcccctctttcagtgtcttgcgaaagtacctaacgattggttctgtcgttgtgggctcgttgttgacgctagtttcataggatctgggatgcactcatatacctgggctggtcttgatgcatgatggcgtatcgcttggtatgtatgttatccacacatgcgtattccaatccaaccccaataaaaattcggcaaaaaaaaaaacaaacgaataggaaagtcgcgtcgattcctagctattgtgtttatccctgtaatataatacatacgggaagtttattggaaaactcactatcattcaaataaacgtgaatgcagattcctaaactctatagcgtgcagaccctttaatcttcttcacaaatccagctagattatccaagaatctaatttcacacaaaaaaaaa

SEQ ID NO: 97839 - DNA, 2777 bp, Zea Mays
gtagctcgcagccgactctgttctctgtaccagcccaacccagaagcctatactcgttacgattacgagcccaccagcatctcctctgcacgggggcattccaccgagcacctcacgtgatctccaccccgcggcggcggcgcgagcaccgtctccgcctctccgctctccggcgaatcaaacccctccggcgttgcccctcggttgcctttcccctccgccacaatgcggtttgacctggatggcctgcccgtgcacttcccgtacgcggcgatctacccggagcagcacgcgtacatgggggagctcaagcgcgccctcgacgcgcgcgggcacgcgctgctcgagatgcccacgggcaccggcaagacggcggcgctcatctccctcatcacctcctactccctcgccaacccggcccgcccgctccgcctcatctattgcacccgcaccgtgcacgagatggagaagaccctcgccgagctccgcctcctcttcgcccacctcccgcccgcggcctcccgctccctcctcgcgctcggcctctcctcccgcaagaacctctgcatccacccgcaggcgtccgccgccgccgcccgggactccgtcgacaccgcctgccgccgccttacggcctcctgggtccgcgagaaggcctcctccgacccggactccaccccgctgtgcgagttctacgagacgttcgaccgggccgctgccgccggcgacctcgcctccttcatgccgcccggggtgtacaccctggcagacctccgcgcgctcggaagggagcgccgggtctgcccttacttccttgccaggcagatggtcaagtacgccaatgttgtggtgtacagctaccagtacctgctcgaccccaaggtggccagcattgtgtccagggagatgcagaaggagtgtgtggtcgtgttcgatgaggctcacaacattgacaatgtctgcatagaggcgctgagcgtcagcatccgcaagcagacgctggaaggcgcagagcgaaatctgcggcgcatctcgcaagagatcgacaggttcaaggccaccgatgccaataggcttcgtgctgaatacaacagactggtggatggactggcacagcgaggaaatctaccaatatcggatgcttggctcgcgaatccgtctttgcctgatgacatcttgaaggaagctgttcctggaaacataaggagggctgaacattttcttgctgtcttgcggaggcttgtgagattccttgatggccggcttgaaacagaaaatgttgagaatgaaatgccagtttcctttgttgcctcaatccattcccaggctggaatcgaccaaaaaatgctgaggttttgttatgaccggctacactccctaatgatgacattagagataactgatacagatgagttcatgcacatacagaccatatgtgactttgccacactgattggaacttatacacggggcttttctattataatagagccgtatgatgatagaatgcctgatattcgtgatcctgttattcagctgagttgccatgatgcttcactcgcaataagacctgtttttgatcgtttcgaaacggttgtgatcacttctggaactctcagcccaatagatctttaccctcgtctcttgaattttaatcctgtcataagcagaagcttcaccatgtccttaacaagagattgtatttgtcccatggtcttgacccgaggaagtgatcagctacctgtgagtacaaagttcgatatgcgtagtgatcctggtgttgtgaggaattatggccgcctcttgctggaaatggcttctgctgttccagatggcatagtttgcttttttgtcagttattcctatatggatggcattgtcaacagctggcacgaaatgggaattctgcaggacatcatgcaacataaattagtgtttatcgaaacaccagatgtcgttgagacaacattggctcttgataactacagaaaggcatgtgattgtggaagaggtgccattttcttctctgttgccaggggcaaagttgctgaaggtattgattttgatcggcactatggcagattagttatcatgtttggtgttcctttccagtacacattgagtcggatattgcttgctaggttggagtacctgcgggaaacttttcagataaaggagggtgacttcctaacatttgatgctttgaggcaagcggcccaatgtgtcggtcgtgttattcgctccaaagctgattatgggatgatgatatttgctgacaagagatacagtcggcatgataaacggtccaagttgcctgggtggatactctcgcatttgcatgatgcgcacctaaatctgagcactgatatggctctccatatagctcgtgagtttctccggaggatggcacagccatatgacaaggcgggaagcggtggcaagaaaacgctgttaaccgaggaggatctggagaatttggcgcaggatggcatggcgatgtaaaaaaatgagggtactgttgtacatttctttttgtagccattttatggcggtagataacttgtttgaagcatcggtaatgacgtgtggggccaaatcattcttactcgagttcgcacggatttgatcatccgaacatcatggtcgatgttcttctgagtgggtgtgggtgtggggccaaatcatgtcagcgggccatctgcagctacgtatacagacgaggatccaaacataaccgagaggaaacatagatcatgcttctaatcaaagaaaaaaaa

SEQ ID NO: 97840 - DNA, 1184 bp, Zea Mays
aaataaaatacctgtaaatgttatatagccaagataagatgtatatgcattagttccaataacgaaaacctggttttactgtttttcaggacatcatgcaacataaattagtgtttatcgaaacaccagatgtcgttgagacaacattggctcttgataactacagaaaggcatgtgattgtggaagaggtgccattttcttctctgttgccaggggcaaagttgctgaaggtattgattttgatcggcactatggcagattagttatcatgtttggtgttcctttccagtacacattgagtcggatattgcttgctaggttggagtacctgcgggaaacttttcagataaaggagggtgacttcctaacatttgatgctttgaggcaagcggcccaatgtgtcggtcgtgttattcgctccaaagctgattatgggatgatgatatttgctgacaagagatacagtcggcatgataaacggtccaagttgcctgggtggatactctcgcatttgcatgatgcgcacctaaatctgagcactgatatggctctccatatagctcgtgagtttctccggaggatggcacagccatatgacaaggcgggaagcggtggcaagaaaacgctgttaaccgaggaggatctggagaatttggcgcaggatggcatggcgatgtaaaaaaatgagggtactgttgtacatttctttttgtagccattttatggcggtagataacttgtttgaagcatcggtaatgacgtgtggggccaaatcattcttactcgagttcgcacggatttgatcatccgaacatcatggtcgatgttcttctgagtgggtgtgggtgtggggccaaatcatgtcagcgggccatctgcagctacgtatacagacgaggatccaaacataaccgagaggaaacatagatcatgcttctaatcaaagaaaaaaaatccgcactcgatgcgcaggtgacgcctcattacatggctgggattcatatcttggtaaaaaccgcaagggtctgttttagaagtgaattatttttatagcttgtattcaatatcaaggttttggataataccgttgtattttatgacattagatgtttggttgcaattctggaaaccaatttttaaaaccattgtattttctatatatcatggtatttttagagtattg

SEQ ID NO: 97841 - DNA, 2035 bp, Zea Mays
agactgtcaataagtttgatccccccccccttctcaccaaaaatatgcgtaaatatataccattcatttcggaacgaagagccgttagtacagtgaaggtgccatgggatctgatatatatattctccccacttggtgtaatctagtttgccgttggatattttgatatgataacggaaagcgctaagcagcagcggccagcatttgttctttgcccacttccctccctccaggctccagtccggtcctgatctctgtccagctagctagctagcgcctccagccgtccagccagcggcggcgcgacgattcttccctccccggccggaagcccccgcacgccgccgcccctgcaggcaatctgagttgtctctggcagagatggataggctcgacggctctgcccgcctcctgctcgtctctgatctggaccagacgatgatcgaccatgatgaccgggagaacctgtcgttgctgaggtttgaggcgctgtgggaggcggagttcgcccaggactctctgctggtcttctccacggggaggacgccggtgagctacaagggcttgcggagggacaagcctctggtgacgccggacgtgaccatcatgtccgtggggaccgtgatagcgtacggcgaggagatggtccgtgacgtcggctgggaggagcggctggacagcgactgggacagggccgtcgtcgtggaggagacggctaggctgccccagttgacgcgcatgcagccggagaggaaccagggtccccataaggtgagcttcttcgtcgacaagcagggtgctcaggaagtgatggactatctccccaagaagctggagagacgtggggtggatgtgaagatagtctacagcagcgggaacgccctggacgtgttgccacgaggtgcaggcaaggggcaggcgctggtgtacctgctcaagaaactggattccaacgggaagccgcccaagaacaccctcgtctgtggcgactccggaaacgacgccgagctattcggtgtgccgtctgtacatggagtcatggtctgcaacgcccaagaggagctggtccagtggtaccaagagaacgcgagggacaatcctaggatcatccaggcgaccgagagatgcgctgccgggatcatgcaggccatcgggcacttggggctagggcccaacgtctctgcgagagaccttgttgggttccctgcttattatcccaacaacaacaagaagggggcagctgccaccgctaagcccgcagatgtggtggtgaggttctacgtcctctacgagaagtggcggaggggggagctccccagttcgaattatttttcttcttcgtcagccatgcgctacttgaaaagcatcactcatccgaacggtacaatcattcacccttgtggatcggagcgttctcttcacgcgtctgttgacgctctgctgagttcttgctacggggacaagaagaacttccgggtgtgggtggacaggctggtgacatcgcccatcggcacaagcagctggttggcgaggttcgatagctgggagatggaaggtggcgttcggtactgctgccgcactactattctgctcaacatcaagcctgagagtccagagggcctcgagctcacacacatccacaagacctgggtccaagggcactctgcagggccagggagtgcgctcgtcttctagactaaatcagtcaaacgcgaagcagcatgtcttgttcaattaatttccagagagaaagaatccatccaaatgtacgacagacagacagacagacagacagacatgcccaatgctgggtacttccatattccatatgtacaacaaaacaaaacaaaagatgtcccgatgctgggtacttctcatgaattattagctgaagctcttgtcttggatttttcatatttgcagaatgtagtttccagtgtggcccaatgccatcattcagaatgctagctgaaaagttagcgctgttatttgtacttcacaagaaaggaaaagagatacattttaggtttcaata

SEQ ID NO: 97842 - DNA, 421 bp, Zea Mays
ccgacaaatgcatacattaaatttcaattttcaaatcaaaactcagatcatctgagttcaggtcttgcagttggaaacaagtgggttccgtttccggtccttggcctgccatcagatgccttgctttgcgtcactcatctgaacctgggaaggtgcaggtgctaggccggcagtgtaccaagttcacacaatccagctctagccatctgacatctccaaaacaacagaatacataacatttcatcaaacactcaacagtctctggctaattacttaccacccaggttcagctgagaagggggcgaaaacaggctacaacacatatgaacacctacactacaaaatttacagacgaggaaaacaaaaggttaggcccgcattactcaatcacccagcacatggcagcacaggaatactttag

SEQ ID NO: 97843 - DNA, 96 bp, Zea Mays
gttgattgttgcaacaagagtgcatagctatatatttctgggaacatgtggaattgaaatgtataagcaaaggaaatcacgaagcagagggaaatc

SEQ ID NO: 97844 - DNA, 627 bp, Zea Mays
atggtacaatgtatgaccatcaaagccttttttttgggtaagcattcaaaacccatgaaaggtctcttggagaagcattctaataacaaggcaaaacgagaacagaggactccagcagaatgttctaataactttgttttacttggagatgcccagaatgttcgacaagggcagagttacatcagaactccggcagtattgtcgagcgccttcttcgcaatcttgaatttgctagccaagtccttccctgagtcctcggcgatcacgtgctgcttgatgaacatcacaatgccatccctcaatacctcgagctctggaaggccagcgacacgagtgaagacattccacacgcgtgcatcgtctttctgtagcaaggtctcaaacagcatccggaaatgcgagacccttgccggagtcatctccaccgggttggccaggttaacaaccttcaaagttgcgagggagagcgtgaagttcaacagcatctccgcaactagcttcgcaaggttcatggatctacttgactccatattatctagctccttaaaatggtcccagatgcagtactgcaagctgaacttgtggtttttctcatggttgcatagcttggaagcaaggactgtgtaa

SEQ ID NO: 97845 - DNA, 994 bp, Zea Mays
agccacagcccaccacctttgcttgctctgcccctccatcatcgccagcctgccagtgccgccgctaccgtagtaccgtaccctcagctagtcagctacctccatccaccagaccagaccataccagaccagaccagaccaatggccctgcgcctaccaatctcatcgtcccacgggctggcctccacgccggcgccaatctccacgacgacgtgccggccggccgtcttggcgacggccgcggcccagaagaggagcctgctgctggcgacggcctccgagacgaggggagtcgcgccggtgaggtccagcgggatcgagacgagcacggtgggtctgggatgtgaggccgtcaccgggcaggtcacggaggtcaacaaggacaccttctggcccatcgtcgaggccgccggcgacaaggtcgtcgtcctcgacatgtacaccgaatggtgcgggccttgcaaagtgatggctccgaaattccaggagatgtctgagaagaacctggatgttgtgttcctgaagctcgactgcaaccaggacaacaaggtgaggtagctagcatagctaggatatatagttattactttgcattggccgcatgatctacctcttctcttctttatctgttgttgttgttgttgttgcagccgcttgcgaaggagctgggcataaaggttgtgccaacgttcaagatcctcaagggtgggaaggtcgtgaaggaggtgaccggcgccaagatcgacgagctagcgcaagccatcgacacagtcaagtcagactgacaaagaaagcaggtgatgcaactagctagtgtagacgatgaatgaatgagtccccggccggccttttgtgggacagcaaggctgctagatacgtacgtacgtactcatcaacaattaatgatggatgatggcaatggcaaatatacagtcaatgattcatatatgcatgcatggactgctatgctagctagcagccctttgtaaatata

SEQ ID NO: 97846 - DNA, 1247 bp, Zea Mays
agccacagcccaccacctttgcttgctctgcccctccatcatcgccagcctgccagtgccgccgctaccgtagtaccgtaccctcagctagtcagctacctccatccaccagaccagaccataccagaccagaccagaccaatggccctgcgcctaccaatctcatcgtcccacgggctggcctccacgccggcgccaatctccacgacgacgtgccggccggccgtcttggcgacggccgcggcccagaagaggagcctgctgctggcgacggcctccgagacgaggggagtcgcgccggtgaggtccagcgggatcgagacgagcacggtgggtctgggatgtgaggccgtcaccgggcaggtcacggaggtcaacaaggacaccttctggcccatcgtcgaggccgccggcgacaaggtcgtcgtcctcgacatgtacaccgaatggtgcgggccttgcaaagtgatggctccgaaattccaggagatgtctgagaagaacctggatgttgtgttcctgaagctcgactgcaaccaggacaacaagccgcttgcgaaggagctgggcataaaggttgtgccaacgttcaagatcctcaagggtgggaaggtcgtgaaggaggtgaccggcgccaagatcgacgagctagcgcaagccatcgacacagtcaagtcagactgacaaagaaagcaggtgatgcaactagctagtgtagacgatgaatgaatgagtccccggccggccttttgtgggacagcaaggctgctagatacgtacgtacgtactcatcaacaattaatgatggatgatggcaatggcaaatatacagtcaatgattcatatatgcatgcatggactgctatgctagctagcagccctttgtaaatatagtgtttaaggaaatgattcatatattcagcccttaaggacttggatgtcgaggccagcctactatcaggaggtgcgagagggaggaagaaatgagcggcatttatctttttgcgtggtatcttgatctggtcattctataaaattgggtaccattgcatttcgctcctaaaataaaaagaaaatagaccagaccaccaccattgcaaaatcaagcaatgcataatatttttgttgctgtagatggagagagcagagcatcacgactcctccacgatttaaaccccttttgctttcacggataaactagcataaaaatagataacccaaaagaagaagaaaaaaaaagaggaaaa

SEQ ID NO: 97847 - DNA, 552 bp, Zea Mays
atggacctggtcgagcgacggcagcacctcgagctgcacctcccgtcggccatccctggcagcagccgctgcgacgcgccagatccgctggcacgcgcaccaccgcagacgccattagggcactgcaggttgctgcccacctacagtcgccacacaccaccactgaggagccagatccggcggccgcagccccaaacaaggccacgacgcccgcacgagcaggccacggtcgctgcaccatcctctgctcctcaccgaccctcactaccgcaaccaccggaagcactcaacacagtagccactcgcccacagccgggaagcctgaaaccgccgtgggaccagaatgtagccccagcaggcagcaacagcgttgcgaccgcaccgccagagctccaccgcagtcaccacccagtggtcttccacactgcagccagcgcaccggcccagccgagtcacccatgccgctgtgcgccgacccctgctcagatctgcccgccgacgcacgtgtcgacggcccctgcctcaaagaagcacagctcggcgtcgccctag

SEQ ID NO: 97848 - DNA, 2194 bp, Zea Mays
atgagagatgtgtggtccccgcccctcagctacgcccacctcagcggcctcctcgcgcgctgcggccgcgctggggacctccgcctcggcacctcgctgcacgccatcgtcgccaagaaccccagccacttccgcctctgcccacgccgttcctgcctgcagcacgtggtcgtggtatggaactccctcgtcgccatgtacggccgctgcggctgccgcggggacgccgtcagggtgttcgacgaaatggccctccgggactccgtgtcctggaactcgctcctctccgcctccgcttcggccacggatgcgctcgcgctgctcaggcggatgctgagcgccgcgccaggcgccgccgcgtgcgaccacgccacgctgaccaccgtcctgtccgcgtgcgcgcgcgctggcgggggcacgggctccgcgtcgctccccgcggtacacgggctggcggcgtcgtgcgggctcgacgctgaggtgtccgtcgggaacgcgctgatcaccgcctacttcgagtgcagctccccgggctctgcggagcgtgtgttcgacggcatggcggacaggaacgtcatcacgtggacggcgatggtctccgggatggctcgggcagagcgatatagcgagagcctgtctctgttccggcagatgaggcgcgcggtggacgccaacagggcgtcgtactcgagttctttgctagcatgtgccggatcacgcgccgccagggaagggcagcagattcacgggcttgccgtcaaggctgggctggagactgatctccatgtcgagagtgagctcatggacatgtactccaaatgcgggttgatggaggatgcgctgagggtgttccgctccggccaggatcctgacgaagtttccttgacggtgattcttgctgggtttgctcagaacggactggaggaggaggcgttcaggttgttcgctgagatggtcgggaaaggaatccgcgtcgacgcaaacatggtttctgcagtcctgggtgccttcggtgcttcggcgccgtttgctcttgggaaacagatccacgcgctggccatcaagagatgcttcggagggaacacctacgtctgcaacggcctgatcaatatgtattccaaatgcggcgagctacaggagtctatccgagtgtttgacggaacgcccagcaagaacacggtcacgtggaattccatcatcgctgcgtatgcccggcacggccatggttgggaggtttttgggctgttcgagtccatggaagccgatggcgtcaagcccaccgatgtcacgttcctgtcactgctccacggatgcagccatgtcgggtcacccaggaagggactggagatactggactccatgccatcgaagtatggaatccatccgaaggtggagcactacgcatgcgtggttgacatgcttggccgagccagccagctggatgacgccaaggcgttcatagaagacggaccgttcaaggacagcgctcttctgtggcagtcgctgatgggagcttgcagcttccacaagaactcaggagttggtgaatgtgcggcagagaagttgctcctcctggaccctgactgcactgccgcttacgtcttgctctcgaacgtgtactcgtccgagggcagatgggacgacagggccaggatcatgaagaggatgagagctaggggcttgaggaaggacactggcaagagctggattgagctggaaaaggaggtccgttcttttgccgctgggccaacaaggtctcgccctgatgatgtgctggtgcagttgtccgcagttgccagtgatcaagaagatgtagtagagagcagtgctttgtgaaatgtcaggtgtgtatcttacattctacatggaactttgggcgtcatacatgattgtctctataccatatatctcgcctgaaatttgtgcaaagtgcattctgatggaagatcgaagagccggattgggaatcatctattaccagggaatagggagcctttgtatgcatgatgttccttgtacgtcgtcgaccttgaggtagtaataacggtgcaaatctgatttcactccttttgtacatgcaacctttcagactacgtacataacgtatgaacgatcatgtttaataaggtatccagtgctgatgactttggtatgatatcataacatcacagcctcgtctaggtgtttggttcct

SEQ ID NO: 97849 - DNA, 892 bp, Zea Mays
cgactcgttcttcctctgcttcgtctttctcgcctccgacgagtcaccggacgccccgtctgctgacacgtacgcggaccgcgagggggccagaaccccatgtggcacgccccgctgcggttcactatccctcccgccgccgacccgcgcgccctcgccctgcacgtgctgctccccgccgagcgcgccttcggcgaccgcgacgtcggcgaggtggtcgtgcccgtccaggacctcgccgccgcgtcccccgacggcgccgaccagaggcatctcagctaccaggtgcgccgccccgtcagcagccgcaagcgcggcgtgctccacatgaccacatctccctacaggctctccgacgagccggacgcccacaaccacccgtacgcacaggtcccgccggcgtcgtccatgcggcaccttggcaaggccgccgacgctgccatcaccgcgtacccggtggcgaccccacgcggcgggcagtaccaccagccgtacggtcctgctccctacggtgcgtacccgtgccaccaccagtacgggtacggcacgtacggcgccgcgcccgcggcgagctccggcggagggatgagcacggcggggctcggcttcggccttggcctcctcggcgggttggtgatcggcgacgccgaggtggacgcggcgtacgacggcggcgggttcatggacggcatgggcttgtgactgattctcggttacattgcagattaatctgcttctgcgtgatcatgaggttaaacttgttgctccgatcgatccttgtgttctattctatctcgtgtcaaatgcttgatgaacagatgacacccaccaagtcaccaaccatttggagggactccgtgatgaacagagatcacaaggaaataaggccttc

SEQ ID NO: 97850 - DNA, 345 bp, Zea Mays
atggcggaaaacttacgggggttggatggaggcaggatggacgacgagagcaggggtggtgtcgccgccagacattcactcaaactggcagagcaggggggctacggagcatggggccacggtgcgtcgtgggtgctaggtcttgcgaggcctcccgaggctagatctgtcggccgatgctcacgccatagagagcgagaacagggcagggacaatcggggtagcaggggtgcgccgaaggccgcggaacagcagggcggacaaatcccgaagcgtcgatggggagctggagcagcggcgccgtcgttgggagagcacggggccacgacgcgtcgtggccgctag

SEQ ID NO: 97851 - DNA, 1204 bp, Zea Mays
gataaaatacattacatttccaaatctctactattattccgtggagaaagcagcaaaattaagacaaatagtataaagaaaagcaggcaccatgatggactagatgagtgagaaggtttccaattaactaatcaagcacaacaacacaagtcgcttcgatcgcttcatcgtcactcctgttccttgggcgctccggcgccgaccggcatgaactgcgccaccttgttggccgccgggcgcgcggcgaggccctgccaccaggcgctgacgtgcgggagcgcatggacgagagcggcgtactcggtggccatgaggcagtgcatgatggtgaaggggctgaggtcggcgaggctgaggaagtcgccggcgaggtacgtgcacgtggccagccgcgcctcgtacacctccagcaccttcttgagcttctccacgttctcgtccaccaccgcctggttgcgctcgcggcccaggaacggcgcgaacacgcactccaccacgatggcgatcgccggcgggctcagctggtgggcctccacctccagccacacgtccaccatcgccgtctgctccagcctgccgccgcccagcagctccggcttgtgcttccggagaacatgcctcgcgatcgcacgtgattctaggaaaatgttacattacatatcacgcgcttagaagatgaagaacccgtagaatcaaaagggaaaattttaaaatcgagagaatatatataatttgtaaaacaaaaaccgaattataatagacgggcacgggccgacgatggatgatgatgaactcaacttaccgaagagcgtgaggtcgccatcctcgagcaccggcaccttcccgaaaggctgcagcaaagcaacagcagatcagtcgggcggaagcgagagagagaaccaccaaaatgaattcacggtggatctatcgagcgagcgaggtacgcacgttcctggcgaggtgctccgggcggcggtggtcgccgtcctggcggctcatggggacgagctcgtagtcgacgccggcctcctccagggccagcagagcccgcgatacgaacggcgagatagcccacccgtaaaccttcaccgccggcgtagccatatgtcctgttctctgcacttagttctgctccgctcctgcaagttctaccgactagctcttgtgtacggctcggggtgcaggatcaagatcagcagctgga

SEQ ID NO: 97852 - DNA, 759 bp, Zea Mays
atgtccgaccccgccgctggaggcgccatggttcctgctgccggacgcggcatcgcatgggcgaacggcggcccccggttcggcgacatggtctgggccaaggtgaagtcccatccgtggtggcctggccatatctacagcgtcagcctcaccgacgacgaggaggtacaccgcggccaccgcgacgggctcgtcctcgtcgccttcttcggtgactcgagctatgggtggtttgaccccagcgagctcgtccccttcgaggaccacttcaccgagaaggcggcccagggcggcagctcccgcagcagctttgccgccgccgtggccgaggccgtcgacgaggtagcccgccgcagcgcgctggcgctgctctgcccttgcgacattcctgacgccttccgtccccaccccagcgacggcaacttcttcctggtcgacgtcccggcattcgacaccgacgctgactaccaactcgaccagatccgggccgcacggcagcgattcgtgccgcggaaggcgctcaactacctgctggacgccgccgtgactcagcgagacgcggcggaaaaagccgcgcgcaccgtgcctgggatggagatggccgcgctgttcttggcgtaccgccgcgcggtgttttcgccgatagacaacacctacgcccaagctttcggggtggatcctgagctggctcttgctgccgagcagaaagccgcggcagagagagctcaacgagatcaagcaacaattattttgatgtga

SEQ ID NO: 97853 - DNA, 1311 bp, Zea Mays
tggtccccgacaaatatagcgatcacgttcatgatcggtggcactctgggctggatagcttgcaacatcttgaagccactgcagcacttcaggggcttgatcatggccttctgcttagcaggaaacctgctcctgatcattgtcccggctgtatgcgacaaagaccggaacccgtttggggatgattcaagcacttgccgctcacgcagtctctcctacttgtccttgtccatggctctaggtggcctcttcatatggacgcacacgtacagcctaatgcagaagtccggcaagctatataacaaaatgcagtctaaaagaatccagtgcctagccgacagcaacgaggagcatgagcaagcgaaagaagatgggtcagctggctgcgctgacaaggaggcacctcttccgacgtcaatcaagcctcgcgagcacgagcacggggaagagaaagaacaccaaatggaggcccctctcttgtcctgcgagagcgaggtcactgacaaagggttctggacgaagctgaaagacgctatccaccagttcatcgaggagatgatggcaccgcccaccatatccacgataattgggttccttgttggcctggtcccttggctaaaatccctaatcgtcagcgatggagctcctttcaaagttatacaggattccctccagctgatgggcgacagcacgatcccttgcatcacccttatcctaggcggaaacctgactcaagggcttcggaagtcggggctgaagcatgcggtgatcgtcgcaatcctgtgcgtccgcttcgtgctcctcctgctgatcggcatcgccgtcgtccgcaccgcgtatgggctcggcttccgtgcctcccacgatgaacatcggaacaatggctcagctgttcgacgttggacaagaggaatgctccatgatttttctctagacgtaccatgttgccgtggttgcgctgacggcgtggtcgacgatcttcatgttcgttctgtcttgattgaagtcggtcaccagaaccaatgcacagtagcattttttgagcctattgttgctcaaggcattcagcttagcaacaggaaaggaagggatggtgatgggtttcatgtctcaatgagcatgagcaaaagctaaaggtgacatacaacaatatatatacacataggcagtagtagactatgatcatataggtaattgtttattaatttattatgttgggctgatgggtgatggctgacctattagtcggcaattattggcatagttcaaacaattcatggaagtagagggttccattttgttccatgtata

SEQ ID NO: 97854 - DNA, 1599 bp, Zea Mays
catggatccatgccttctccatcctcaagtcatcagctagctagccttccctacagcaactgcttacatacaacacttccatcttcccgagctcgtcttcgatcaattcccaagtcaaataataatataacaacaatggtggttcccgtcatcgacttctccaagctggacggcgctgagagggccgaaaccctggcgcagatcgccaatggctgcgaggagtggggattcttccagctcgtgaaccacggcatcccgctggagcttcttgagcgcgtcaagaaggtgagctccgactgctaccgcctccgggaggccgggttcaaggcgtcggagccggtgcgcacgctggaggcgctcgtcgacgcggagcggcgcggcgaggttgtggcgccggtggatgacctggactgggaggacatcttctacatccacgacggatgccagtggccgtccgagccgccggcgttcaaggagaccatgcgcgagtaccgcgccgagctgaggaagctcgccgagcgcgtcatggaggccatggacgagaacctcggcctcgccaggggcaccatcaaggacgccttctccagcggcggccggcacgagcccttcttcggcaccaaggtcagccactacccgccgtgcccgcgcccggacctcatcacgggcctgcgcgcgcacaccgacgccggcggcgtcatcctgctgttccaggacgacagggtcggcggcctggaggtgctcaaggacggccagtggaccgacgtgcagccgctcgcgggcgccatcgtcgtcaacactggcgaccagattgaggtgctcagcaacgggcgctaccgcagcgcctggcaccgcgtgctgcccatgcgcgacggcaaccgccgctccatcgcttccttctacaacccggccaacgaggccaccatctcgccggcggcggtgcaggccagcggcggcgacgcataccccaagtacgtgttcggcgactacatggacgtgtacgccaagcacaagttccaggccaaggagcccaggttcgaagccgtcaaggttgcagcgcccaagtcatctccagcggcataaataaatggaggggaccaattattaaatgcattataatttatttgttgaataaaacagccggagaaataatgataatgtaaagtatatatgataaacaccggttaggatttaaggtgtttaactttagttgcatggtataatatgatatattgttgtagcaataagtttattaagtattcataagtgttctaaatagtgggctaaggcacttatccatcgcctttctcaaacagaaaatagtgatttaattcgggctatagcgactaatagttgctatatatattaggcgtagtagcaaacaatttcaccctttggaaacagttatatctagaaataactatagccagagatttagaaccttgttaatcatgtagaaattaaaggttcgtcaagtcagagcggcaccgaacaagataaaaatgtgacctcccctatatgcaaatgtctgccaacttattacattggtgggtgccatcttactatgtacaaatatatcgcggaaaccatattatcagcgtc

SEQ ID NO: 97855 - DNA, 1069 bp, Zea Mays
atggtggttcccgtcatcgacttctccaagctggacggcgctgagagggccgaaaccctggcgcagatcgccaatggctgcgaggagtggggattcttccagctcgtgaaccacggcatcccgctggagcttcttgagcgcgtcaagaaggtgagctccgactgctaccgcctccgggaggccgggttcaaggcgtcggagccggtgcgcacgctggaggcgctcgtcgacgcggagcggcgcggcgaggttgtggcgccggtggatgacctggactgggaggacatcttctacatccacgacggatgccagtggccgtccgagccgccggcgttcaaggagaccatgcgcgagtaccgcgccgagctgaggaagctcgccgagcgcgtcatggaggccatggacgagaacctcggcctcgccaggggcaccatcaaggacgccttctccagcggcggccggcacgagcccttcttcggcaccaaggtcagccactacccgccgtgcccgcgcccggacctcatcacgggcctgcgcgcgcacaccgacgccggcggcgtcatcctgctgttccaggacgacagggtcggcggcctggaggtgctcaaggacggccagtggaccgacgtgcagccgctcgcgggcgccatcgtcgtcaacactggcgaccagattgaggtgctcagcaacgggcgctaccgcagcgcctggcaccgcgtgctgcccatgcgcgacggcaaccgccgctccatcgcttccttctacaacccggccaacgaggccaccatctcgccggcggcggtgcaggccagcggcggcgacgcataccccaagtacgtgttcggcgactacatggacgtgtacgccaagcacaagttccaggccaaggagcccaggttcgaagccgtcaaggttgcagcgcccaagtcatctccagcggcataaataaatggaggggaccaattattaaatgcattataatttatttgttgaataaaacagccggagaaagtgtttaactttagttgcatggtataatatgatatattgttgtagcaataagtttatt

SEQ ID NO: 97856 - DNA, 1894 bp, Zea Mays
acgaatagtacgtgagattgcacggtaattaactcatcctcgtcctccgctagtccgccgggtgagtgctcggcgtccatgggccatggccatgcagtggtccatattctgggcggcgatccgcaggcgggctacacacacatacatggcggcggagggcgccggaggccggggacgagccatgcggtacccgcctctgtcggcgctcgtggtctccgccatcgcggccttctcggccgtgatcgtcctcgccgtcgtccactcggcgtacgacgacgccatgtcgcggacgcggacgctgctgggccacaacctggagccgacgccgtggcacccgttcccgcacgacaagggccggccgccggcgcgcgcggcgctgcggtgcgcgccctccatcgcctgcctgccgccgctatcgtcgtcgtcgtcgtcgccgcagccgcaaggtaacaagaagaagaagcaaaagcagtgccctgcctacttcgctgccatccaccgggacctggctccgtggcgcgggcagggccggggcgtgacgcgcgcgctcctggacgaggcgcggcggcgcgcgtccatgcgcgtcaccatcacgggcggcgggcggcggctgcacgtggacctctactacgcctgcgtgcagagccgcgccctgttcacggtgtggagcctgctgcagctgatgcggcggtaccccgggcgcgtgcccgacgtggacctcatgttcgactgcatggaccgccccgccatcaaccggaccgagcacggggacggcgctctgccgccgccgccgctcttccgctactgcaccaccagggaccacttcgacatccccttccctgactggtccttctggggctggccggagacgaacatcgagccatggaaccacgagttcaagaacatcagggcgggcgccagggcaacgagatgggcggacagggtgccgacggcgtactggaagggcaacccggacgtggcgtcgccgctgcgggaggcgctgctgggctgcaacgacacggccctgtggcgcgccgagatcatgcgccagaactgggacgacgaggccaggtccggctaccagcactcgaggctctcggcgcagtgcacgcaccgctacaagatctacgccgagggcttcgcgtggtcggtcagcctcaagtacatcctctcctgcggctccatggcgctgctcatcgagccgcgctaccaggacttcttcagccgcgggctggagccccgggtgaactactggccggtcgccgccctgggcatgtgcgagtccatccgggacgccgtcgactggggcaacgccaacccggacgaggccgagcgcgtcggcaggcgcgggcagaggctcgtgcaggacctccgcatgcacgccgtctacgactacatgctgcacctgctcaccgagtatgcgcgcctcctcatagaccaggaccacggcttgagcccgccgccccacgcgcaggaggcatgcgaggcatccctgctctgcctcgcagacgacaagcagcggaggttcctccacgcatccaaggcagaccccgcgccgggcgacccgtgcgtgctcccgccgccgtgatccctccccctccctctctctctaggatttctttctttctttatttatttatttattagactcaacagacagatcagaacgagttgggaggatttcaatgatggttctaaagcttctgacaaaagcatgttcagatttcatttttaggtcaattgcaatttccttgaatttaaattgtattatgtatcctgccgtcctgcctcttacaaaactagatgccttcaactatgcaaaatgctaatatgaatgacgctataattaattagtgaagaaaaaaggagctgcaagattttttaaaaaaaaata

SEQ ID NO: 97857 - DNA, 1740 bp, Zea Mays
cgtcagctagctgaccaatccactctgcctccacaaaccaacaggtgacaacggagccagaatacgcatctacctataaaacaaaagcaggtgcattcagatacaaacggatgctgcaaattcccattgtatccgtcacttcatatagcaaaacgactccaagcatcatctcatatcaattgactggaacactgatacagctatatagataaagcattggcatagaagacacatacaagtacttgaatgcctctcctattcctcatatcatcaatcatcattatatctaatgtaggccaacacgcttatcctatttaacgaccaatgtacaaaatgtgagcagcccgtgctgtggcagggcaaatcaccaaaacgtgctgcaaatcatggtagaagtggacgcaccacgacattgcaggaagattgccatcccagtggtatcgcatagtcccggagctgttttggactttgtcactaaccaccaatcaggcaaggtatttgtacgtattggcgttgtccttgtcgcgctccaaatagtcccttgtgatgagatcctcaatcctcttctttatggctttgaagtaccttaaacatgcggctaagctgctcaacacattcagcaaccagctgttgatgacccataactttgcggctcttcataatgcgcacaattgatgcatcaattgcatacctcctgtctttgtcaacatcttcaacaacctttttcttctcatcaacgggaggcagaaataccttaattcttctcattctgtcagtaaattttgaattgaactcaaaaacatcattgggcgagatggatctatttgctggttccttgttaaggatcttgtattttgcacaagaaagtgaatggagcaaacgcactacatcatcatctgacaggtttaattgtgttgcaatttcagaataactaagcctttcggatccattgaacagtagtagtaatgcagcctgatatgtcgtaacaatgagctcaataggtttagcatcaaacttagcattgatgttgcaggttcccaaggaataaatccatgtcagcttcctgtgcttcgttcttgtttgatagaattccttgaaaacctctacacatttcacctaaaagcgagacatataaagtcatttacaagaacataaacatcgacctaacatgctattttgaaatgaactaacatgctccatgatatgagtgcagtggtttatgcccttgaagtgatcgaacagttaacttaccatctccgcaggaaggtttatgtcaaaagttttgtagcttggccagaatcccgttgtcaaaacagtaacagccaaatctatgccaggattcaactctggatgcccagctacaaactcttcaaacttagtttggtgatctctagcgacagtaaggtccgtaaccatgccctccattttggaagtaaactgccccccgcactgttgcttgagctttgtcagaatacttctctcatgctcatcattagcacttttgtcgaaaagtaatcttctggcaagtttcttcctataaaactcggcaaacaggtctttatcactgatcaaaagtaaaaacagaagtaccttctcaagggcatcttcaatggcttcatcactgagcttttcactgcagcctttcttcagaatattgtcgcagaaggtagccaacaactcagcattcgaactgccagagacacctttgttacagaagacctcaaaggcttctttaagtgc

SEQ ID NO: 97858 - DNA, 657 bp, Zea Mays
aagcacaaaactatgcacacttattctagtgtgaatggaggtcgccaagatggatttgggaaacttgatggtggatactagagacatacaccaagaagaaactcacgtcttgcaggctcaacaaagtctttgtcgcaaggtgctgctatggatagcttctattccacgtttcacactaacctagagaggaggaaattctcaaaagaggaatacgcaacattcgcaagattggagatgaaggaagctatgaagcaactgttgtcatcaccggattttaacaggtgggcgttggctaacgcgaacaagatatcgtgtggctctgataggaggaaacttcagcatcaacaacaaccaacaacgacatcgtttcttgggactattttgatatgtgtttggcaccaaaaagagccaagcggacggtccggccctggagccggacggtccgcggtccggacagtccgcgcctgtgggccgaacggtccgtgcctgcgcagaataggttagggttccgagttttatgcaatgtttgttagctatattcgcggatttagctcggaatccggttgtgtaaagggtccagcccccctcctctataaaaagagaggtctacggccgatttgtaatcatcaatcgaatcaatacaacttctatttcgca

SEQ ID NO: 97859 - DNA, 1992 bp, Zea Mays
acaccacaaagcaatcgagtgcttccaaaccgggctgacccgcgtcgggacgttccggtccgtttcactcgctgttccaccacgcgctcgcccctgatccaccaccgcggccgcgatgagcaccgcctctggcgacggcgcggacgcaggcggcgacggggccgccgcatcggcgcccgccgggaggcggatcccgcccgcctcgtccatgccgtgggtccgcaatctccgccgcttcgtcggcacgggcgccggcctcggatcggaggccctcatggaactggagactaaaaggatattgcttgagattttcaaggagcggcagcggaagagtgccgaggctggttccatcccaagtttttacaagaagcctgaagaaggatccattagctctagagttcaaaggttggccaagtacaggtttctaaagaaacaatcagagcttctgctgaatgctgatgatcttgatgccatgtgggtttgtctcagagaaaattgtgttattgatgatgctactggtgctgaaaagatgaattatgaagatttctgccatatcgccacagtctgcacggagcagattggtcagaaatgcaaacgatttttcagcccttcaaacttcatgaagtttgagaaggatgattctgggaggattgctatcctaccattttatctttatgtcatgcgaacagtttctcttactcaagcaagaattgatatgagtgagcttgatgaggattctgatggtttccttcagcctcatgaaatggaagcatatattagaggactcatccccaatttggcgcaattgcgcgatatgccccactgcatttgttcagatgtactgccgcatagctgcacgcaagttctttttcttctgtgatccacacagacgggggaaagcatgcataaagaaagtgttgctgagcaattgtcttcaggagctaatggaactacatcaggagagtgaggaagaggtaaccgataccgagcaggcagaaaactggttttccttaacttcagctcagcgcatatgtgacatgtttcttgcactagataaggatacgaacggtacactgagcaaacaagagctcaaggaatatgcagatggcacgttgactgagattttcattgaaagagttttcgatgagcatgttcgccggagcaaagttggaggtggaaacagtcgtgagatggactttgaaagctttcttgattttgttttggctctagaaaacaaagatacccctgaaggcttgacatatttatttaggtgccttgatctcaatggaaggggtttccttacaactgcagatattcatactctatttagagacgtacaccagaaatggattgagggagggaactatgagctttgcatagaagacgtgagggatgaaatctgggacatggtgaaacccgcagatcctctcaggatctcgctatcagaccttctttcttgcaagcaaggtgggactgtcgccagcatgcttatagatgtgcgtggcttctgggcccacgacaacagggagaaccttctccaggaagaggaagagcaagtggaagaggcatgagttctccagctgccaagtaaccgtacctggtgcctcaaaattgcaacatcctcggaactgcctgtaccgcagtatcagtcattgtaacctagatagtgtattaaatctgtcaccaccagtttcctgaagctgaagcttgttcttaagtgtgccatagtggtcttcgaaacttgttgaggctagctagcgccgtttggccatattgacatctatccgtgagggcctgattcctcggcagcctgtatgtacatctagatttgcaccaagcgcgcaatcctcaatcctgactacggcatcacgcctgtaagcatatactccgtatgtaatacattgtgtttagttcgtacatggcttgtgggtcgttacttgaatgcctggtttatgccatttttgctgcatagcagaaccttgctatgtatca

SEQ ID NO: 97860 - DNA, 2135 bp, Zea Mays
agtaatcaattccactgcgactgttgttgaaagagcaaatcaaaccaacccatcgaaaaccaaaatccccgcacgagctccggtttcaaattccctcggcagagctcgccgccgggcatggatgcggcgcgggagtccatggcggcgctcctcgacgccggcctcttcggccccgcccaaacgctggggtgtttccttgtgtcgtcagctggtgcgggcaacgatgctggtatgtccatgaaggtggaaagcctggtccagcatggggatgctttgtatggagagaaagaattccgcagggcactgaatgcgtacaagcaagctatgcaatatagtagaagtatccctaggcaagcaacaagtaacaccagaagttcagtatccgtcacaggccggtcaccttctccaaactcttcaaatctcttatcattcaatgaaaatgaggtgaagttcaagattgctctttgccattctgctctatgtgagcaccgtgaagcacttcatgagatggaaggtattccttcaaaagtgagaacactgaaaatgaatatgatgttagggaagctttatcgaatatcaagaaatagccgtacagctgtagtctgttataaggagtgcttgaggcaatgcccttatgttttcgaagctatcacagctttggcggaaatggggctttcagcaaaggaattttctttattattttcacaagcaccaaatagaggaggcaagctatcgggtgacttcgtagacacacaacgttggtggagtcggtatgttgaggcgcagtgttgcattgcttcacatgattataaaggtggccttgacatatatctagaactaatgcaacgattccccaataatgtgcatatcttgttggaaattgctaaggttgaagccatcataggcaggaatgatgaagcgataatgaactttgagaaggtccggctgattgatccaaacattatgacatatatggatgaatatgcaattcttctaaagtcaaaatctgactacatcagactgaataagttggtacatgatatgctacatattgaccctgcaagaccagagacatgtgttgctcttgcagcaatgtgggaaagaaaggatgaaagaaaagctttgacatatgcagaaaagagccttcgagttgatgacagacatataactggctatataatgaagggcaatctgcatctttcattgaatcgaccagatttggcagtgacagacttcaggggggctcaagaattgagggctgatcttcgttcttatcaaggattggtgcgtgcttatctagcactttctaaatgcaaagatgcattattcactgcacgcgaggcgatgaaggttatgcatcagtctgcaaaagctcttaagctagttggtgatgttcatgcaattagttccagtgggagggagaaggcaagaaagttctatgaatcagccattcgtcttgaacctggatttcttggagctgcactggctctggctgatctgcatgttgcggaaggacggaataaggaggctgttatgctactggaaagatatatacaacaatggtcagatgattctctacacataaaggtggctcaagtacatgcggcaacaaatatgctttcggatgcactttcccattatcaatctgcactaagaataaacccacaaaatgaagctgcaaagaatggattggagcgcttggagaaacaaatgaagggagtggacccagatgctccagaagacgatgaagagaacgaggaggaggacgtcgatgttgatcgagatgactttatttgaagctggctcattacaggtctcttatacctgtggaagctggcgctgattgatcacgaccatctttgtatagcggtggtagcagtggttttgtgctatttgtgactgaatagcaggtgttctagcagaaccccagttgttttagcttgtaaaaatgccgcccgaaacgaattttgcacgtgttgtatgccatttcctttcagttcttctttgtgtattcttttgcaccaaatatggttgacccaactcttctctccactcagatcacagtatttcccttaccgcctgttcaaagtcagctgacatgcccgcccataatacctctctgtcatcatctgctt

SEQ ID NO: 97861 - DNA, 400 bp, Zea Mays
atggcagtcaaccagggcggacggcgtggccggcgggaagggcggcggcgccggaggccgatccgcgacggcgaaagcgaagcgtggggacgtcagctccggagcatcggcctcgttgcagggagctggcaagttcaggtccagctccaggaggctcttctccttcctcggcgcgtgcaggtcgtcccgagaggccgccgccgccggcaccagcggccggtgatgcttgtggagaaggcaagggatggcgctgcagctgcgaatgccgctgcttttctgtgctttgctttgctgcgggtgtctctgaaggatatgctaatgacagacggacacggagacaccacaccaccagtccaccaccaccaccacagggagagaagacaagggaggtgatgctatg

SEQ ID NO: 97862 - DNA, 1201 bp, Zea Mays
ccccccctcccatctcctactttctcaagcacttgcagccacacatcaaaccctagcagcccccatctcctcctccaaaggtgtcattcgttgccgctcggatctccgtcgcgtggtgcatatcttcaacggtttccggtggagggaggaagggaggaagaaaagggggagaacccaaggtggtggacttccggatcgttcttagggatttgcccaaacttccggtgaaggcaagtaaaactgtgatggttattccgtctgtcaaatgaggagtcttatacttgattatgttgtgctattgtgttcatatccatatgttttttattgagtaccatcatttgaaaatgttcatgtttcatggatttcatatgttgagtttgagttttgatcatgttactcaagtggttattatgtggaatgggtggaagtatatgtctagcacattttatttgggaagaactcatgatgttgtcatgcataatgcactcatcatccattgcattgaagtttcgtcgcgatcttatggttcgaccgtaccggtacattgagcatcatatgttgcccgagaaggggtatgatgcagcttcatatccttagagatatggaggcagaagtcattattgcatctgtagccatgtgcattcatgggagaggtgtggaatctattatgtggatgtggataatctggacttgtgcatggtgattcttcttggcgttaagtatttagttacttgtttacttgctgcaatttaatgttcaaaatggaagttttgaaccacgtggttgtttaagcacagttgatttacaatgtccaatttgttgttgttatgtttacttgctgagatgtgtcatctcacatcttgcattgtttgatgcaggcacctaatttctgctttgggaaaagagggatgtagcagcacggcccactacacctttaataaaggaacccccacttaataatgttgttaatcagagagggtcaagtctagtgaattactttgttcttggttgaccatttgttttggggtgggctgagttccttatctcatttattttgcttctgttgggtcatgaatgtgtttaccacttttgcatttagattctactacgtgaattatctatctttatatcctgtatgaactacatgtttcccctccttgttatgctagtttcaaaggaggtgctgtcggattttgcaata

SEQ ID NO: 97863 - DNA, 93 bp, Zea Mays
gttggaagttggaacggtaggagatgaaacgttgcatgcgtggctagctacttcacgtggagaggaaacgctgagtgatagtagtaattacac

SEQ ID NO: 97864 - DNA, 209 bp, Zea Mays
tctttttcttttcttattttcttttctgtattctatttttattttccattttcaattccgaattccaaatttagttcaaaataaaattttcaatcttacaataatatgaaacaattaaagttccagaatgacatttaaaacttaaatgcttttatttagcctttattaatttatagaaataaattacggatgcataatttagtaaaata

SEQ ID NO: 97865 - DNA, 935 bp, Zea Mays
acggaacggaggggagagacggagatagtagtgtcatcccgtcttccctcacccagtcaccctgacgggacggcaagcggcggaggcgctgtcatccgctggtccctttcctttccgcgcgcatggcgagaatcttggccgccgtctggccgatcgttaaaggctgcatcaccggcggcgtgttcggcatcaccatcgccgactggagcgcctcctacgtcaccttgcacggcgcctccatgcaccccaccttcgacccgcagcaggccgaacgcgctctggtagataagcgctgcctccaccgctaccacttctcccgcggcgacgtcgtcgtcttcaggtcgccgagggaccatcgtgaactggtggtgaagaggctgattgcgctgcctggggattggatccagatcccggagaagcaggagatccagcagatcccgcaggggcgctgctgggttgaaggtgacaatgccgccaccagctttgactcgagatcctatggccctgttcctatgggtctgttacggggcagggtcacacacataatctggccaccccacagaattggccgagttgacaggaaaatgcccgaaggaaggattgtgccactgtgacctgataggttggttatcctgcattccttttccattgtagggttaggatagcaatatgaaactggactggctgaagcctcaagatggactccactgttacgtgtgggagggcagtgaaactgatgataattttatatctgataatcattctccctgtcagaaacaattgtaggattgtttgagaaaagaaccaattatagggaatgtctggtgagaacctttgctgcttgcagttttttgaatcctttatgttatcgagatgtatgatgcagcactggaattttccattccagcaagagaagcattcctcgccccctatgc

SEQ ID NO: 97866 - DNA, 1311 bp, Zea Mays
acggaacggaggggagagacggagatagtagtgtcatcccgtcttccctcacccagtcaccctgacgggacggcaagcggcggaggcgctgtcatccgctggtccctttcctttccgcgcgcatggcgagaatcttggccgccgtctggccgatcgttaaaggctgcatcaccggcggcgtgttcggcatcaccatcgccgactggagcgcctcctacgtcaccttgcacggcgcctccatgcaccccaccttcgacccgcagcaggccgaacgcgctctggtagataagcgctgcctccaccgctaccacttctcccgcggcgacgtcgtcgtcttcaggtcgccgagggaccatcgtgaactggtggtgaagaggctgattgcgctgcctggggattggatccagatcccggagaagcaggagatccagcagatcccgcaggggcgctgctgggttgaaggtgacaatgccgccaccagctttgactcgagatcctatggccctgttcctatgggtctgttacggggcagggtcacacacataatctggccaccccacagaattggccgagttgacaggaaaatgcccgaaggaaggattgtgccactgtgacctgatagagatctgtgccactatataaccatggagatccctttttgcaaaagctagatgtgcaagtccgaatgctggctccagaagaagctacgtggagtcatcacactcaggcaatacaggtgtgtgaaaggaggagggatcacgggccggtgtcactgtcttgtttgtaaagatgtgcctccaaattaatccgcaaaactggaggggcaaaggcatgatcgcaaagggggaaaaatgaatcggtgtagttaattgtcatgtctttgctagcgttgccttggaaatttaagataacagtcaatttaagtcttgagagttgtctctgtttgcttttatcttttatcaagccgtagtgtcaagtgctgctccgaaaatctttggttcaagttcaataatactattggtaactagtttttttatttgcccatatcatattgatcatgtaaggccgtgccctgcatagcgtgcgcgtaaaacactgttttgtattataaagtgcattatgcgtgcatgtaaaacactgttttatattgtagagtgcattatttatggtgtggagtttcaaatatggagtaagatagataagagatgagatagagagactgctgaagatagcgtaacaattctacttaacgtggactttttagattgttattgtgccattttcttataataaaaaaaagatgttgtattc

SEQ ID NO: 97867 - DNA, 2198 bp, Zea Mays
caaaacaaaggaaaaaaaaaggagaatatgcgccaccgcggccaaccgtcgtgacctcgccgccggtcaccggtccatggactccgccgccagcgtcctcgccatcctcagcaagctgcagtccctcggcttctgcgccgatctccgggtccccgacgccgtcgcggcctccgacccctcggaggcgttcgacgccgtcctcgccacgttcctgcgcgaggcctacaccggcggccgcgaggcgcggcctatccccgtggctcttggaaatggacgatgcgttgaccttctccgcctcttcctggccgtccgcgctgcagggggctacgccggcgtgcccaacactcccggtggttgggctgccgccgccgagtctgctggcattgactccgccctcgcggcgcccgtcaagctggtctacgccaagtaccttggtgccctagaccgctggatccagaggctcgtggaagcacatgggcccttcttggacggcgacatgaggaagaggcaagagctgttcattggtaccgatggagtggagggagaagaagggctcctgggctacaatgggagggagcagcggcatgtgatgcttaagaggaagaggggggacgtggttgggatgttgggttgggtgagggagatggccgagaatgctggcaatgatgttgctgtctctgctgggtcgtcggctgagtgcttctcaatggcattggcggtcaggaagatggttaccacgaagaaggctcgccgagcaagcatgttggacgcctcactttttcaggaaatattcccaatggcttgcaattgctgtataggtcctaccggtgttggcaattgtgcaaaagcaaaactactgaatggttcttcagtcctcacaaaaccggacatcaacttgactggagaagggaaacacgagtctaggactagtaactcttctaatggttggctttttaaaagccatcagaaaaatgaaatacctgttggccccaactatcaaatacacgtgccacaatggactagtgaggtgcctacaaattatgatgatccagaaactctgaaatggttgggaacaaaggtctggcctccagaaaatgaaggctgtaaaacattgttttgtggtgatcctattggcaaaggcagagaagttgtttgtggttgcgtttatcctggatcagtggaatgtgttcggtttcatgtagcagaatggagacttaagttgaaacatgaacttggtgcagctttctatgcatggggattcaatcgtatgggtgaggagattgcactttcttggacagatgaagaggaggcaagtttcaaggccgcagcacaacatagtgctgcgtcttctggcaggaatttctggaaccgcctccacttattttttcaatttaaggggaggaaagaactggtgagctattattttaattgttttctgcttcgaaggaggtgctaccaaaacaggatcactccaaagaacatagacagtgatgatgacgaagaaacagaatttagattcctggggaatcgacttggtcaccgtgcagctaagtatcacagtaccaagcacaccgcctgcattgaaaatacacactctatggacctggatgagtagctgttgattgtattttatgaagctgatttaggtctgcagttagttcacttgggagactgaaatgatgatattcctcttagtgatttagttatgttactgacagtacgcatgaggttcaaggagctaagaacccaagcaattagttactgcacagatggattgtgcacagatggattgtaggctgatccacaattgaatttcaaactcaagttctgatagggaattcaggtaatactggtcactgagcacttacttacatggacgcacatccagaaagtgagaatgcaatgatttgacagtgtatcgtttgtttcaacttttttgtagctttctttttctctttgtgaattattaatcgggtccttatccaataagatacatgttggttccatgctctaggctcctgttgtagttctctggagcgagatggagcagtgagcatctatgtagatgttagtgttctgaaagtagtactgttgttcattgtagactctgtttgtctctgagaaacttatgtgaagatttctttttccaaccagtcgaatggcatgctagcagtctgatatttgaaaattttcatatg

SEQ ID NO: 97868 - DNA, 281 bp, Zea Mays
atgaattcaagtctccacacttttgcggccaccaaatttgaattccattctatgttttctgtacaacaaataggagaaaattagacatagcaaaaagctccaagcagcacgtgtatggtctcgaagctgcccttgtgcttctccctgttcttgatcactcctacacgcccggtgttcctcccgccggtcaccatgaccatgttgccgacgtcaaacttgatgaagtccatgatcttgttggtctccagatcgatcttgatggtgccatttctgcaaacttt

SEQ ID NO: 97869 - DNA, 249 bp, Zea Mays
atggtgcaccctcctcgtgttctccttatgttgcctgatatggcgaggatgactccaaaggtaaggcgaggtgtggatttcacatttaaggcggggtctgcaggttttggcgcagaggttgattgccgagatgctgcagatgctaggcatcgaaaaccaattgagaaaaatgcatcgaacagaaaattaatggtgcaagggagactggttgggagaactgagaagctatttgaggagaataaattttaa

SEQ ID NO: 97870 - DNA, 1586 bp, Zea Mays
gtgcagagggcacacactagcagctagtcataaagattagaggcgatatgtctctcgccaccctgctgctcccctccccaggctctatggccaccaaggctggcacggccggcgaccaccacaccgacagcaggaggcacgaccacgaccaccacggcagcaagtgcaagaagaagccaccggcatcaccgcaaccgtcgtcgctcgcgtcggcgccgagaaccccgccatcaggggcacgaagccagcgcgtgatggtcatggctgcgtcctcgtcatctcccaggaagaaaagccccaaggcccccgcggcgggcaagaacagccgcgcccagtaccagcagcaccgaggccaggcgacgaagaagaaggccactgcggcggcgtcctgggactgggagcaggtgaagagcctgctgagctgccggagcgtgacggcggcggcgcgcgtgcacgacccagcggctccgtcggcgctggcgcggctccgcggcagcggcgcggggacgtgcggcgcctcgctctgcgccatgcgcgacgtggtcgacgccgcctcctccgcggcgtcgtccgccgccgcgtccgcgtccgcgtcgggcgaccgcgacacggcaccgctgaaccgccggcgcgcgcaccgcggcgcctcgtcgtcgtctgccggcgccggcagcagccaccactcctccctgcggggcctctccggctgctacgagtgccgcgccatcaacgtggagcccatgtcgaggcggtacccgaggccgagggagctgtgcgcgtgcccgcagtgcggcgaggtgttcaccaaggccgacaccttggagcaccaccaggccattcgccatgcagtgtccgagctgggtcccgaggactcggggcgcaacatcgtggagatcatcttcaagtcgagctggcacaagcgggaccgccccatctgccacatcgaccgcatcctcaaggtgcacaacgccccgcgcaccgtcgcccgcttcgaggcctaccgcgacgccgtgcgctcccgctgccgcgccgtcgtcgccgcccgggcggcggccgacggcaacgagctgctcaggttccactccgcgccgctcgcgtgcgcgctcggcctcggcggcgcgaccgccctctgctgcgccgccgccgacgccgacgccgacgcgcccgcgccgccctgcggcgtgtgcacggccatccggcacggcttcgcgccgtggctgggcgcgcacccgctcggcgtgcgtaccacggccagcagcggccgcgcgcacgactgcgcctcggataataataatccgtcgccgccgccgccccaccagacgcagtcggcggcgagcgacgttagcaacgctgccgcctgccgcgccatgctggtgtgccgcgtcatcgccggccgcgtccgccgcgacggcgacggcgacacgtccgccgctgccggcgaggatcaggaaggcccgttcgactcggtggcgggtgaggacgccgccagcagcagcgtgtacgggaacctcgaggagctcttcgtggccaaccccagggccatcctgccctgcttcgtcgtcatctaccgcgtccttgattcttga

SEQ ID NO: 97871 - DNA, 1855 bp, Zea Mays
gactgaggaagagcttctattgtcaagtcatagaacggggttgcgaggtagcccaattctacagcactagtctttttcgtctcggtcgccatgtccttcagcgatgacgaaccgatcatcccttctccaaactcagggccgaggccgacgccgatcgtgcccgggagggtgcagctggtgagcaagaacaacaacatggctccactggaggagaatacccagaaggtgctgcttgagctgaccggcggcgactccaccagcgaccggtcggggcttgacctggtggccgtgctggacgtgagcggcagcatgcagggcgagaagatcgagaagatgaagactgccatgaagttcgtggtgaagaagctcagctccatcgaccgcctctccatcgtcaccttcctggacaccgccaacaggatctgcccgctgcggcaggtgaccgaggactcccagccgcagctgctgaagctcatcgacgccctccagcccggcggcaacaccaacatcagcgacggcctccagacggggctcaaggtcctcgccgaccgcaagctcagctccggtcgcgtcgttggcgtcatgctcatgtccgacggccagcagaaccggggcgagccagccgccaacgtcaagatcggcaacgtgccggtgtacaccttcgggttcggcgcggactacgaccccacggtgctgaacgcggtggccaggaacagcatgggagggaccttctccgtcgtcaacgacgtgaacttgctgagcatggccttctcccagtgcctcgccggcctgctcaccgtggttgtgcaggacctcaccgtcacggtggcgcgcatcgaggatgagtccaccctacagaaggtggccgccgggaactacccgcagacgccggacgcagacgccggctcggtcaccgtggccttcggcgacctctacagcaaggaggtgcgaaaggtgatcgttgatctcctcctccccgccatcgacagcgaccgtggcgcggacatcctggaggtgacctactcgtacaagacggcaggaaagctgttcgacgcgccgcccgccacggtgacggtgcggcgcagcggcacggctttcccggcggatgatccgccagtggacgtgcagacggaggaggcccggctgaagacggcgacgatgatccagcaggcgaggacgatggcggacggcaagaagctgggcgacgcgcgggacaagctggcggaggcccagaacgcgctggaggacgtggtggcgcagtccgacccgctgctggacgccctcaggacggagctgcaggagctactgaagctgatgaagtcgcaggacgtgtacgagaagcagggccggccctacgccatgtcgtcggagacgtcgcacgacaggcagcggttcgcggcgaggggcgacatcgagagcaatcgcctcttctcgacgccgcgcatggacaagtacctggagcaggccaagaagttcgacgaggacccggctgcgccgctgccttcggcggacaaggacgaggaagaggaggtcgccgccaacccgctcgcgccattggtcggccccatcaccttctacatccgggccgccgtcgaggcgctgcaggccatcgagaagctcatcaacaagggagccaattaatgcgatgtaatgaacgggcacgcagtcagatccagtcctgttttgtttacatggctatggccatcctcgtcatcccttcttctctctgctatatctcgatgaataaaatctgcgtgtattgtgtttttcgggggatttccacgtcaccttgctgccatgtatgcagccggataataatatatttaattttgctgaaatcctcagtttctcattg

SEQ ID NO: 97872 - DNA, 728 bp, Zea Mays
aattctcttcccaaatcgaatcacacgcgagcacgcttccaggttcgctggcagcggctggtccatcgctctccacctctcccttcttcgcgtgcggcagtttcaacaaccttcaccggcgtgcaacgagggtgggcccttctccggcacgcagcgatgcgggcgggtcccaaggggaacggcgcgggtgtcccaggcggcgcggcgcggacgggtctccgacgtgtgctgcacggcgaatcccaggtgtgtgcaggcggatccccggcgagcgcgacgcgcgtagatctcagcatgcggcagcacgggccgacctcggtgtacgcggcgcgtgggtccaaggcgtgcgcaatgcaggcggatctctagcagcgtggcctgattgttctccggcgcggcgcactccctagccctcttctccggcggtggcctgctccaccatccctgcttgagtgtgtctctccttctcctccctgtctctggcgtgcacaggctccaacgactggcaggcacgggtggatcctcctcctgctcgtccctatctctggtgcgcgcgctgctcagctacgatgagctctcctgtcaacggcaggggctacggcgagctccgtcaactgcgttgaacatggaagacaaagagcagggaaacatttgatgtttgtatctgaacatttggtagttgaaattgaacatttgctgctagttgaaactgaacatttgttgttgca

SEQ ID NO: 97873 - DNA, 689 bp, Zea Mays
catacatcggtgtgttgcggtgagagccggaatatacccggttgctcccccttggatccttgtttgcttcctgctgcctggccttctctcctccccaaaatcaatcgcccacaaaggagagccaggcagccagccaaatcttccacctcctccatttccagccccgtccccacaccagctcgcgtaacctcctgcccatggctggaggcggcggcgcaggcgcgggctcgtcgtccggcggcggcggagggggcggcagggagggcgactgggactgcggcagctgcggcaaccgcaactacgccttccgctcgctctgcaaccgctgcaagcagccgcgcctcctcgtcgaccccaacaccccgcgcgactccaagtggctaccccgcgccggggactggatctgcaccggtaacacctctcctgccacgctacccttcattattacccagccctgaatcacccgtcacttgttgtagatgctggctctcatccatccctatgcagcgcattgatagtctagtgaatctagcatttctccttcatcccttgtgttcgctctaggtttagtatgttggcatagccctggttattattgtagacttcttagctagactttgggtctgtttggattcaagatctaattactagctagctaaaattagctaaaattgattctagtgcatcca

SEQ ID NO: 97874 - DNA, 1562 bp, Zea Mays
acccggttgctcccccttggatccttgtttgcttcctgctgcctggccttctctcctccccaaaatcaatcgcccacaaaggagagccaggcagccagccaaatcttccacctcctccatttccagccccgtccccacaccagctcgcgtaacctcctgcccatggctggaggcggcggcgcaggcgcgggctcgtcgtccggcggcggcggagggggcggcagggagggcgactgggactgcggcagctgcggcaaccgcaactacgccttccgctcgctctgcaaccgctgcaagcagccgcgcctcctcgtcgaccccaacaccccgcgcgactccaagtggctaccccgcgccggggactggatctgcaccggttgcagtaacaataattatgcatccagaaagaactgcaaaaagtgtggcttgcccaaggaggaagcagcaatgccagcattgcaaatggcagggatgactatgccaacttatgcaacttatattgcaagactacaaagccttgctgcttctgcttctgcctataagatgaactttgggatggctgccaattcacctttgcagcagcaactacttgcaaatgcaaactggccctatgggatggctggtagatatgggatgcaatcttctggttggccatttggcaacggcaacccaaatcagtttttaggtgttccaaaggattggcgtaatggagattggctctgcagctgtggatttcataactattcatctcgtactcagtgcaaagagtgtggtgcacctgtaccatcgggcattccctccacaacaatgaaagctacatctgatgcctcttccacattaggaactaagcggttggcttcagaggacctggccaatgactgggataataaaaggctaaatccaggaaatgacaattatccactttcaacaggagctgcaaataatttatttttgggtattgagcaaggagctggaagcagcaatggccagtctgcctttcccaagtttgacaacgggagctcaatggcattaccatctgggcagggaatgtctggtcttatgggaaaaggggcaaaatggcgtgacggggactggttgtgcaacaactgcaacaatcacaactatgcatctcgtgcgttttgcaacaggtgcaaaactcagaaagaatctgcagttcaccctggtgtgttatagcttgctgttggattattttgttccaggatatgttgctgcctgttctagctccttcctcaagactgcggtttgagttttttcgattctgcagtgtttttgctgctctcaaatgtttgtctcgatatttcattagtgcttgttgaagttcccccatttgtttatggtataagcgcttgaataaaatgtttctggaaagtaccggcctacaatctggattttggcaaaataattgaattagttgttgtacaatgaagcaaattgtcttacgttgtactttatgaactctggagtattatcactcgtcgggttgaaaaggggaactatacaatgtaatttcagtacagattattattttttcctgagactcc

SEQ ID NO: 97875 - DNA, 1371 bp, Zea Mays
acccggttgctcccccttggatccttgtttgcttcctgctgcctggccttctctcctccccaaaatcaatcgcccacaaaggagagccaggcagccagccaaatcttccacctcctccatttccagccccgtccccacaccagctcgcgtaacctcctgcccatggctggaggcggcggcgcaggcgcgggctcgtcgtccggcggcggcggagggggcggcagggagggcgactgggactgcggcagctgcggcaaccgcaactacgccttccgctcgctctgcaaccgctgcaagcagccgcgcctcctcgtcgaccccaacaccccgcgcgactccaagtggctaccccgcgccggggactggatctgcaccgcagcaactacttgcaaatgcaaactggccctatgggatggctggtagatatgggatgcaatcttctggttggccatttggcaacggcaacccaaatcagtttttaggtgttccaaaggattggcgtaatggagattggctctgcagctgtggatttcataactattcatctcgtactcagtgcaaagagtgtggtgcacctgtaccatcgggcattccctccacaacaatgaaagctacatctgatgcctcttccacattaggaactaagcggttggcttcagaggacctggccaatgactgggataataaaaggctaaatccaggaaatgacaattatccactttcaacaggagctgcaaataatttatttttgggtattgagcaaggagctggaagcagcaatggccagtctgcctttcccaagtttgacaacgggagctcaatggcattaccatctgggcagggaatgtctggtcttatgggaaaaggggcaaaatggcgtgacggggactggttgtgcaacaactgcaacaatcacaactatgcatctcgtgcgttttgcaacaggtgcaaaactcagaaagaatctgcagttcaccctggtgtgttatagcttgctgttggattattttgttccaggatatgttgctgcctgttctagctccttcctcaagactgcggtttgagttttttcgattctgcagtgtttttgctgctctcaaatgtttgtctcgatatttcattagtgcttgttgaagttcccccatttgtttatggtataagcgcttgaataaaatgtttctggaaagtaccggcctacaatctggattttggcaaaataattgaattagttgttgtacaatgaagcaaattgtcttacgttgtactttatgaactctggagtattatcactcgtcgggttgaaaaggggaactatacaatgtaatttcagtacagattattattttttcctgagactccagttgtgctgtt

SEQ ID NO: 97876 - DNA, 1139 bp, Zea Mays
acccggttgctcccccttggatccttgtttgcttcctgctgcctggccttctctcctccccaaaatcaatcgcccacaaaggagagccaggcagccagccaaatcttccacctcctccatttccagccccgtccccacaccagctcgcgtaacctcctgcccatggctggaggcggcggcgcaggcgcgggctcgtcgtccggcggcggcggagggggcggcagggagggcgactgggactgcggcagctgcggcaaccgcaactacgccttccgctcgctctgcaaccgctgcaagcagccgcgcctcctcgtcgaccccaacaccccgcgcgactccaagtggctaccccgcgccggggactggatctgcaccgcattaggaactaagcggttggcttcagaggacctggccaatgactgggataataaaaggctaaatccaggaaatgacaattatccactttcaacaggagctgcaaataatttatttttgggtattgagcaaggagctggaagcagcaatggccagtctgcctttcccaagtttgacaacgggagctcaatggcattaccatctgggcagggaatgtctggtcttatgggaaaaggggcaaaatggcgtgacggggactggttgtgcaacaactgcaacaatcacaactatgcatctcgtgcgttttgcaacaggtgcaaaactcagaaagaatctgcagttcaccctggtgtgttatagcttgctgttggattattttgttccaggatatgttgctgcctgttctagctccttcctcaagactgcggtttgagttttttcgattctgcagtgtttttgctgctctcaaatgtttgtctcgatatttcattagtgcttgttgaagttcccccatttgtttatggtataagcgcttgaataaaatgtttctggaaagtaccggcctacaatctggattttggcaaaataattgaattagttgttgtacaatgaagcaaattgtcttacgttgtactttatgaactctggagtattatcactcgtcgggttgaaaaggggaactatacaatgtaatttcagtacagattattattttttcctgagactccagttgtgctgttatgcgagttttgcccattcagaat

SEQ ID NO: 97877 - DNA, 819 bp, Zea Mays
ttacagttactgttcctgttaattttaggtttgatgtcaacagattatttcttcttcattctcaatcttgcttgtttcagcattaggaactaagcggttggcttcagaggacctggccaatgactgggataataaaaggctaaatccaggaaatgacaattatccactttcaacaggagctgcaaataatttatttttgggtattgagcaaggagctggaagcagcaatggccagtctgcctttcccaagtttgacaacgggagctcaatggcattaccatctgggcagggaatgtctggtcttatgggaaaaggggcaaaatggcgtgacggggactggttgtgcaacaactgcaacaatcacaactatgcatctcgtgcgttttgcaacaggtgcaaaactcagaaagaatctgcagttcaccctggtgtgttatagcttgctgttggattattttgttccaggatatgttgctgcctgttctagctccttcctcaagactgcggtttgagttttttcgattctgcagtgtttttgctgctctcaaatgtttgtctcgatatttcattagtgcttgttgaagttcccccatttgtttatggtataagcgcttgaataaaatgtttctggaaagtaccggcctacaatctggattttggcaaaataattgaattagttgttgtacaatgaagcaaattgtcttacgttgtactttatgaactctggagtattatcactcgtcgggttgaaaaggggaactatacaatgtaatttcagtacagattattattttttcctgagactccagttgtgctgtt

SEQ ID NO: 97878 - DNA, 398 bp, Zea Mays
ttcttagacttcttggagtgcacccatggacagaactcactcctcttgtacaatgctctacactttacaatggaacattccaaaagaatggtatttgtcatttagctctacacccaacaacaggtccagtaccggtataatatcgatgtcattgtctcgaatccatggacgagttaaatttcaaaaaggcttgtccgagcatgtcacccagccggagttgggcttctgtggagaggtgtagttggtcgtcgcggaggggcaatcctatcgcgtctacaagaactacgttaggaagcttgatgtttctctgagcctccctgacgatatcagtgtaattcccctctcctgatgcaagaccaacctgaaattaacaactgccatatgagtttcagggggga

SEQ ID NO: 97879 - DNA, 174 bp, Zea Mays
tgccatatcgttttcagtttggctttgttcagttcgtgtccgtggtcgagtcgtgttgctggtttagggtgtatcttcgtcgtagatcaaatgtgccttcgccactatcccatccaccattacccagatcacaagtcgatccaccccattaatcgacttgccctcgctagccgc

SEQ ID NO: 97880 - DNA, 1260 bp, Zea Mays
agcatttttcattacattcttcttcttatgagataaatgtacaatcgtaccttcgacctttacacgggaactagctcgaaggtacttcaaaggctaccgaaaacgaagcttagggctctcaaaaggtgaatttatacatgtcactattcacttatttatatggaagttgtagagctttgtatgaaattacaaacacgccaacaaagttcatacacatgatttacaaatgatataggggcatcattgtcttttctatatttttgctgcacaagtcttgagcttctttcccttcgtcgctttgcactcgaagccttctccacgccgaggctaatgacctcggattgcaccttcgctgcacgcgcgtatagtcgaagcttcttttataagctgcttcgatcgaaaaggctacattcgttcattctttactatttgcttgaaacacatttgcttacaccgaaataaagatgtcttgaggacctttggtaaggcaagcctcaacaattaccgttattattattactactttggcttaatttttgtagcttaattaagcactcatggaaattatatatcagtcgtctcatcagtaggcaataatattatgttttttcgaattctggaatcgactgaaaatgtgtatccaaacaaacatgaatttacgtgtaaggcgcgtggacagtggtttattattacacgtacaaaacaaggggtttattattacaaacaagacgcgtcgtcgtacagacataccggccgttaattattacacacttaactctccccgttggtgcatgcatgggaggtcgtttatttaggtacgtacgccattattggggatgatgatagcagtactacttcacttggcattagcctttgggtcgtcagcgccggggatgatcttgctgctgcagatgcagtcgttcttgaggacgcagtcgacaaagcaggtctggacagcatcaggcgactcaaggatgcacttgccggcacaggcgcagttcttggagcagatgcactcgttgttgggaacacgaggatcaatcaccgtttcggtgcagatgcggctgggatgttctacggtaacatcagcatcagcgacgatttggccgacgacggccagcagcatcaagcaaacaattgccatcttcttctgcgcagcggaagccatggctacggcgtgtatggagaagttgtgtgtccgtgtgtgtgttaatgagtccgtcggtctgactgtgtgagcgatggcttactggttgctgt

SEQ ID NO: 97881 - DNA, 768 bp, Zea Mays
atgggcgcctccgctccgacggccgctctgtcctctgcgcctccactgccgctctccttgtcagtcgccaatggccaggaggaggaggaagggtcggccgggccaccgctggtggccatggcatcccagtgtgccccgcccttgcctcctcggccacgcgccgccgcgccgttcctcctcggccacacaccgccgcacgcccgtcctcctcggtgcgccgccctcaccccctcggtgcgtgccgctgcgcgcccgtgcttcctcgcctccacgcgcgtcctgctgagaccacagagcgaagaagccccagcctcctgtagctggtctgcctctgaccctctcctctgcgcttcccctgcgtcggccctgctcgtagcttggaggcggcggcattctccggcaatggggtgcaaggcgtgcgacaagcccaagcccaactaccgcaagggcctgtggtcgctggaggaggaccagaagctccgcgactacattctcctccacggccacggctgctggagcgcgctccccatgaaagccggtaccaatgtcaagatagctgccattccttcaagcgtcgtggttctgacttcagagacctttgactcaattgtccttgatgagttttatgccccatggtgtggtcactgcaagcatcttgctccgatttatgagaagctggcttcagttttcaagcaggacgacagtgttgtgattgccaatcttgatgctgacaagcacactgacttggatgaaaagtatgcattctga

SEQ ID NO: 97882 - DNA, 279 bp, Zea Mays
taaggacttctgcttactttccgatgccaaagatttttggaaattagtgttgaactcatttgatgcattggtgggacaacccttggctgcaaatgcagcacaatcaacttgagctaccttgggttgagtatgatagttttccaaagaattggtgtcagtcatcaactgtctctcgtgctgatttctggcaagaagttcaacaatgtccatggggaagtcgtctatcacattctgtttctcgtgcaccttctgctttcctttcttattctttggtatatt

SEQ ID NO: 97883 - DNA, 1164 bp, Zea Mays
agaatcaaaatccaaaagcatctttaataatatacctatgacaatttataataactatgtttgtcctttcttccatgttcacagcatctttaataataatatacctctgcagatatggtgtttctggtttccctacattgaagttcttccctaagcgaaacaaagctggtgaagattatgatggtggccgggacttggatgactttgtcaagttcattaatgagaagtgtggcaccagccgggatccaaagggccacctgacttcagaggctaggcttgtgccaagcttgaatcctcttgtgaaggagtttctcaatgttgttgatgacaagcggaaggaagtcctctctaaaatagaagaggatgttgctaagcttagcggttctgcagccaagcatggaaagatatatgtgacagctgcaaagaagatcatggacaagggctctgactacactaagaaggagactgagaggcttcaccgcatgctggagaagattccaagttcacacagcaggagttgctagcttgcaagccgattcttactccaaaatgggtaggcttacgggttgtgaagattatgatgctactggttacgcctaatctttatggcaatttggtggctaacacggctgcaggtattgttggagggacgggcatcatgcctggagactttgtggcatatggaacttcttggagctttttgctatggtcttcatcaagtttttaaccaatgacttatctcccgctaccccgacccgctcatcaaggccatcgacaccatcaagatcgatctggagaccaacaaaatcatggacttcatcaagtttgacgtcagcaacgtggtcatggtgactggcgggaggaacaccgagcgtgtaggagtcatcaagaacagggagaagcacaagggcagctttgagaccatccacgtgctgcttggagctttttgctatgtctagttttctcctatttgttgtacaggaaaacatagaatagaattcaaatttggtggtcacaaaagtgtggagactttaattcatataaagttaggcttaacattagtgcaaacatttgtattttagtttagatttagagtacacttatgtatgtgttgtttgacaatgcttatttatgatatattgaatggtacttatttatattata

SEQ ID NO: 97884 - DNA, 631 bp, Zea Mays
ggcacacagcaaccagtaagccatcgctcacacagtcagaccgacgcactcactaacacacacacacggacacacaacttctccatacacgccttagccatggcttccgctgcgcagaagaagatgacaattgtttgcttgatgctgctggccgtcgtcggccaaatcgtcgctgatgatgatgttaccgtagaacatcccagccgcatctgcaccgaaacggtgattgatcctcgtgttcccaacaacgtgtgcatctgctccaagaactgcgcctgtgccggcaagtgtatccttgagtcggctgatgctgtccagacctgctttgtcgactgcgtcctcaagaacgactgcatctgcagcaacaagatcatccccggcgctgacgacccaaaggctaatgccaagtgaagtagtactgctatcatcatctccaataatggcgtacgtacctaaataaacgacctcccatgcatgcaccaacggggagagttaagtgtgtaataattaacggccggtatgtctgtacgacgtgtcttgtttgtaataataaaccccttgttttgtacgtgtaaaaataaaccactgtccacgcgccttacacgtaaattcatgtctgtttggatacaca

SEQ ID NO: 97885 - DNA, 1254 bp, Zea Mays
atgaatggccctccctctccttcgtcgtcgtctcgtttatccgtagcgcttcttctaatgatcactgtgctcgcatgcggcttcgtcttggcttcctctggtcgaagctacgcccatgctgactacgctgatggaagtgaccaagagctgctgatgtcgacggagtggttccgcttccatgcctggatggcagctcatggccggtcatacccgacggccgaggagaagctccggaggttccatatataccgtgccaacgtggagctcatcgaggccacgaaccgcgacaccagcaagaccttcacctgcggcgagaaccagttcaccgacctctcccaccacgagttcctcgccatgtacaccatggccggccattcggcgccgccacttctaaacctctcgtccgtgatcacgacccgcgcgggcgatatcacagagagtgatcgcggcacgacgcaagtggaagaagatgaagaagtagaagctctgccggaaaacatcgactggagggagcaaaacgcggtgacgcctgtccaggatcagcgcaggggctgcaatgcttgctgggtgttcgcttcggtggcaacgatggagagtgcacacaagatcaagacaaatcacgggcatggggagctcctaaagttgtcggagcaggagatcgtggactgcaccagccaacactgcggcggcggctacccggatgatgcattcagttgggtgaagaggaatgggatcgccacggagtcggagtacggcggttacgaggcgacggtggactcctgccgcgccgacatggtacgacctccggccgtcagggtcaaggactacagtttcgtgcccaaaaactcagagaaaaaactagccatgagggttgcccagcagcccgtcgccgtcctgttcgacgccaccgatccctgcttccaatgctacacgaatggcatctactcggggcggccagcagcagccgccgaccgctataatatcctcaaccacgccatggccatcgtcggctacggggaagacaagactacggggcgaaagtactggatcgccaagaattcctggggtacccgctggggacaaaacggctatgtctacatacgcaaggacatggccgacagacccgagggcgtgggtgggcttgccacacatcccaggtaccctatcgtgtaatagcttaattcccatatatgtgttgacaataaaggacaacgtacggaacatggtggtggagcaccagacttttgagacgtc

SEQ ID NO: 97886 - DNA, 1692 bp, Zea Mays
atgcctcctggtcgtgagaaggttggagtcaaaaggccacatggacctcagctatcagaaccaccattgcatccatacgaacaactgcgtctaagacaatgtatgaggaataattcaaggctacaacaattaggaatccctgctttatcaagcatgcttgcaagcacaaattctatttctcagaggaataggccaagtcatagaaatagtgaggactctgagtctgattatgacatttcacaagatgagactggtgataacaatgttaaggtgggctcaaaggaatgtaacataagaactactgataattctcttggtgcaatcaagctctggtctaagagagtttttgcgcaacaagaaactactagaattacaaggtcaaagaaaaatattgctcaacctgatgcaactcttacaccaaggcacaacattgattaccacacacaggctaatggccatgcccatttggatgagaacactaacatgaccaatgaaggtcatgttgctccttttgatgggaagaaccctacaggcaatgaagataatgtggatgtcctagctgataacaacatgacgattggaggtcaagttgatgacactaatcagatgtcgaacggagatttagaattaggtcagaatgatcggtgggaaaggggaatcaatatgggacatggtcttcatagaattaaccgaggtttgcgtggaaagttgcaagttgttattcctgaagggaagataaggcctatggcaccacttgttgctgctaagtttgcaactgaatgcaacattgttgtgaggaaccatgtgccagtgttcaaacattggaaggattacaagaaccattcaggcctattcaatctatttacaggaaaacttagtgcaaagtttgacattaacacaagtgatgcaccagttcaaaaggcttgttcccagatgatgaagagtgcagttcgacaacaacgataccggctcaagaaaaagtactttgatccttttccgctacatctagtggcaaaaaaatctccaatcagatctatgactgatgaagagtggaatgaacttgtggagtattggaagagtccaaaaaagtggtatgagacatctcaaaaaaacaaagagaatcgatccaaagttaaattccatcaaacaactggctctcgtagctacatggttcatgtagaaaatttgggagataaatacattgatcaagaacctgatgcactggatttatttaaggagtgtcactacagcaagataaagaaatgctattcatcttctgttcaacaagttataactgaaatagaaaacaagtggtctacaccaacagaaggtgaacaagaaatgtttgtgactgaagttgttgctgatgtacttgctcaaaatacaaagaaaaatttgttccttcaaaatgtggggatacaaagtgcttatccaaggtctagtgtaagaaatatcgaagcacaacttgaagtagagaagagagcaaatagtgctcttcgatctgttgtcaacacccaacgggaggaactagaagtattgtcaaagcaaatgcatgaagcagaagagtcacggatcaaggagcaagaggaattgaagaagaggcaagttgagatggaagcagagatgaagaagaggcaagctgccatggatgccaagctccaacttttgtttagtaaatttcaaccacgttag

SEQ ID NO: 97887 - DNA, 336 bp, Zea Mays
atggcttacctccaccccgaaaaagaatgcgggtctatgcgcttcgacaagcattccttttgcgacagtggtaacgagacaactaatgtactctttgaattggttaaagcttttattctgttttgtactcgtgtgctcttatctgcttgttgttactgttccatcaaagcaaacactataacctcggttattgaggttttgacatattcactttatatgcagaaagtcaagtctgagccaatttgtgtatgtggtgacgaagaggatcaagctgagccagagaaggccatcttcgtctttgccaagaacaccttgccaccaactggtataaattga

SEQ ID NO: 97888 - DNA, 499 bp, Zea Mays
acctaatgctagcagccacaatgagacacactaaagcaaaaccatgcattagtatataccgagacataacaaataaatgcaaattgcagcattgggatatagtgaacaagacagcttatccactagccaatattatcatacatttgcctgctcgtgttcatgagcatgacaacaatgcggatcacacttgcatggtattaagcacttaacacagacaacataacacttgacaacatatgcttttctatagtcaggttttgtagcaatcagtataagctattttttcccttatcgtgcaacagtggcaggcttgtgggagtaattattttagtgaacgaaggtccccagtactaaaaaaatgaagcataggagtccacaaatccacatggggtcaaatcggagaagcttccaagtggtcggtccccttgcgtgagatgttgggtataacaagtgtgaaatgtaaacagctaccaagtgcttgtaatctacttttcttttc

SEQ ID NO: 97889 - DNA, 2595 bp, Zea Mays
ctttcactcgatcatcccttcacatgacacaacccaatgcaatgctgatctcatcagcacgcgccttcccgccctgcactcctttttttttttgcagtttgatattgctccgtccatcatatctattcatctcccttcccaagttaactgcttcctcaccaaacaccgtactctccagcttcaaactctccttccggcccttgcagatcgcagcttcaaaatctccctcccagtcccagtcccagtcccagctggagagtgagatcagctgctagcaaggctatacaaactcgttgctcccaccagcccagcagaaaccatcactaccaacatctatccagcggctaccagctgcacttggcttccttccttgttgctgcattgtagtagcttgatcatcttgaaaagcctacgctatcaacctccaacctgcaagctaagctaccatggggcgaaggaccaagcagtcttcttcgttgtcgttgttccggtactcgcggagccgttcttcctccgcgcccaccacgccgaggccggaaccagcagcagagcctcccgtcgggtgcatgtccatggtgcactacctcatcttcgcgcctggcgccggctgcgtcggccgcccgcccacttccgctaacgctgccgtcgtcacgccgcacgactgccacggcctcggcagcagcgacggccaccggcggtgcgacggcagcaagagcggattcgaggcgcccaggaacagcctcgatctcgacgctgacaaccccaacgacatccaggtcggtcagtcttgctctagcttattcgctttgcttcattgtcgtcattgtcaattgctaatcgccacataacgctgtctgtctgtttgtcttgcagattggcgtgcagatccagccggtgttcgacgccctcgccagcaggacaagcagcatgcgccgccccaccaagcccacggcgccgtcgtccgaggccgagacgcccaggacgcccagcctcgtcgcgcgcctcatgggcatcgacggcctgccggaccagcagagctcgccggcgtcggctccggcgcagcacaagaagcccggccccgtcagaagatcaagctccacgggcaaggagaacgacagcagccgctgctccccgccggcgtctagagagaagaagaagcgcgtgatccccgagtccatgaaccgggagccgctgcgccgcctcagctgcaacgtcgtcgccgaggcccggtcgctaccggacacgccgcgcgcgtccacgtcggcgcgggcgtcctgggacgggcccaggctgtcgctgcaggcgctcaaggagaacgtcctcgaccgggccgcgcactacatgtccatgcccagctcgcccacgtacctgtccgccgccgccgccggcaacaacaagaggaaagatgctgcctgcagccgccgccggcggcgggacgagaaggcggccaaggcgcacgcgcgcgagatcctcctccaggccaaggagacggtcgccagccgcaagtctggcaagaacaacgcatcctcgtcgccggcggcggagaaaaggcagagctgctttaacgacaacaaggagaacgtgccggctcccgctctggaggacgccaagctgcgtgtcgtggctcaacaaactgccaagccgacgactgtggccccaaagccaaacgccgagcatcacagccccagggtggcgctggcgccgaggcagcagccgtcgacccctccgccgccgcagcgtgccaagccgtcgcggccgccgccgccgccacctccgctggacccgccacccaccagagcgagaaaacctgacgggtgcgagcgcttcgctacgcggatcaagaagcccgcggcgtgcccggggtccgcgccgccgacgtcgtcgtcatcaacggactgctgctcggcagcggaggcccgcgcccgcccgccgtcgtcgccgctggaggaggaccccgagtacaggtacctgcggacggtgctggagcgcggcgggttcatgcggtcgccgccgccacggcggccggggcggagccactcggtggcgtcgccagtggacccgatcttgttccacctcctggagctggagctgcctgccgtcgaatcacaaacacggctcgggcccctccggcatcggtgcaaccggaagctgctgttccacctggcgcaggagctactggcagacctgctgctggacctggacgcgtcggcggcggcatcagtatcaccatgcgccggagcgacggcgacggggttgccgctgctggggaaggtgtggaaaagtgtgcggagcttcccggccgcggactgccgggtggtgggcgacatcgacgcgctggtggcggcggacctgaagtcgtcgaacgtgcggcagctggcgcggcaccccgcggtggtggaggatgcgggcgacgtggcggaggaggtggcggaccgggtcctggacgcgctcgtcgcggagtgcgtggcggaatctgtttctctctcctgcgccgcttagtcgcactcgtcgtcgtcacgtgcggcggcgaggtaaccgttggggcggatcgggattgggggcgcccgtgacgtcacgcggccagcggatctcgac

SEQ ID NO: 97890 - DNA, 2869 bp, Zea Mays
ctttcactcgatcatcccttcacatgacacaacccaatgcaatgctgatctcatcagcacgcgccttcccgccctgcactcctttttttttttgcagtttgatattgctccgtccatcatatctattcatctcccttcccaagttaactgcttcctcaccaaacaccgtactctccagcttcaaactctccttccggcccttgcagatcgcagcttcaaaatctccctcccagtcccagtcccagtcccagctggagagtgagatcagctgctagcaaggctatacaaactcgttgctcccaccagcccagcagaaaccatcactaccaacatctatccagcggctaccagctgcacttggcttccttccttgttgctgcattgtagtagcttgatcatcttgaaaagcctacgctatcaacctccaacctgcaagctaagctaccatggggcgaaggaccaagcagtcttcttcgttgtcgttgttccggtactcgcggagccgttcttcctccgcgcccaccacgccgaggccggaaccagcagcagagcctcccgtcgggtgcatgtccatggtgcactacctcatcttcgcgcctggcgccggctgcgtcggccgcccgcccacttccgctaacgctgccgtcgtcacgccgcacgactgccacggcctcggcagcagcgacggccaccggcggtgcgacggcagcaagagcggattcgaggcgcccaggaacagcctcgatctcgacgctgacaaccccaacgacatccagattggcgtgcagatccagccggtgttcgacgccctcgccagcaggacaagcagcatgcgccgccccaccaagcccacggcgccgtcgtccgaggccgagacgcccaggacgcccagcctcgtcgcgcgcctcatgggcatcgacggcctgccggaccagcagagctcgccggcgtcggctccggcgcagcacaagaagcccggccccgtcagaagatcaagctccacgggcaaggagaacgacagcagccgctgctccccgccggcgtctagagagaagaagaagcgcgtgatccccgagtccatgaaccgggagccgctgcgccgcctcagctgcaacgtcgtcgccgaggcccggtcgctaccggacacgccgcgcgcgtccacgtcggcgcgggcgtcctgggacgggcccaggctgtcgctgcaggcgctcaaggagaacgtcctcgaccgggccgcgcactacatgtccatgcccagctcgcccacgtacctgtccgccgccgccgccggcaacaacaagaggaaagatgctgcctgcagccgccgccggcggcgggacgagaaggcggccaaggcgcacgcgcgcgagatcctcctccaggccaaggagacggtcgccagccgcaagtctggcaagaacaacgcatcctcgtcgccggcggcggagaaaaggcagagctgctttaacgacaacaaggagaacgtgccggctcccgctctggaggacgccaagctgcgtgtcgtggctcaacaaactgccaagccgacgactgtggccccaaagccaaacgccgagcatcacagccccagggtggcgctggcgccgaggcagcagccgtcgacccctccgccgccgcagcgtgccaagccgtcgcggccgccgccgccgccacctccgctggacccgccacccaccagagcgagaaaacctgacgggtgcgagcgcttcgctacgcggatcaagaagcccgcggcgtgcccggggtccgcgccgccgacgtcgtcgtcatcaacggactgctgctcggcagcggaggcccgcgcccgcccgccgtcgtcgccgctggaggaggaccccgagtacaggtacctgcggacggtgctggagcgcggcgggttcatgcggtcgccgccgccacggcggccggggcggagccactcggtggcgtcgccagtggacccgatcttgttccacctcctggagctggagctgcctgccgtcgaatcacaaacacggctcgggcccctccggcatcggtgcaaccggaagctgctgttccacctggcgcaggagctactggcagacctgctgctggacctggacgcgtcggcggcggcatcagtatcaccatgcgccggagcgacggcgacggggttgccgctgctggggaaggtgtggaaaagtgtgcggagcttcccggccgcggactgccgggtggtgggcgacatcgacgcgctggtggcggcggacctgaagtcgtcgaacgtgcggcagctggcgcggcaccccgcggtggtggaggatgcgggcgacgtggcggaggaggtggcggaccgggtcctggacgcgctcgtcgcggagtgcgtggcggaatctgtttctctctcctgcgccgcttagtcgcactcgtcgtcgtcacgtgcggcggcgaggtaaccgttggggcggatcgggattgggggcgcccgtgacgtcacgcggccagcggatctcgacggaaacagcggagggtgcccgggcgtcccgcggcgctcacgaccataccctgcggctgcgcctgctctgctctggtagcctgtttctctgaagctggggccaggtgccagagaccacgcagcttctctgttcaacggtcatgatgggaacgtcgcgaagcctacgctagcacgcctcgagatgggtgcctctgaatcgaccggcgtatcccctattcacctgtaccgtatcactactgtagctgtaggtacgcgcctctgaattttgtctggttggttcgctagtttgctgcgcttggagtttgagtttttgttggcctggccacatgtaagtacttcctcaaccgaagaatataactatgctacgctctc

SEQ ID NO: 97891 - DNA, 100 bp, Zea Mays
ttttctgttttatattttcatttataatttgagttcaaatttaaattggtactcctttactcaaataaaacgcatcacacaaaaagaaacatcagcatga

SEQ ID NO: 97892 - DNA, 1966 bp, Zea Mays
gtaggttgttcatctccgtcccccaaatggcgccgcgacgggaaaactatataaacaaacaaatcatcaggatccatctcctccctatatatacgccactctccgtcttcgcctttggtctccatcactgattctgattctgattccagccaccctgaccggcgaagcgcggctgacatttcccccccaccataccgccaccacctgagaagagatcgatccaatcagattaaccaattagcagggagggaggagaggggcaaaggcaatggccgggacggaggtggaggacccgccggcggcggcgttggaggtgcccgcgaaacgcggccttctgcggtacaactcgccgctggcgcaggtgtccctgctgggcctcatctgcttctgctgccccggcatgttcaacgcgctgtcgggcctcggcggcggaggccaggtcgaccccaccatcgccgacaacgccaacaccgcgctctacgcctgcttcgcggtgttcggcgtgctgggcggcgccgcgcacaacctgctgggcccgcgcgcgacgctgctggccggcgcgctcacgtacccgctctacgccggctccttcctctactacaaccaccgcccgggctcgcaggtgttccccgtcacggcgggcgccctgctcggcgccggcgcgggcttcctctgggcggcgcagggcgccgtcatgacgtcgtacccgccgcccaaccgccggggcacctacatctccctcttctggtgcctcttcaacctgggcggcgtcctcggcggcctcctccctttcgccctcaactacaaccgcggggacaagaaagggagcgtcagcgacggcacgtacatcgccttcatggcattcatgctcgtcggcgccgcgctcaccgtgctcgtgctgccgcccgccaggatcgtccgcgacgacggcaccagggccaccagggtcaccttctcctccccggccaccgagggcgccgagatcctcaagctcttcgccaactggaagatgctgctcgcgctgccggccgcctgggccagcaacttcttctacacctaccagttcaacaacgtcaacagcggcctcttcacgctccgcaccaggggcctcaacaacgtcttctactggggcgcgcagatgatcggctccgccggcatcggctacttcctcgacttcggcttcgccagccgccgaaagagggggctgttcggggtcgccgccgtcgccgccgtcggaacggccatctggggaggcggtctggccaaccagctcagctacaatgccgtgccggtgcccgaccccatcgatttcaaggacggccaccgctacgccgggcccttcctgctctacttcagctacggactgctagatgccatgttccagagccttatctactggatcatcggcgcactcgccaacgactcccaaatcctcagcaggtacgtcgggttctacaagggggtgcagagtgcgggagcggcggtggcatggcaggtggacaggcgccacacgcccctcatgtcccagctgatcgtcaactgggggctcatgaccatcagctaccccttgcttgcgctgctggtgttcctggccgtgaaggacgagagctactcggtttcgtcggtggaggacggccgggagaaggacagcaagctgtccgcgccgaccagcttccactgatgaagaagaagaaggatagaccaagatgcacgtcactgtaattgtaacacggtgtttccatccaagtaagttttagtagtagaaatcaagaaacaactggagcatactcagggtgtggcgttcgtttttaagtaagttgtagtagtattcgttttggtgattgttatttattatagcacctctgggttagcttgagcatcatgcttccttgtcagtggtgtgaccaagaaattggatagaatctatatgaaggaattcttttgctatttaaaattgttctctctc

SEQ ID NO: 97893 - DNA, 550 bp, Zea Mays
ctctactttggtgcttcataaaaattgttctgaatgttttaaacctaggggtactataccaaagtagtagagctatatctaaggaataactttggtaatgtgagcttggtctgctgctgtgtaaaaattagagcaaaggttggctaaagttggactgtgaggccggacacataactgaattttgtattcagttctgagaactgaattgcagcaggatgcctagtttggaattcatttgtgactgattcatggggttttggattaagggttccatagcaaagttgtagaccatagtaaagtgaacaagttttctaaagtgagatggacctgatttcacataaatttgggagtaaaagtagccaaaaggtggactgtcaggtgttagaattcagacttagaataatatttaagtctgaatttgtgtgtttttatttaatttgggtccttgtggttattaatccaagaagaattagtgtaggagtgttatagcaaagtgaaagaccatgttataaggaacaaatctctttaagcaagttaggcttgaatccac

SEQ ID NO: 97894 - DNA, 565 bp, Zea Mays
aacgaagccgccgaaccacctcctatcgctaccaaaccagcagcgccaatggggtcagggtgaaaccgcccacgctgttcctcaacttcgccatcggtcggagtctgccaggcggccgggtttgggaacgccaatgctgggagagaaattaagatcgacctgtgtggatcttcctcaagcgcgagatgtagggatggatggcctcggccatggtgttcccttgccggtgcgggtctcgccgcggtgccgcaaccccgacgtggaccgatctcgtctcaaccttgtcgctggtgagtcgcccttcagcagtctcagtaggagcgtagcaacccgtagcgccaactcaatcggtgtttcggtcgccggggaatcgggcctccagtcacgggcatgcgtactgtcgtggacgaccggcagcgacgccgtggccgggtaccggaggaaggagatgacggtcatccgttgcatcggaagaggacggatgaaattagaagcagagatccccttacggtcgttgattttgtaccgtccatcggaagatcagcggtatatgttcgatcggagc

SEQ ID NO: 97895 - DNA, 3234 bp, Zea Mays
gaaaagtgggtttcgccgaattgccattaaatataagggtttcgttcagatgacattatcaactgagacacacacgctgaaatgccatttagctatttaataaaaaggaaaaccgatttaaaacaggcgagctggtagatttgacctccttttctccattcctcctctccttctcaccaggatttgcagctcacgaggttgtgcttcgtcgagcatgacgggtggagtcgcgacctggcagagtcgtggtgaatgaagtccacactgaacccgccttcaccagcaaggtcagaggccatgcaagatgctgccttgatgccccgcgagaaggatggcgaggaggagaagcatcgtcgcttccatggcgtcctgctagctttccactcctacactagaacgcggtcaccccacagtgatctgggctgggtggtctggggccggggcagccaagggcgtcatcgtgcttgcaggcttgcagcagccactaagataacagagggtcaatctgaaactgcaagtgcaccagagggagttagtgtccttagaaggaattcagatgatgtgggatgggagtatggggctcttgttgatctaaacaacaaggacaaggtaaagtgcatactgtgtgacaagcaaaagtgtggaggggtttatcagttgaagcaacatatcgcccagaaaggaaagaatgtgaagaaatgccagtgcatgaagaccaccaaagagaagttgctggaggctcaagaaaagtgcaagaaagcactagatgaagcaaaaaggaaaagggaggagaagactgttcgtgagctagaacttagagaggaagttcatgtgtctagggttggagggtcagaggaagtgacttgtgttggaagcttagagcctcacaaattaggccccatggacaaatggacaaaagctattgatcctacagcaaccaaatctgaatctttgactcaacagaggctgaacaaggaactttggaaagaaagattacatgaggtgcataaatatattgcaagatgggcctttgaccatgcaatatcattcaatgcatgtgacaacgatgagttcaagcaaatgtgtgaagcaattggataatttgggcctagaattgaacctccaactatgtttgacctgcgagggagattgttggaagaagaatatgcaagaaccaagagtttgctgcaagaacgtgaagccgagaagatgaagaatgggtgctctattatgaccaaagtttggtcagataagaggagaagcataatgaatgtgtgcgctaattgtgctgatggaaccagttttatttcctcaaaagagatgtcagatgtatcacacacaagtgaagtgatctttgaactagtggacaaagcaatcgaaggcattggtccaaatgatgtggtgcaagttgtgactgacaatgcttctaacaacatgggagcaaagaagctactgcatgtgaagagaccacatatcttttggacctcttgtgcaactcacacaattaacttgatgctccaaggaattggctgttagaataagtctcgtggtctgtgggaaggacagtagcagtccttggcggtttttgagtgcagggacagcaacatctcaatctctttgactgcaaggacaatgtgggacagcagcagcagcagcatgtcagtcttttgactgcaaggacagcatgctgcaggcatctccttttccgcttttctagcatttggaggacagcagcttgctgcagttttcttttgactagagtacaacagcacctagtggttagtgcagtttgtaggacaggtagtgcagtttgtaggacaccatattcgcatctctaggaagcatatgttgcagccccatgggctataaatatgtatcacaacccttaaacaggtatagcattgtgtagtgtttgagaaaataaacagagaatcgccccaacccatagtgccatcctctcgatgagagtaagagtcatgatgcttacaattggtatcagaggcaggttgtcttgcagcctaaacatctcttgctcatctccttcccgcgcctctccatatactcagtcggcagcaagagctccaactgttccttcatctcctgctcggacgagcagcctttcatctgagagagcctcttccatacgcagcgacccctcgctagcacaccatgtcactacgctcgatcacttcgagtgcgcggcgccagcaggaggccgaggttgccgcggcacaagaacgcgagcgagcggcagcgacggctgcagcgacagcggcgagggcagcacgactagcggctgcggaactggcagcagcgagagcggaagtagaagcagcggaggcggcggatgctgcccgtgcggcggcggcagagctcgaggctctgcgtgacaatagcgccggcagctctgtttgtaggacagcatattcgcatccaaggttattaaaacgataaaacgttggaacgctcgtgggtgaaattttgacttttaaacgtttaaactttgtttaaacgtagttttaaacaacataggaaaaacaccaatacatcataatttcagacaataatatgaagttaaataccaaaacagagatgttagtggcttaccaaaacttcacccatgagctggattgaaccccaaaagtaactaatagactgggcccaaaagtagctaatggtctaaaatgcataaaacactgcgttttacagtttagaacgctaaaacgctaaaacgtggtttcaacctctaattagagttttgacgtttaaacgtagtttaaacatcgtttaaacgtagttttaataacactgttcgcatctctatgaagcatatgttgcagccccttgggctataaatatgtatcccaacccttagacgggtatggcactatgtagtgtttgagaaaataaacagaaaatcgtcccaacccatagtgtcattctctcgatgagagtaagagtctcgttgcttacattggcaacacatgcctcagttggaccttttggaccttagtcacaaggttcccggaacgttgggaacgaggaacgcggtacgtctgttaaagcaacatggaacgtagaggggtatacagctgatccacgttcattcgatgcgtggaacgtgttcccaacgatttaggaacgcagttagggaacgattgtaatgaaacagggaacgatgcgtaattgaaacaagcaatgacacgtacataatatataatatatgtatatata

SEQ ID NO: 97896 - DNA, 804 bp, Zea Mays
atgcaagatgctgccttgatgccccgcgagaaggatggcgaggaggagaagcatcgtcgcttccatggcgtcctgctagctttccactcctacactagaacgcggtcaccccacagtgatctgggctgggtggtctggggccggggcagccaagggcgtcatcgtgcttgcaggcttgcagcagccactaagataacagagggtcaatctgaaactgcaagtgcaccagagggagttagtgtccttagaaggaattcagatgatgtgggatgggagtatggggctcttgttgatctaaacaacaaggacaaggtaaagtgcatactgtgtgacaagcaaaagtgtggaggggtttatcagttgaagcaacatatcgcccagaaaggaaagaatgtgaagaaatgccagtgcatgaagaccaccaaagagaagttgctggaggctcaagaaaagtgcaagaaagcactagatgaagcaaaaaggaaaagggaggagaagactgttcgtgagctagaacttagagaggaagttcatgtgtctagggttggagggtcagaggaagtgacttgtgttggaagcttagagcctcacaaattaggccccatggacaaatggacaaaagctattgatcctacagcaaccaaatctgaatctttgactcaacagaggctgaacaaggaactttggaaagaaagattacatgaggtgcataaatatattgcaagatgggcctttgaccatgcaatatcattcaatgcatgtgacaacgatgagttcaagcaaatgtgtgaagcaattggataa

SEQ ID NO: 97897 - DNA, 1125 bp, Zea Mays
gatagaagagtcttctagatcgatgtcccatttagcatgtgcgccatgttgtagtcatctgttgatcttgacagaagtcgcaaattggagtggatgaagactaatttatctgcagtagtgttcatcctattgcgcttggtgttatggatatggttgaatgtgctccaaattctctcggtcgatgaactgctgatgggttgagataaaacttttttgcaacctcagctaaatccggagtctcagaaccataacttacccaccattcaatcggctccatggtaactcaactgtttgacgcaatcacattgattaggggcttgttttttatattcgtccatacatcggacacaaccaaaacaccttgtgtcaacctaatgcatgattaaaagtgagtttttgggaaaaaatcatacaatgaaaaggcaataaaattaagaacttaccatgtacttttaagtggtgctaagtcggtctccacacttctcttgcatgcatctaggagagttgtccttgccttttcactcgacggacctttataatcttttggaccattttgtattgccattatcatttgtgaaaattgagggctcctcaacacattgaatggaataccgttggcacataaaaatttggtaatttccatatcgacagattccctttgggctactccaaacgattttgccaacggattcagagtggacgtccctgatgttatctcatatgaaatcctttactatcagcttctttcaccttttcccgcaaagctttgctcttgttgggatcgttttgcaatgacatacaacgtgcaatttgtgcttttttaccaggtaatggaccaagcaaatgaacacgaactctagttaaactacctttgtacaatttcttgcaatgtttaaactgccactcctttgttccaccaacattttttccactaggaacaccaataatattaatttcatctagaagtggatgtctcataccagtagccgcagccccatcttcgtcactgttgtttgcgtctgcaccaccatcttggatatctacaggcacctcttggacgacttgcacatcatcatcttctttttcatccgcacgctttcttttgcttgaagaaccgaaaaccat

SEQ ID NO: 97898 - DNA, 1913 bp, Zea Mays
cctccctcgctttccggtgctgagcgtgcatcggcagagctgactgtgactggtgaactgaaggaaaggggaggagaaggggagggaagctttgggcgggagaggaagcctagcagcaacagtaggcagtagcagggttgaccggaggggcagtggagtctggagagtaacccaacaaccccctcctcccctccccttctgtcttattgccacctctccacgtctccaccaaacaaggcaacaagggagaagtagatctgcatctgcgagaggaggcagcgggggtggtgatgatggagagccagccgctgcaggccccgacggccacggctccggcccccggatctgcggagccagccggagctccgccggccgtcacccccggcaaggagttcacgcgcacctgcaagggcctcgtcgtcgtgctcatcggaggatacgtgctgctccagctcctcccttcgtcactcaactacctcgccatcatcccctccaagacaatcccctatgtatggaccgtctttaccgctggttacatcgagcaagtcctcccaggggccattggcagttctcttggtcttctcttttgtggaaaggacattgaaccagcatggggccgcaaggaattcttgaagttcattattttgatcaactccatctgtggcattcttgcattttgctttgctattggactctactacgtcactggaaaggagagcttccttgtcacaccactttctggtttccacggttgccttgctggctttcttgtggccctgaagcaactcttaccaaaccttgagcttcctatgtgctttttctggaaaataaaggcaaagtggatgccattctttgttgtatgtttctcaagtatcatggccttcatcgtgcctgattccattaacttcctgccaactttggtgtccgggatgtacgttagctggctttacctgagatacttccaaaggaacccactgactggacttaagggtgatcccagtgatgacttttccttccccagtttattcccagctgccatgagaccagttacggaccctgtggccaacctgtttgataggctgttgtgtgcaaggtccaggcctttggaagtcgccctcccgatatcagatcctaccaaggcttcaagaagaaggtatgcacaccgtcttttagttaggatttagataaggtggtatccttatgctatagcagccatatttgctgctggcacttcgcttttatcgggatggtaattcttagagacttgattgaggcatctagacacaattatccaagtgctcatagagctaacaccacaaaagtagtgttaaactactgtacaaaggcagctggagaccaaaactgtgttatcgagaaatatctggagtctcagaaacaactcttggtatcgcttttttacgagctgactaattccatctcaatcgttatttccagggagcgtggcgagagggttcttgaggaaaggttggcggctgacaatgctggtgacacagaggcctcgcctcgtggccatggcaccgcggaagactgagaactttcttgtgaccatcagctcctcttataggagccatggctttgctccctccagcgtttatagctctgcacttttgtcttctggagatggagctattcagttcacagcgaacgaataatacgatgttcttagtttctctttttttccgcttctttgtctgcgaggatttattggttaaattgtgtactagtcaattgttatggtacagcgaaaaagagagaagagggtgatggcatttgcagcgaggtgttgagattccgttgtagccatgcatttgcagccgattgtttggtactggtcaaagttctgtagtagtcatatactctgcttaaaatatagaaagaagaatggcttcgtc

SEQ ID NO: 97899 - DNA, 1651 bp, Zea Mays
cctccctcgctttccggtgctgagcgtgcatcggcagagctgactgtgactggtgaactgaaggaaaggggaggagaaggggagggaagctttgggcgggagaggaagcctagcagcaacagtaggcagtagcagggttgaccggaggggcagtggagtctggagagtaacccaacaaccccctcctcccctccccttctgtcttattgccacctctccacgtctccaccaaacaaggcaacaagggagaagtagatctgcatctgcgagaggaggcagcgggggtggtgatgatggagagccagccgctgcaggccccgacggccacggctccggcccccggatctgcggagccagccggagctccgccggccgtcacccccggcaaggagttcacgcgcacctgcaagggcctcgtcgtcgtgctcatcggaggatacgtgctgctccagctcctcccttcgtcactcaactacctcgccatcatcccctccaagacaatcccctatgtatggaccgtctttaccgctggttacatcgagcaagtcctcccaggggccattggcagttctcttggtcttctcttttgtggaaaggacattgaaccagcatggggccgcaaggaattcttgaagttcattattttgatcaactccatctgtggcattcttgcattttgctttgctattggactctactacgtcactggaaaggagagcttccttgtcacaccactttctggtttccacggttgccttgctggctttcttgtggccctgaagcaactcttaccaaaccttgagcttcctatgtgctttttctggaaaataaaggcaaagtggatgccattctttgttgtatgtttctcaagtatcatggccttcatcgtgcctgattccattaacttcctgccaactttggtgtccgggatgtacgttagctggctttacctgagatacttccaaaggaacccactgactggacttaagggtgatcccagtgatgacttttccttccccagtttattcccagctgccatgagaccagttacggaccctgtggccaacctgtttgataggctgttgtgtgcaaggtccaggcctttggaagtcgccctcccgatatcagatcctaccaaggcttcaagaagaagggagcgtggcgagagggttcttgaggaaaggttggcggctgacaatgctggtgacacagaggcctcgcctcgtggccatggcaccgcggaagactgagaactttcttgtgaccatcagctcctcttataggagccatggctttgctccctccagcgtttatagctctgcacttttgtcttctggagatggagctattcagttcacagcgaacgaataatacgatgttcttagtttctctttttttccgcttctttgtctgcgaggatttattggttaaattgtgtactagtcaattgttatggtacagcgaaaaagagagaagagggtgatggcatttgcagcgaggtgttgagattccgttgtagccatgcatttgcagccgattgtttggtactggtcaaagttctgtagtagtcatatactctgcttaaaatatagaaagaagaatggcttcgtcagtatcagatgttgagatatatatttcttttcttttagtg

SEQ ID NO: 97900 - DNA, 281 bp, Zea Mays
gctagggtcttctttgggagacgacaattttttgtttttcctatgtttttcatgtaaaaatgaactgactcctgtaaaatatttttcatgtaaaaatgaaattatttctgtaaaattcacgtatggttgctctaaaattcctgcattctactacatatccatgaattgtactaagttacaaaacgctaatatatgtggctttgatgccatgtctaattaggtcatcatccaaaaccaatataagcaatagcactgcagttgcagttgtctgtagcagatag

SEQ ID NO: 97901 - DNA, 1069 bp, Zea Mays
attcgtctgcctcatctcctctctacgattcgttcagatgctgcagcagaaggggatacccgagcgccccatgtactatccggagttcccactgcaggacccagagccagaagttgttcttgtagatgaagatagggacccggtggaaagagtccatgaagcactgcggtgccttcctcagtatgatccgtcagtgcgttggacaaccgaggagaaccccccttttctttattggaagatccgtgactttgcacacgcttacagctcggggatcacaactccttcagttgttgccgagtatgttattgcaggcattgaagagtggaacaacaagaagcccccaatgccaatgttgatctatttcaatgcagaagatctcaagaagcaagctgaggcttccacaaagagatttcagcgaggaaatccgatatccattttagatgggatcttcgttgccattaaggatgacatcgactgcttcccatatccaacaaagggtgctacaacattctttgaccaaatccatactgtggagagagatgcagtctgtgtggctcggttgcggaaatgtggagttatctttattgggaaagcaaacatgcatgagctaggccttggagtaactggaaacaatccaaattatgggacagcaagaaatccacattcagttgatagatatactggtggttcttcatctggtcctgctgcattagtatcatcaggattatgctcgatagcaattggaacagatggtggaggttcagttagaattccatctgcactttgtggtattgttggtttcaagacaacatatggtaggacagatatgactggggtactatgtgactctgggactgttgaagttgcttctcctcttacatcatcagttgacgatgctatactagtgtattctgcaatagcaggttcaagacctatggataagcttacacttagaccatcgccactatgtgtcccaaatttgttgtctccagaaaacagcatgtcctggatcagttaaaataggaaagtatacagaggtataacgaatcaagctgattcatcagacgta

SEQ ID NO: 97902 - DNA, 1007 bp, Zea Mays
aacctgaggaagtttgatctctcctcagtggagtataacgtaaaagagatctttagagttatatcttatctagaaataaatcaatgtggaggggtggagcttggttaccaagctggcccatgtccctcctgctcaatgtgttctccactatcttatctaaacagtaactttgatactatttgttggtggttaatgctcaattatgtagactgccgccctccgccttccctctttgttcctttagtaaatttccaacactgtcagtgtggtatagaaatagttagatatgtagttgtagcctaagtggagcacataattctagacaatatccctgaattgatctttgtcaatacgcttttaaaatagacagggataagtgacatgtgatctacaagtatatatctatgttattctacatcaagaagccttgtgttgctgtaaaaactaagcaagtgtgctgtttttccagcattactgctccaaaaatacctccaagtgctctgaagtcaggagagtcagattatgttgtgtcagcttacttgatgcgattcatcatagcagggaaccttcttggtctcccagcaataactgtgcctgttggtcatgacaagcaggggcttcctataggtttgcaactgataggtcgtccatggggcgaggcaagcttactgagggtggcttctgcagtggaggagctgtgtctgaagaaacggaagcgaccctctgcattttatgacattttgaaggcctgaatcgtcgttgtatacataatcacggtgttttgcgatgacatgagtatgtatgatgaaaagtgtgggtgagagtgactgaggagagtttcatgtcctcaagttgtaaaatactgtcatcgtcaccatgatgctgatgtcattagagctgaacgtgcaaatagcatataggcgtgaatgttgtcgtgacctttctttctacctgctctcaaggttttttctaaaaaaaaaagtaaatttaaaaaatgctgatcctga

SEQ ID NO: 97903 - DNA, 2531 bp, Zea Mays
cgttctgtcgccgcctccacttccaccatcccaggccctctatcgtccctcagtccgctgccggtgccggtgccgcatcgggtagttcagcggcggcggcgctgctgatcaggtggtgcccaggccgtccacggaccgagccctctcgtcctcgtccgacgcgagggcaatcacccacccgggacgccttccgaagcggcatccctcctctggccaacgtcccagcaacgaagctcactgatgcgatatggaacaactgcttcctagacaagctcgccttcaggtatcgaagtcgaaccaaaggaggttgaagccatggccctcatcgtagctgcagctggaggaaaccttcttgtcagaaagttggtcaatttaactccctcgcaaacatgatgaggagcgaagtaattgaggctggaaagctagtgaacctgtggaatgaatgggggctacagatcctggtcattgcaagcttcgggttacaagtattcctcctcgttttcggaggagtccgccgtcatagcaactccactgccctgacgttcttcctctggtcggcatacctactggccgattccacagcgatatacaccctgggccacctatctgttgacagtatgtcagacgagcaccagctggtggcattctgggcgccgttcctattgctgcacctcggtggcccagacaacatcacagcgtatgcactcgaggacaatgcgctctggctacgccacctgcaaactctcgccgtgcaggtcctaggagctgcttatgtgatatacgagtacatcgccagcagaggggcattgctttttctggcctccttgtccatgttctttgccggtcttctcaagtatggcgagaggatatgggctctcaagtgtggcaacatcagcagcatccgcagcagcatcagcatccggaagatcaagactgacccttatcagctattgactttgggtactagcgaagaggatttgctgcttggagcccactcccagtttgatatctgcaaaggtgtcttcgccgatatcataatgctaccaaatcccttagttcgttcacagcctaaaccacgttccgtgatatcttatctgggagaggatctatacaagttggttgagatggagctgtctctgatgtatgacttcctgtacactaaggcagcagtgatccacacatggtatggcttctgcatccatttcatctcgctgtttggcacagccaccacattccttttgtttcagctcagtatcagcaacagtggaaatcggtacagcagagtggatgtggctatcagttatgttttactggttggggctttggtcttggaaatcatatcagtgtgcagagctgtactatccacctggacatgttctttgttgcaccgcaggggcaggggatgggagtggtctctccacattgtcacttcccttggtcagcgtgtccatccagcaagtaggagactctggtcgggctccattgggcagtacaacttgttccacctgtgcacccgcaacaccaacgagatagggagcagactagcaacgaaactggggctcgaggactggtggaacaagatgcacttctccggaactttcccacacgctaactcgtctttgtcaatacaagatatcaagaaattggttctgcaagcactgcgaagcaaagagcaagcactgcaacaccaggatactgatttgaactcaagaggcagctttatactgaaacgtatggaggcctacaaagactttgctcgctggagcgtcaacattgacttcgacgagagcatccttgtttggcacattgcaaccgaggtgttcatcaggaaatccaaggccagacatgcaaaagaactccttgaggctactgaggtactatccaactacttgatgttcttgctggtggtaaaacctaacatgctaccaggcgctgcgcggcataacatacatctcacctcctgcgaacaactagaaggacactgtcgaacgcgatttggtgataaggacaacccagtggcgccatcccctgtaagctggaacccgtactatattcttaaggaattgttccaccatgatggtcccagttgctccaggataccacggagggagaagcttgcagaggtggcctggagtttctcccaatttgcactgggatcagtaaaggcaccaaatccacatggggactccatccgtgacagtgctaatatgtatgcaatcttgctcgccaacgagcttctgagcatagagttgcagtggcaggatcagcgtgacactttggaactgatcctgggggtgtgggtggagatgtcgttgtatgctgcggatcattgcagccaagagtcccatgccaggcagctcagtaatggctgcgaattcattaccatcgtgtcgttgctggcacaccacttcaagtactactctggggccttcaggggcgccgacaaccttggagaagataaacccgctagtgaaaataaacccgttactgtaaataatcccatgagtgaaaattgtgggaacttggtttag

SEQ ID NO: 97904 - DNA, 2436 bp, Zea Mays
tgcccattcggtcctttgcatacattccatgcacacgacacagacacacatatctagttgctaatattgctgtttccttgccatgttactgtatgtagacatgatgaggagcgaagtaattgaggctggaaagctagtgaacctgtggaatgaatgggggctacagatcctggtcattgcaagcttcgggttacaagtattcctcctcgttttcggaggagtccgccgtcatagcaactccactgccctgacgttcttcctctggtcggcatacctactggccgattccacagcgatatacaccctgggccacctatctgttgacagtatgtcagacgagcaccagctggtggcattctgggcgccgttcctattgctgcacctcggtggcccagacaacatcacagcgtatgcactcgaggacaatgcgctctggctacgccacctgcaaactctcgccgtgcaggtcctaggagctgcttatgtgatatacgagtacatcgccagcagaggggcattgctttttctggcctccttgtccatgttctttgccggtcttctcaagtatggcgagaggatatgggctctcaagtgtggcaacatcagcagcatccgcagcagcatcagcatccggaagatcaagactgacccttatcagctattgactttgggtactagcgaagaggatttgctgcttggagcccactcccagtttgatatctgcaaaggtgtcttcgccgatatcataatgctaccaaatcccttagttcgttcacagcctaaaccacgttccgtgatatcttatctgggagaggatctatacaagttggttgagatggagctgtctctgatgtatgacttcctgtacactaaggcagcagtgatccacacatggtatggcttctgcatccatttcatctcgctgtttggcacagccaccacattccttttgtttcagctcagtatcagcaacagtggaaatcggtacagcagagtggatgtggctatcagttatgttttactggttggggctttggtcttggaaatcatatcagtgtgcagagctgtactatccacctggacatgttctttgttgcaccgcaggggcaggggatgggagtggtctctccacattgtcacttcccttggtcagcgtgtccatccagcaagtaggagactctggtcgggctccattgggcagtacaacttgttccacctgtgcacccgcaacaccaacgagatagggagcagactagcaacgaaactggggctcgaggactggtggaacaagatgcacttctccggaactttcccacacgctaactcgtctttgtcaatacaagatatcaagaaattggttctgcaagcactgcgaagcaaagagcaagcactgcaacaccaggatactgatttgaactcaagaggcagctttatactgaaacgtatggaggcctacaaagactttgctcgctggagcgtcaacattgacttcgacgagagcatccttgtttggcacattgcaaccgaggtgttcatcaggaaatccaaggccagacatgcaaaagaactccttgaggctactgaggtactatccaactacttgatgttcttgctggtggtaaaacctaacatgctaccaggcgctgcgcggcataacatacatctcacctcctgcgaacaactagaaggacactgtcgaacgcgatttggtgataaggacaacccagtggcgccatcccctgtaagctggaacccgtactatattcttaaggaattgttccaccatgatggtcccagttgctccaggataccacggagggagaagcttgcagaggtggcctggagtttctcccaatttgcactgggatcagtaaaggcaccaaatccacatggggactccatccgtgacagtgctaatatgtatgcaatcttgctcgccaacgagcttctgagcatagagttgcagtggcaggatcagcgtgacactttggaactgatcctgggggtgtgggtggagatgtcgttgtatgctgcggatcattgcagccaagagtcccatgccaggcagctcagtaatggctgcgaattcattaccatcgtgtcgttgctggcacaccacttcaagtactactctggggccttcaggggcgccgacaaccttggagaagataaacccgctagtgaaaataaacccgttactgtaaataatcccatgagtgaaaattgtgggaacttggtttagatgagttcgcacaattttcatttgaaatgacctctctgtcagttcagggaaaaacctgaggattcatgactccaaacaagagtaaatatatttatctgtcgatgaacatagtaattaaagtgctaggattcatcaatgttagctttggactctacattcaacagtttgtaaggtgagtctgactgtgtgtgtgt

SEQ ID NO: 97905 - DNA, 1208 bp, Zea Mays
gtggaagggggaaaatcataggttctccacgacgcggccatctccgccaccgccagcgccacctgctagggtcaacacccgctctctgcggactgcgtgaagcaccagcggcggccaccgggcaggacgagccccctccccaaacagagaggggcggggatcagtgcgtgcgctcctggtggagggcgtggaagagcttggcaggcggcaagcaggggtttgggaggatggtttcgctctcgacttggttccgctatgccgcacaaaagttcgagtactgcgtttccctctcgttgaagaaatataatgacgtgggccggatcagcagcacacagctaactgatgtgttaaacaaaaatttattccaaggcaagctcacctacgtgtgtccgaccaaaggggaagaagccatggctcccatcgcatctccaactggaggagccgtccttgtcagaaaactcgcaaatttgagccccacgcaagtgtttgtcggggacgttgtgttgttaaaagacccagagaaatctgatgatttaattattcgacgactggctgccttggaaggctatgagatggtctctaatgatgagaaggatgagccgtttgtgcttgagaaagaccaatgctgggtcctggcagacaacctagccctcaagccaaaggaagctagagatagccgcttgtttggacctgtcccaatgactgacatccttggcagagtgatttactctttaagaaccgctgttgatcacggtctagtcgagaacagcggcatggccatgaaacaggatggtccagtactggcagttgagcttgatgtggaagagatggcgaagaacattaagccctagacagttgatgttttcgacatgctgcgctgtaactcaccgtcacaatggatctttttttgttgttgtttatgatctgttgcttcaagtagaactgcattggaatgttttttcacggtttgcctttggagcagtcaataatggtcttgacagataatccagaggccgctggaccgtgttcactcagaatggctgtttttagggtttcttattcatgaacttgctgtgaatcttgtatctgcttgtgttcatggagccacgcctgacgggtaagctgctgctgcgtcttgtagcagataaaccgtcaagattgtttaggcctgaataaattttcgtccctgcgacatacctgagcataaa

SEQ ID NO: 97906 - DNA, 1273 bp, Zea Mays
agggggagacatagcaggccgccttgagctggcataggatgcgacggtccggcaggggcagggctgggcggtcgacggaggccaattctttaacttccttcctccgtcgatcatccagcaccagcaggagaatcccgtcgaatcccccaacccaagggagcgcgcgcgtatgcctcctccagatccaaagcaacaagcaacagacagcgagggggcaccggggtccgccgcatgtgtgtggttcatggaggatcatgctttcctgcttactgcattagctcctgacgcgccaccctcccctcgcgttcattgatttctgttataattactcacattattattggtaaagaaagaaagggcacctcttctaatttgatgggcattccgttaccgtctcaacttcaacgtcaacaacaggtcttttcagcggctcgggcaaaaggcgacaagtcagtgcagagaagatagtgcttgatctaacccctctacaggaacagaggctgcaaagtctgaaggaaaggctaaatgtgccatatgacgaaactcggacagatcatcaagaatcgcttagggctctatggaatgcatcctttcccgatacagagctcactagcttagtttcagaacagtggaaagacatggggtggcagggcgtgaacccagcaactgatttcaggggctgtgggtttgtttcgctcgagaaccttttgttttttgcaagaacatacccggcttctttcaagaggctgatgctgaagcagcaaggaatgcgaactacatgggagtacccctttgcggtcgcgggtgtaaatatctcatacatgttgattcaactgctggagctcaactcagtgcgccccgaagtctttgccagggattaacttcatcaaagtgttgacagaacacgaggatgcattcgacgtgctgtactgcatagcgttcgagatgatggacgcccagtggctagcaatgcgagcctcgtacatgcagttcaaagaggtgctggaggccacaaggcagcagctcgagagggagctctccctggaggatctcaatggcatccatgacctccctgcctgcaacctcttgtacaaatagtgctactggtagttagattatattactgggatgcagtcaaaggaaaatttgatcaggttacatcgtaaccagcatcatcagcctgtaaaaaagaaaaaggaaaagaaaaagagagaagggagacacacatctctggttgtcagtaattcacatacgccacagttttgcccaggat

SEQ ID NO: 97907 - DNA, 1312 bp, Zea Mays
agggggagacatagcaggccgccttgagctggcataggatgcgacggtccggcaggggcagggctgggcggtcgacggaggccaattctttaacttccttcctccgtcgatcatccagcaccagcaggagaatcccgtcgaatcccccaacccaagggagcgcgcgcgtatgcctcctccagatccaaagcaacaagcaacagacagcgagggggcaccggggtccgccgcatgtgtgtggttcatggaggatcatgctttcctgcttactgcattagctcctgacgcgccaccctcccctcgcgttcattgatttctgttataattactcacattattattggtaaagaaagaaagggcacctcttctaatttgatgggcattccgttaccgtctcaacttcaacgtcaacaacagttgatgctactatggttggaaatcgggcatggtttgcaggtcttttcagcggctcgggcaaaaggcgacaagtcagtgcagagaagatagtgcttgatctaacccctctacaggaacagaggctgcaaagtctgaaggaaaggctaaatgtgccatatgacgaaactcggacagatcatcaagaatcgcttagggctctatggaatgcatcctttcccgatacagagctcactagcttagtttcagaacagtggaaagacatggggtggcagggcgtgaacccagcaactgatttcaggggctgtgggtttgtttcgctcgagaaccttttgttttttgcaagaacatacccggcttctttcaagaggctgatgctgaagcagcaaggaatgcgaactacatgggagtacccctttgcggtcgcgggtgtaaatatctcatacatgttgattcaactgctggagctcaactcagtgcgccccgaagtctttgccagggattaacttcatcaaagtgttgacagaacacgaggatgcattcgacgtgctgtactgcatagcgttcgagatgatggacgcccagtggctagcaatgcgagcctcgtacatgcagttcaaagaggtgctggaggccacaaggcagcagctcgagagggagctctccctggaggatctcaatggcatccatgacctccctgcctgcaacctcttgtacaaatagtgctactggtagttagattatattactgggatgcagtcaaaggaaaatttgatcaggttacatcgtaaccagcatcatcagcctgtaaaaaagaaaaaggaaaagaaaaagagagaagggagacacacatctctggttgtcagtaattcacatacgccacagttttgcccaggat

SEQ ID NO: 97908 - DNA, 615 bp, Zea Mays
atgggtacccgctacccatggtgggtatgggtatggcgtaattttgtacctatgatgggtagtgggtataggtatgggtcaattttttctagtgggtatgggtatggcttcgtgtgcccactgggtaccttacccactgccatccctaaccagacccgtgctgctggaacgggatatccacctctaagctcatgttgttgctcctcccaaacgcatgtaggcgctggcaccggcaacaattacaccagagtcaccctgaaggctacaagagcgacaccgatgccgagaccggatggatgcaagctggatcctgaggttcctaagctcctacgacaccgaggcaacagggagaagcggcggtccttggacgacgctgacgacgaccagtctccctgcgacaccgaggccgacaacgacgagcctctgctggtgttcgtggatccccaggagctagagccgatgtcgacgatggcgggaggggctgccgccgccgctccctcgcaaccacgtgctattaggacaaggacagcagcagcgtcagccgacgaccaagggaagactaggaaccatggcggcacaccggatccacccactagagagtcggatccactctag

SEQ ID NO: 97909 - DNA, 1931 bp, Zea Mays
atgaacaaataagatcagttagcttgtctttatttcttcctccgatcactgattatacacacgcacttgatgaggttagatcgctagttaagcaagaaattagaggaggagagaggggtagccatggaagagcagcagccccgcccccgcccaagcatcatgttcgtcctgtcgtcgctcgccaagaataacccagagtccgtgctggcgctcatcgcggtgctcaccgtcgtcgccctgcgccacttgatctcctcatggcggcagcaggcccggctgcccccgtcaccgacgagcctcccggtgatcggccacctgcacctgctccgcccgccggtgcaccgcaccttccaggagctggcgtcccggatcggtccgctgatgcacatccgcctcggctccacgcactgcgtggttgccagcaccccggaggtggccagcgagctcatccgcggccacgagggcagcatctcggagcggccgctcacggcggtggcccgccagttcgcgtacgactcggccggcttcgccttcgcgccctataacacgcactggcgcttcatgaagcgcctctgcatgtcggagctgctcggcccgcgcactgtcgagcagctgcgccccgtccgccgcgccggcaccgtgtccctgctcgccgacctgctggcgtcgtcggcgcggggggagacggtggacctcacccgccatctcatccgcctctccaacacctccatcatccggatggtggccagcaccgtgcccggaagcgtcaccgacgaggcgcaggaggtggtcaaggacgtggccgagctcgtgggcgccttcaacgtcgacgactacatctccctagtccgtggctgggatctccagggcctccgcaggagagccgctggcgtccaccgccgcttcgacgcgctgctggaggacatcctcaggcacaaggaggaggcgagggcggcgcgaaggctcgaccaagacgacgacggacgtggcagcagcaagcaggacaagaagcaggccacgcacagcaaggacctgctcgacatcctcatggacaaggcagacgacccggcggcggagatcaagctcacccgggaaaacatcaaggctttcatcatcgacgtggtgactgctggttcagacacgtcggccgccatggtagagtggatgctggcggagctgatgaaccacccggagacgctgcgtaaggtggcggaggagatcgacgcggtggtcggcggcgacaggatcgccagcgaagcggacctgccacagctgccgtacctgatggcggcgtacaaggagacgttgcgtctgcacccggcagcgcccatcgcgcaccgacagtcgagcgaggagatggtggtgcgcggcttcacggtgccgccgcagacggcggtgttcatcaacgtgtgggccatcgggcgcgacccggcgtactgggaggagcccctagcgttccggccggagcggttcatgcccggcggcgccgccgagagcctggagccccgtgggcagcactttcagtacatgcccttcggcagcggccgccggggatgccccggcatgggcctggcgctacagtccgtgccggccgtgctggcggcgctcgtgcagtgcttccactgggccaccgtcgacggcgacggcggggtgaacaagatcgacatgtcggagtcggacgggctggtgtgcgctcgcaagaagccgcttctgctccgccccacgcctcgcctcacccccttcccggccgtcgtctagcgtgtcttccatggcaataccgtctatgtctgtaccaacctctaccagtaccaccacgtacgtacggattcgaagaatgtggataccatgcattaattatatgtatcacattattatatatatgatatgcaagagtaatatgcatggcattgtcttgcatgctctttgttaag

SEQ ID NO: 97910 - DNA, 2580 bp, Zea Mays
tatttgtataaaataatatttattcattaagccttgaacgatctttgtacatatatctaggatgtacattttgtataaaataataatatttacggaggcgaaagctgagagcgtgagatcacgcgcgtactaaatcaatctatcagggcgcagtgtttcctaattcttttcattctgctgtaagcgagtcaagccactactatctcttctacctgcatacccaccaccattaaatcagtctggtgtgtggccagcacaaattctttgctgtcagtcagaatcagaagaggaactagagctgcgtgccgctgcactcctccgatctttaattgcgggcaccagctgctgccgaggatcacggaacgacgaagaagactgcgacggttgccttcccttcgatcctgatcctgccgcagatggtttcttgttattagcagcagccttggcagccgcctctttcacctctctgcacaccttgtccaggatccccaggaagtcgcggacaacgacgaacagccgcaggccctcatctttccccgtgctcccatggaagtagtctacagttgtgcgtaccagcgcccgtagcttcttttcctcctccagaagctgggtcacgcgcacctgggactgctcgatgaactcgccaagcttgcgatggaacccactgtcctcgtctaagctcttcatgcccgtgttcaagaactcgttcgccttcaccagcttgtgccccaggctcgccaccgagatggtcagcgcatcggcgtccaggattgccgccttccgcacgttctggaggtcgtctcccaggctggaaacgacgcccaggcctagctgcttgtagtgctccgtgtcgtcgctgacatcctcggtgagatcgtcagaagtcacgctggatatgctgctgttgctctgctctttggcggcccgaaccgcacgcacgccctctgaccgaatgatctcctggacaacaaagtgaagcagcgtcgtcttgccgtcgacccccttcacgtctgagagcttcaggagggtgtccagcttgaacgcctgggccccacctcgaaaggtgccatcgttcatccggttcccagtcttgagtacagcctctagcagcttcttgaatagacggctgttccgaagctcatggcaggccacctgttttcgaccaagaaaagcttcttccggcaaactggacatgaaaagcaacacatccaggcgctgatagaggtaaggtatgtcaatgatggtcctcaagaattgctctgcaggaccaagttgagtgagctccccggtgtatagccgaagccttagctcctcgtcgctgcttggagtccaccttatcaaggaggacctgcaacattccctgctttcttcaacggtggcggaccacgcgcttttggaccaccaggcattgctggtggtggaggtccagctccacctctacttggtgggggtggaggtccgggtccgggtccagctctacttggcggtggtggaggtccgggtccggctgcaggcctaggagcaggaggcgttgggggtcctggtgggggtggattgctcgaactagcagctgtaggcatctttggaggaggtggtactggtggtgctggtgctggtgcaagtggtgcatgaggagcctttgggagaggatgacctagaggtggtggcggtggtggtggtgctggaccagctgcaggtttacatatgttgccagtggcattactagaaggaactgcagctttcacttcctcagaattagtagaggctgacggacgtccagcaatggaggtaatttaaattctttacgctggctctctgatgaactggttgataatgcccccaacctgttgacatcaattggggtagagcatgatttacgcgaagaacctgttgcattaatgaacagggcatgaattgacagactcagcagtggattgccatcatatgatgattctgggtcttcgcttccacgacaagcacagtagcacagacatataagagccaccaatgctacacaagccactgacaaagcagcaataatagtgccactgttgtccttgctcttgtgtttgggctctggtttaccagactttttcacagtagcaactagcagacgtcttcttttcattacaaaaggaaggttactgatgctgttagagttgggaagtaagcttctggtttcctcccgctgcttctgcagtccatgatcagagaaagggaaattatgcttctttaagcagtccagaaaagtgttggcatcttttgcaggtgataaggttgcggtgattgcttcctcaatgccaatcttttgaggatagaacttattatcattttctctatacgaattgctgatggtgttgaacagaaggctgtaatgggacctgtttctaacatcttgaggaattttcaagtccagagcacaactgtgccacagttgttccacctgtgtataagcaatgtaccagaaataacagttagcaagaaagtgatatagaattttagcttgtgaatatctggtggtaatataggcatcagttagtagaaagcaggtgttttagctctattgaaaaaataaataaa

SEQ ID NO: 97911 - DNA, 2271 bp, Zea Mays
atgggcgacaaggcgacgctgaggctggcgaggcaggagcttgaggatctctacctgggcgtgcccgacgactccgtcgatctcaccttcagggacttcgccttccaccctgcacccgccgccgctaaaacttccccggcggcagccgccgccgccaccaccaccagcaacttcttgccaaataatactgcggcaatagcagatcatgtaagtgtcgacggcgacgcggatgacgagcgcaaggcgacggcgggcgccttggccagatcgtccaccaccaacatcttcacctacagacctttggaggatcacgaagatgtcgccgccggcggcggcggcggtcttgctgccgccgtcggcagaggaggcctgcttcagctatcgccaattcctgcttctcctccaactccaacggcgcgcctcgcccatagcgacgacgacgacgaggactatgccgatcatcatcatcatcagtaccaccaccacccagctgctgctgctaatgcaggcaccactagtagtagcagatcaggtgctgccggcggccgcccgtctcggcgatcacacgtggctgatgatgccgtcggaggccgtgaacggcacgcggcttacagcagcaaccacaggcggccgggcataccgcactccagcatctgcgccctctgcaacaactacgtctacgtcttccgccatcgttgtctggtgtgcgggcgcgtgtactgccgccggtgcgtgggcgccggcatgggcgacatgacggagggccgcaagtgcatcgactgcctgggccgccgctacagccacaggtacatccaccgcgccggcgacaccggcggctgcggcttctgctgcttctgggggtactaccccaacgccaaggccgtcaccgcgcaggagctcatctgggctgagaaggggcccgcgccacgcaggcgcccgcgacggcccaacggatcctcctccatctccgcctcctacggcggcgactacagcagcaccaacacggtcgcctcagcctccatgagcatgaccatgaacagcgacaacagcatagcgatgaacggcggccaagggaggaacaacggcatgccggcctcggcgtcctcctcctttgtcgcccggctctgtagacggacgttgtgtgacctttttcgcactaggcaactattgagagatagcattcatagctcagtagaggagcaggttgccatgtttttacatgtggtaggtcataaccaaaggtttagagttatacacatgacctttcgaaggtctattgagaccattagcagatacttcaaggaagtattgtttgctgttggtgaactgaggaatgagatgatcttgccaccttcaactgctacaccaaccaaaattagagatagccacagatggtacccatatttcaagggggctaggcctgctcttaggtggactgctgtaatgtctgggtttgttctccgtcgttttgttgacttgataggaaatggggttaagactgacaagggttttaaggaaatccaccttaactctgttgctaaaaatgtatctgagttctgtggccaagaagtaacaggccaacaagtgtacaatcaccttcgtaagtggaggtctaggtgggtcaaggtttgcaaactgaaggacattagtggcgctctttgggatgaggataactttgtcataagcttagaagagggtcattatgctgcttacatcaaggatcacccaaaagatgctgattacctcaataggcccatagagaactatatgcctatgcaaatcatatttggaagtggggttgccacaggtaagtttgcaatgggttcaaatgagcctttgggcaagccaactgacattgttgacatcctagatgatggcattgaagtgacctcaaagtttgttgattgttccaatctaactaacaaggggaagactgttgacaagggtacccctggtgagtccaatgataacaagcctaacttagggaagaggaagaggttcatgactgatgaggatgttgctgtgttcaatgggatgaaacaagctgtttcagatgttgctgctgctgtccgtgaaagcatccatgctgaagcagcacctgggatctacaatgctgtaatcaactgtcctgggttctctagggaggctctcatgtatgccctaaaccacatgatggagcacaaggccacctccctggtgttcctggacatgactcctgatgatcgtgacctatggctcaagactttcctagccaagcactaccacaactga

SEQ ID NO: 97912 - DNA, 1342 bp, Zea Mays
cttcccttggctacctctgtctgtctgtgtcttgtccagtccgggtctccagggctccggcaccggcaggcagagagctaccaaaccccaccaccacgaacggccgccgccgacgagacgggggcgcatggcgactgcatcctccttcaccgccatcttcttcagcagcgccttcgcggcctgcttcgcggagccaaagtgcggctccagctgcaaaggaaggcaccactaccgtcgccaccagtggctgcagcagctgctgctggaggcacgctagccacaatcatgtgcatcgccagggaggaaggggttgccgcgctctggaagggcgtcatccccggcctccaccgtcagttcctctatggcggcctccgcatcggcttgtatgagcctgtgaaggctttcttcgtcggaggcgctgttgtgggtgatgtcagtttactaagcaagatccttgctgcacttaccacaggtgtgatagcgattgttgtggcaaatccaactgatcttgtcaaagttaggttgcaagctgatggaaaagctaacactatcaagaggagttattctggagcccttaatgcatacgctacaataatcagacaggaaggtattggagctttgtggactggccttggtccaaatgtcgcacgcaatgccataattaacgctgccgagttggccagctatgatcagttcaaacagctggacttggtgctgggttttttgctgtttgcattggctctccggtggatgtggtgaaatcaagaatgatgggtgattcaacgtacagaagtactcttgactgttttaccaagacattaaagaatgatctgcagcagtccaaacagtcggctttaatccgaagcgtattgtgctttgaccattaattcagttgaaaagttggttacagggacctggtgctttctacaagggattcattgcaaacttttgtcggattgggtcatggaatgtgataatgttcttaactctggaacaggtcaaaagattctttctatgaagagatgtctgcactgcaagtagggattgtgtgggacaagggtatgctgatatatatgggcggcataattgcatgattatttgaagctacaggtttgtcaaccaacagaaagcagccatatatgccatactgccacctacgtctggctcttagattacatatgacaatatgttctcatgttgcattttgattattatgtggcgatgctgtaatatttttgtatcacaaattgatcatacagaccactgtgttggtatattgtagagagcgacactgttcactacttcactgcaagttgacgttcatgccgaaacacttatgaag

SEQ ID NO: 97913 - DNA, 1339 bp, Zea Mays
cttcccttggctacctctgtctgtctgtgtcttgtccagtccgggtctccagggctccggcaccggcaggcagagagctaccaaaccccaccaccacgaacggccgccgccgacgagacgggggcgcatggcgactgcatcctccttcaccgccatcttcttcagcagcgccttcgcggcctgcttcgcggaggtgtgcaccattcctttggacacagccaaagtgcggctccagctgcaaaggaaggcaccactaccgtcgccaccagtggctgcagcagctgctgctggaggcacgctagccacaatcatgtgcatcgccagggaggaaggggttgccgcgctctggaagggcgtcatccccggcctccaccgtcagttcctctatggcggcctccgcatcggcttgtatgagcctgtgaaggctttcttcgtcggaggcgctgttgtgggtgatgtcagtttactaagcaagatccttgctgcacttaccacaggtgtgatagcgattgttgtggcaaatccaactgatcttgtcaaagttaggttgcaagctgatggaaaagctaacactatcaagaggagttattctggagcccttaatgcatacgctacaataatcagacaggaaggtattggagctttgtggactggccttggtccaaatgtcgcacgcaatgccataattaacgctgccgagttggccagctatgatcagttcaaacagatgtttctaaaacttcctgggtttactgataacgtttttacgcatcttttagctggacttggtgctgggttttttgctgtttgcattggctctccggtggatgtggtgaaatcaagaatgatgggtgattcaacgtacagaagtactcttgactgttttaccaagacattaaagaatgatggacctggtgctttctacaagggattcattgcaaacttttgtcggattgggtcatggaatgtgataatgttcttaactctggaacaggtcaaaagattctttctatgaagagatgtctgcactgcaagtagggattgtgtgggacaagggtatgctgatatatatgggcggcataattgcatgattatttgaagctacaggtttgtcaaccaacagaaagcagccatatatgccatactgccacctacgtctggctcttagattacatatgacaatatgttctcatgttgcattttgattattatgtggcgatgctgtaatatttttgtatcacaaattgatcatacagaccactgtgttggtatattgtagagagcgacactgttcactacttcactgcaagttgacgttcatgccgaaacacttatgaag

SEQ ID NO: 97914 - DNA, 219 bp, Zea Mays
atgtttgcaaagcaaactgacatgaaaagtaccaaagagagcatggaaccaattaaagaatctaaagagtacaaaattaactggtttgctaagacaaaattcgtgccgatgtcctgcggagaaaatatgtggcagcttcgatccacctcaatggcagagcgaagagcgctcgaatgtgccacttatttacagacatacgtcaaatacgtggggcactga

SEQ ID NO: 97915 - DNA, 783 bp, Zea Mays
atataagaaatctatccaagcaacaaacttggcattctggcctgttcttaattattgccaggacaggagaaacaaacaaagatgaggcctcagctgatactcgtcggcactctggctgttctcgccatcctcgcagctctcggcgaaggctcgtcgtcctggccgtgctgcaacaactgcggtgcttgcaacaggaagcagccgcctgagtgccagtgcaatgacgtgtcggtgaacgggtgccatccggagtgcatgaactgcgtcaaggtcggtgcaggaattcgtcccggcatgggccccggccccgtcgtcacctaccgctgtgatgacgttctcacaaacttctgccagagcagctgcccggaggcgtagttgctgggtggtggtgtcttcttctgacgccatgggacgccagtacgcaaccagtttgcttctctccagcttcgtcagacaagaaatagataaataaacaaatgtcaccggccgctctgttcggtgcttgctcttgttcgtcgtcagagaagaaatagataaataaataaataaataaataaatagccatatgcatgtcgtctcacggttacaacaggagttgccttcgtctaaaccagcctaaggctatccacactcgtatatataactctaaatttttacctataaaaatttttgtcctagatagcaaaattctttactctatattataattctctacggttatatgtactttatatctcaactctataccaactatcgcatattatattatttctttctgccaca

SEQ ID NO: 97916 - DNA, 90 bp, Zea Mays
ttgcattgcaggtgaggttgttacttttgttcttctatttaattgggttggtatttacttgtacttagtaactgctaataaaattttgac

SEQ ID NO: 97917 - DNA, 412 bp, Zea Mays
atgttttggaaagaaaacaaacccacagcctgtgcactcactaggacctgaaaacattaggtggactaacctctccacaggacgaaaaggcaatggagttgcaattgcaagcacacaaaaaagtggcatgcacaagaaagcttatatcgtgacagatgttcttcggacttctgtttatcagatactttctgcattcattgatgacctacaagctaatgcaaaaccatccagcttagagaagaactggatcagtgaagggagaaagcctgtatatggttcacaagtcatgttggttcagaagttgattctgtttattgaataccgagctgtatgaacttggttccatgtctctcagatcctttgcttgcacattagatcaaacttggatggaagtgtttggttctcgaacttg

SEQ ID NO: 97918 - DNA, 528 bp, Zea Mays
atggcagtaacaaagaacatgataaagctgagagagatggaggcacatatggacatatcacttctccatggtctaaggattaaatttgttcttgttccaggaacacatattcaaattgataagctgttgtcagaaagagggaataaggccaagtatgttggtcagtacagaattactgatgacgatgcaagaaaggctgcaatggttgttcctatttattgcttcctaaccagttctatgcttaaatatgtagtgggactgagatccatggatgtgcatatacgccagccagatcaaaaggttgatctaactcatgtagatgatgagccctttgagttaacagaggaaatcgaggcgcaaataataggaaacatacttcttgatgatgatgacctactatcagatgttcttgatgttgggtacacagcccatgctaacatgggtgatgatgtcgatgatgatatattctacactggaggcgggatggaactggaaactgatgaaaataaaaaaaaatacagaacctaa

SEQ ID NO: 97919 - DNA, 169 bp, Zea Mays
ctgctgcgagcccgagccagctcgtcgagctcgagtttttttttccagtcctacccctggcggaggctgccttaattcgcttctcaggcctaagcctccgtacgactcatcacaaaattatataacaccaatgaaacaaaacaaacatatcacaaaggtagacagtaat

SEQ ID NO: 97920 - DNA, 546 bp, Zea Mays
gaaggaaaaaaacttgtccgggctcgcgtttctgattcccgtggatctctcatctcgcttgtctcctccatagcagccaggcagccagcatggcggcggctagggtttgcatcgccggtgcatcttgagatccgctgctgctcacgtgtccacgttgcatcgcctttaatccccacatgctccatccatacgctgctggtgctcgtcgctattctcttcatcgtcgggacttgtcggcactactaccatcgccatctgaaccgagctcatgtgcatttacagcggtgaccgagcttggatcctagcgaggtgtctgctgatggtacttacaaggtggacatattgtactggatttacactagcctgcttgcaggtcgtcatccatttttgggacattgttgtgaagattggcatgagaaccacctgtatgaactttggaatcgttaactttggagtgccttctgccttgtggcaatttatgtaatttgaatttgtatggaatgttttgttcgattcacgtatttataccgaacaaagtttatcctt

SEQ ID NO: 97921 - DNA, 722 bp, Zea Mays
gaaggaaaaaaacttgtccgggctcgcgtttctgattcccgtggatctctcatctcgcttgtctcctccatagcagccaggcagccagcatggcggcggctagggtttgcatcgccggtgcatcttgagatccgctgctgctcacgtgtccacgttgcatcgcctttaatccccacatgctccatccatacgctgctggtgctcgtcgctattctcttcatcgtcgggacttgtcggcactactaccatcgccatctgaaccgagctcatgtgcatttacagcggtgaccgagcttggatcctagcgagatgaggaaaggacacaggcaacaatgtgctaaagtatgagatcaatagagaattttttatgaacttcaagaattaaaaaggttcatttgttatgggtcaagggcaaaagcactccgaaggcctaatctacattttgacttctttgaatcatgtctgctgatggtacttacaaggtgtctgctgatggtacttacaaggtggacatattgtactggatttacactagcctgcttgcaggtcgtcatccatttttgggacattgttgtgaagattggcatgagaaccacctgtatgaactttggaatcgttaactttggagtgccttctgccttgtggcaatttatgtaatttgaatttgtatggaatgttttgttcgattcacgtatttataccgaacaaagtttatccttgct

SEQ ID NO: 97922 - DNA, 1315 bp, Zea Mays
gaaggaaaaaaacttgtccgggctcgcgtttctgattcccgtggatctctcatctcgcttgtctcctccatagcagccaggcagccagcatggcggcggctagggtttgcatcgccggtgcatcttgagatccgctgctgctcacgtgtccacgttgcatcgcctttaatccccacatgctccatccatacgctgctggtgctcgtcgctattctcttcatcgtcgggacttgtcggcactactaccatcgccatctgaaccgagctcatgtgcatttacagcggtgaccgagcttggatcctagcgaggtaggcactactacgaggctgacctgaccaagtatcacacacgtcatatgctacacactacaacctttttttcctttcgctagattttaccatgattcgtattttccctttgtctgttcctttcgctagattttaccatgattcgtatttttcctttgtctgttcgctcaaactaggagaaacaagtagtgtttcttctccaagcaaaggagtttggtcgagtcgtacgtatctattgagtatgtagggtccagtctgctgtctagtttgctccatctgagggatcggttgggtttatttaatttagccattgatcaatctgacacttagttatctaaatggctggccaatttccaatgagctatacggaagtaatggatttaatatttttagtttgttgtgttgttacatatctttttagaataggcattatatttccatgtttattcatactgagttctgtaaaattatgtggaaacattaggacaaaacaacccaaaatttttatgaatgaacccaatgagacaactaagtcagcatgtgactattctatcaagcggtgtttggatcttctagaatcgattctttcagatgaggaaaggacacaggcaacaatgtgctaaagtatgagatcaatagagaattttttatgaacttcaagaattaaaaaggttcatttgttatgggtcaagggcaaaagcactccgaaggcctaatctacattttgacttctttgaatcatgtctgctgatggtacttacaaggtgtctgctgatggtacttacaaggtggacatattgtactggatttacactagcctgcttgcaggtcgtcatccatttttgggacattgttgtgaagattggcatgagaaccacctgtatgaactttggaatcgttaactttggagtgccttctgccttgtggcaatttatgtaatttgaatttgtatggaatgttttgttcgattcacgtatttataccgaacaaagtttatccttgctac

SEQ ID NO: 97923 - DNA, 832 bp, Zea Mays
gaaggaaaaaaacttgtccgggctcgcgtttctgattcccgtggatctctcatctcgcttgtctcctccatagcagccaggcagccagcatggcggcggctagggtttgcatcgccggtgcatcttgagatccgctgctgctcacgtgtccacgttgcatcgcctttaatccccacatgctccatccatacgctgctggtgctcgtcgctattctcttcatcgtcgggacttgtcggcactactaccatcgccatctgaaccgagctcatgtgcatttacagcggtgaccgagcttggatcctagcgaggacaaaacaacccaaaatttttatgaatgaacccaatgagacaactaagtcagcatgtgactattctatcaagcggtgtttggatcttctagaatcgattctttcagatgaggaaaggacacaggcaacaatgtgctaaagtatgagatcaatagagaattttttatgaacttcaagaattaaaaaggttcatttgttatgggtcaagggcaaaagcactccgaaggcctaatctacattttgacttctttgaatcatgtctgctgatggtacttacaaggtgtctgctgatggtacttacaaggtggacatattgtactggatttacactagcctgcttgcaggtcgtcatccatttttgggacattgttgtgaagattggcatgagaaccacctgtatgaactttggaatcgttaactttggagtgccttctgccttgtggcaatttatgtaatttgaatttgtatggaatgttttgttcgattcacgtatttataccgaacaaagtttatccttgctacc

SEQ ID NO: 97924 - DNA, 608 bp, Zea Mays
gaaggaaaaaaacttgtccgggctcgcgtttctgattcccgtggatctctcatctcgcttgtctcctccatagcagccaggcagccagcatggcggcggctagggtttgcatcgccggtgcatcttgagatccgctgctgctcacgtgtccacgttgcatcgcctttaatccccacatgctccatccatacgctgctggtgctcgtcgctattctcttcatcgtcgggacttgtcggcactactaccatcgccatctgaaccgagctcatgtgcatttacagcggtgaccgagcttggatcctagcgaggcctaatctacattttgacttctttgaatcatgtctgctgatggtacttacaaggtgtctgctgatggtacttacaaggtggacatattgtactggatttacactagcctgcttgcaggtcgtcatccatttttgggacattgttgtgaagattggcatgagaaccacctgtatgaactttggaatcgttaactttggagtgccttctgccttgtggcaatttatgtaatttgaatttgtatggaatgttttgttcgattcacgtatttataccgaacaaagtttatccttgctaccaa

SEQ ID NO: 97925 - DNA, 1614 bp, Zea Mays
gaaggaaaaaaacttgtccgggctcgcgtttctgattcccgtggatctctcatctcgcttgtctcctccatagcagccaggcagccagcatggcggcggctagggtttgcatcgccggtgcatcttgagatccgctgctgctcacgtgtccacgttgcatcgcctttaatccccacatgctccatccatacgctgctggtgctcgtcgctattctcttcatcgtcgggacttgtcggcactactaccatcgccatctgaaccgagctcatgtgcatttacagcggtgaccgagcttggatcctagcgaggtaggcactactacgaggctgacctgaccaagtatcacacacgtcatatgctacacactacaacctttttttcctttcgctagattttaccatgattcgtattttccctttgtctgttcctttcgctagattttaccatgattcgtatttttcctttgtctgttcgctcaaactaggagaaacaagtagtgtttcttctccaagcaaaggagtttggtcgagtcgtacgtatctattgagtatgtagggtccagtctgctgtctagtttgctccatctgagggatcggttgggtttatttaatttagccattgatcaatctgacacttagttatctaaatggctggccaatttccaatgagctatacggaagtaatggatttaatatttttagtttgttgtgttgttacatatctttttagaataggcattatatttccatgtttattcatactgagttctgtaaaattatgtggaaacattaggacaaaacaacccaaaatttttatgaatgaacccaatgagacaactaagtcagcatgtgactattctatcaagcggtgtttggatcttctagaatcgattctttcagatgaggaaaggacacaggcaacaatgtgctaaagtatgagatcaatagagaattttttatgaacttcaagaattaaaaaggttcatttgttatgggtcaagggcaaaagcactccgaaggtaacttactttcatgtgtttgtatttctagtcaattaacatatttaccatgttttatatttgaatttcatagaaaataaaaaaactcatagaaacttgaaaagtattcaattgaaaaacatcaatacatctacacaaggatctatgagcagtatagcaaactctacctacagtcgatgctacctgttgctgctttagttttctgtttgcacaattttatgtaattgtttgaattttatctaattgtaggcctaatctacattttgacttctttgaatcatgtctgctgatggtacttacaaggtgtctgctgatggtacttacaaggtggacatattgtactggatttacactagcctgcttgcaggtcgtcatccatttttgggacattgttgtgaagattggcatgagaaccacctgtatgaactttggaatcgttaactttggagtgccttctgccttgtggcaatttatgtaatttgaatttgtatggaatgttttgttcgattcacgtatttataccgaacaaagtttatccttgctaccaattttgtggattgtaacaacattttagaattctttgttttttcctgtt

SEQ ID NO: 97926 - DNA, 327 bp, Zea Mays
atgatgattgaccacgggagtcacaggagtaggcacccggaggagtctccagggtcgacaggctgggacgtcgctgatacgtcagcaatggtggttggtggagaggtgcagcctactagggagcaggagcaaccagttgtgtcgtggacgcgcgtgacgcgggagccaacaaagatgggcatgttgtggccgcgcaaggcacgagtgaagatgcagcacttgtcgcagagatgggtgttgcagatattgcagccggtagaggagaaactgctggcagaggcaacggtgctgctccagaagtgggtgccgacgagggaagagcactag

SEQ ID NO: 97927 - DNA, 94 bp, Zea Mays
tttggattcatcgcaatcaatgtgtcttcaacggagagcagcctagggctagcaaggtcataaattgggtcatgactgagtctcatctttggtg

SEQ ID NO: 97928 - DNA, 779 bp, Zea Mays
ttttcatggctgaaatgatttctgcctggacactatacgctatgccaggattgttgtttgcatagtcacactttgattttattgtttgtttatacaacacggctggaaatccaatgatttatggtaataattctggagataactactcttttgtgtcacttgaccccactctcttacccaccagatgatataaaaagtgagatctttccattgttcaaatttgggaaacagaagaaaataactgtcttttttttggggtggcactcacatgtctccttttcctcagctcagccacaacaaggcattgcaaagagccatcacatagctacaatgtgtggagtaattattggtacaatagcttttttgctgttggagttggtacacttctttggtggcatcacaggcaaaaacagcatatcttttttggtgttaatgggcatatctggtacattggacagagaagacaattcatgttcaagcgagtgttgagtctgcctggacgcctaggaaacaaggaatcactgtttcccatggcgagctggagatacctggatgactggacatgcgtagacaacgcctttgaaacactatacaactgttttctgtcttcgctctcactaataaggaaattaaacttctccacatatggttcgaatgagccataccttgtagattccactgctgggatcctgggatacccatgaacccttgagtatgcagaaactccagtaggccttattaccttaattgtgtctaaataaaataggtagcgagctttt

SEQ ID NO: 97929 - DNA, 167 bp, Zea Mays
ctcaaattttggtggccgcacaagtatggagacttgaattcatatatacttggttaggctcaatgttagcgcaagcagttgatgaccaagtttttcaattattattttagtttaaatttagagtacacttatgtatgagttatttgaaaatgcttatttataaaata

SEQ ID NO: 97930 - DNA, 216 bp, Zea Mays
atggggacggctccagcactgcttcacaagctgcatgtccttggcgacagccccactgccctagcacacgccgtgacagttgtccttattcatgacctcatggtgacaattattcattgtgccaggtttagaaacatgtcttgtgagcttgtgtatagaaaccagaatatgcaaagtgtcagcctaagtgatgccggaacagagaggccatctcaa

SEQ ID NO: 97931 - DNA, 3226 bp, Zea Mays
tgcctacatcaacaccaagcaagcaagcagctagctagcgtggttagttatatcttcaaatcagtctacagggatggatctagtgacaggtccgctagccattctcccgtccaagctgcaggagctactccaaatccaagatgagtataggctccagaaggaagtgaggggcagagtggagatgatctgccgggagctgcaaagtatgcacgctgccctccgtaaggtggctgatgtgccgcgggatcagatcgacctccagaccaaggtgtggagacgcgatgtcagagaggcatcctatgacattgaggatgccatcgacacctttctcatgcgcatcagagaccgcgcgccaagtgacccaaacaggtttcgacttgccatgaagaagatgaccaagctgtcaagaaaggttaaggctatccatgaaattggtgctgccatcggagacatcgtgaggaaaatccaggagttggtggaccggcgtgtcaggtacaaacttgatgttgctgcagacaggtcaatcagcatggttagtgttgatcctcgccttgcagctttgtacaaagaagcgacacaactcattggcatcgaccaatcaatgtctgaaataatatccatgctgctctcggatgagtcgggccagcaacacattaagaagatttctattgtcggagctggaggactaggcaagaccacccttgctaaagaaacatatgaaaggcttagaagtgaatacgagtttgcaacttttgtttcagttggccaaaatcctgacttggtgagagttttcaagaacatcctcgttaagcttgacatataccagcaagtggacactatcaacagaacagatacgcgagcgctcatcgatgaaatcagacagcgccttagctatgtgaggtatctcattgttatcgatgatgtatgggatctggagtcttggcatacactagaattggcatttgttgaaaataacaatgggagtggaataatcataactactcgtaattttgctgttgccacaatagctggtcgtgtttacaagttaaggccactttcgtaccatcactccaaagaattattctacagatcgttatttggtgaaggagtatgccttgatgatcaaataatcaataaggcatcagataaatttctaaagaaatgtgatggtataccgttagctctcatcacaatggctagtttgttcatgggaaaaccaacacaaatgtggtctgagctagccaataatgcttttggacataaaggtcgtaacagtcatttagaagaaacgactatgaggatattatcacttagctactctgatttgccattgaatttgaggacttgctttgtatatttgagtagatatccagatgattatgttattaataaaagttctttgatatggaaatggatagctgaaggttttatccaagaggagcaaggaaaacagttatttgagctcggggaagaattcttcaacgagctcgtaagtagaagcattatacaagtggtccaatcaaaatttgataacacagtgcaaggctttcgtattcatagtatggttcttggtcttattcgcctgttgtcatccgaagaaaactttgtttctgtattggacgaagaagggcaaatatctatatcaggcaaacttcgtcggttagccatccataacagaaaagaagagcacaaccttggagacaatatggacctcctcccatggttgaggtcgtttactgcaattgaatgtcctatatacatgatacctccggttttcatcttcaaattgttacgtgttctggatttagagagttgtgggtctatggaaggttatgatctcaagcagcttggaaatttacataatctcaggtttatcggtctatgtaatacatatgtccggacgctcccacaggaattagggcatctaaagtttctgcagacgcttgaattgaaaggaagtggcgttgaagaactaccttcgagtatgggtgagcttgcagggttaatgtgcctcaacgctgactggacaacaagagtgcccaagtggattgggatgcttacttccctgcaacagttggtgatgtacccttgtggtggctactcggcaaggtggtttgtcaaggggctgggacacctgagggaactaaggatgctccgtttgttgataaaagcagatgacgagaagcagcttgcacaattgctggagtctgttttaaaactgcccaagatcgaggctttacatcttgattactatggcggcgtacagttaaacaggcttgttaagttggaacctagtgattttgcctgcagtggacgtcttcgttccttagaattgcagttgttggaattctcaaggctgcctgtgtggcttaatgcttactatcttccacagatccgtgacttgtcgctgttgatgtttgatgtggataaacaggatctgaaaaaccttggggacttcaaggagctccgtcatctccatctgctaattgttaacactgaacgcagagatgctattacttgtgccagtggtggattccggaatttgagattcttcagtatcactaaaccattcaagtttcaacagggagatctgcctaggcttgaaatccttgattttcatttcaatgtgccactccaaagtggtgccaatagtggcctggattttgacttcggtttggaaaatatcccttcgcttcagcaagtcattgttcaaatcaactgtctagatgcctttcctcttccagaggaggtggagacagccctaaggcacgcaatcggcgtccatcccaaccgtcccatcgttgacatcagtttgcctcgacgaaaattagacaaggcagacaacgacggggccgaagggcgtagtaagttggctcattattcaaaatcattatcatcggcacatgataagccaatggatgagctaataaagaggttatatgtggtggacaatgaggcctacgataaaaagatgaagattgtgcctattgttagatctgaagggctggggaaaactactcttgcccaaaaagtatttgacaagcttagtccacattttgactgtgcagcatttgttctggtaggccaaaatccggacatgaggaaagttttcactgacattctcataggtctagacaaccaaaagtaccaagatttccctatgactatattggatataattgagctgattgggttagtccgtaaatcgctcataaacaaaaggtaa

SEQ ID NO: 97932 - DNA, 1043 bp, Zea Mays
ggacagacggacagcagccagccaccaggccagccccctcaatttccacgacgcttcatgaatggagggagacacaatgcttgtatgcatgcatgcagcttgtgcggcggcttgcatgcagcaaccatgcagagcttgtgcgcgcttgtgcggcttgcatgcagcagccatgcagttgacgatgtatgggatttgaaagcatgggacataataaagtctgcattgatcgaaaacactaatggcagtgcagttctaacaacgacaagtcgtcagatctgggaacatgagaactggaggccatctggggatgacaagtcggattctgacgcagagcagttagagcctcatttggacgtcacaacccccgcggatgtcctcccagcgtcttccccgagcaagagcaaggtggtggcccatgtggaactccgccacgacgacccagattcctctgcatttggaatcccgcaagtagcaggggatactcaacctgagctccgccttttccccgaggcggatgcggatcttaaagggttcttctacgaaaacctatttggatcggaagacaagtgccctgatgatctgaaagatatatgtaaagatctcatacaaatatctgctggtgtcctatcagatgcctatgagaccgtggaagagctcagaggtattacctacgacactggaaagctggcagcctgtgtatcagagaagaaaattcgagctctcttatcccaaactacctggccatctaaaggattgcttaagatattttagtatgtttccaaaaggttacgagatcagtgcagaacgcttagtttgggcgtggatagctcaaggtttcgtaaaggagactcagggacagaatgatttggagaaagtcggaaagaagtaccttattgaccttataagcagaaagatgatcgaagcagtggaggttcatgctgatggtatggccctctcatgccgtgcgtacgatttgttgcatggcttgatcgtttcattgtcaacagaagaaaaattcgttgaaattctaaatgactcgcagt

SEQ ID NO: 97933 - DNA, 2769 bp, Zea Mays
atgaataataagctcggagtgctgtctgtcgtcgggtatggtggtcaggggaaaaccaccattgcgatggagctttaccgcaaattcggtcctcagttcgactgccgagcaatggtgactgtgtctcagaactccgaacctgagatagtgtggcggaacatactgagtcagctgaagcagcaggccgaaaatggtgtgaaggaaggcaaagatagcagcacgcgttccagaatggagaggaaaattcaagttatcagaagcatagtgaaccggcttaggcatccatgccgaaatgaagacgaagatggcagcactttgttgggaaggcacagacaaaatcatcaagcgggcctggtggggaacacactgagtcaggtaaagaataatggcgagcagcatggcaccagcttggagaagaaggctccagttaccggaagcatatggagtcgacttattatgctgctctcccggaagggaggggtggatggcgggcagcaaatacaagcagagctgaggagttacctagaacaaaagaggtacttactattaattgatgatgtctggtcagaatctagttggctttatatcaagaaatgtcttcctgagaataataaaagcagcagaataattgtcaccacaaggattcaagctgtagcaacaacttgctctcctcgtgacaaagaccttcatcttattcatacagttaaatctcttgaggaggatgaagccagagaattgttcgagaaaaccctggacgaatgcaagggcactggatatgatcatctaaatcatagaaaaattccagagagagtttggaaaatgtgtggtggcttgccattggccatagtgaccatggctggtcttgtagcatccgacaagcagcagggggcccacaaagattggaatgaagtttgcgattctctctttccaaacaaagaagtatgccataaaccagaggaatttatgaggataataaatcattgctatcatgatttagacaatgacctcaagacttgctctctatatctaagcatatttccaaagggacgcaaaatcagcatgaagaggctcacaagaagatggatagcagagggttttgtcagcgagaagcaggggttgagtgtcgaggttgttgcagagacatgctttaatcagctcattgaaaggaagttaatacgggctgtagagcacaacagcagtggaagggtgaagagttgccaagtccatgacatggttcttgagtacctaatttcaaaggcagctgaagaggattttattactgtggtaggtagccactggtcaatgccaacacatagcaacaaggtccgtaggctttccgtccacagcagcgactctaaacgtgcacagcatgtggatagcatgaacctgtcccacgtcaggtcactgactgtgtttgagagcctggacaaactgcattttaaatcactcaaaactagaatggttcaagtattagacctccaaggctgcagaggttttagggagagccatgtcaaggtttcagacataagtgaaatggttcttctcaagtatctgtgtctccgaagcacggacataaaatatcttccccggaatatacacaagctcaagtacttggagactatagatataagggagacaggggttcaacggttgcctgcaactgtaggaaagcttcaacgaataaagaacatactcggtggagataaaagagcaaggaaaaccctaaaacttcctagagaattcaagggaacaacgagaaccttacgcatattgtcaggggttgagatcgcggagggatcaacaacagcggcatcagatcttaagtacttcacggggctgaggaagttggcaatttacaagatccaccaaaatgaagatatattcagagatttgctgtcctctatccagtatcttactggatattctcttcaaactcttaaaattgatgacgagtcatctgatttccataagaccttggactcaatgtcgtcctatccaacagatttgagtactcttgagctgtctggcatgttgcttaaactcccattgtggataaaggagctccatagacttgtcaagttaactctgtcagcaacagctctccgaacagataacttaaaggtccttagcaatctaggttcactgttttccctaaccttttcaatcagtgaagagcaggatcctgctttgggagccattctccaaagaaataagtctgaatcaggaggagagatcttttttccagctggaaaattcagtaagctcaaactgcttcgcatatttgttcctcttcttccattactcaacttctcaagcaaagcggtaccagagcttgaaaggattgaattgcgtttcaataggttggaaggtcttcatggtatggaaaatcttgaacgtctcaatgatgtgctcctgacagttgatggcaaacgcagtgaacctacaaagtcaatacttgatgatttgaaagaagtatcagtatcatccaagtacacagtaattgtcaatgagtcccatcatgattgatcggaatgtcgtcaagtaaaatatgttgatatttcagtcagtaacaacaaactcagcttttatgtcttcactatgtacaaattaagctacatatgtggctgtgttttcacccctttcattcatcatgccttggatcagttaggtattcacactagtaaggatgcattagaatcactgaaatactctatatgcatggtctgatgttgcattaacagctcttaagattggtctgtatatttgtgt

SEQ ID NO: 97934 - DNA, 519 bp, Zea Mays
atggagttggcggtgggggcgtcggcggctactttgaagtcgctcctgagcaagcttgggagcctcctcgctgagcagtacaccctcatccgtggcgtccgcggcgacatccagttcatcgccgacgagctcgccagcatgcaggccttcctcagcaacctgagcaagtgcaagaagagccacgacgaccagacggaggactggataaagcagatccgcgacatctcctacgacatcgaagactgcattgacggcttcgcccatagcctccgtccagatccccggggcagcggctggctcaccgccgtccgcaagaccctgtacgagatccggacatgttgcacccgccgtaacatcaccgtccagatcactgatctaaagaaccgggcggagcatatcggcaagcgacgcctcaggtacggtgtccgtgacccgaagcccgaagagggaaacggcctgccgggcgcagcagcctcccacgaagagccgccgattgaagagattgaagggcgccggtga

SEQ ID NO: 97935 - DNA, 639 bp, Zea Mays
atggcgtcgaccaaggctcccggccccggcgagaagcaccactccatcgacgcgcagctccatcagctggtcccaggcaaggtctccgaggacgacaagctcatcgagtacgatgcgctgctggtccaggagtgctacgaggtctcggccgactacgagggcaaaggagacacgacgaagctgggcgagctcggcgccaagctcacggggctggcccccgccgacgccatcctcgtggcgagctccatcctgcacatgctcaacctcgccaacgtcgccgaggagaaaattgagtgggggcctgtgcccccactcagctcaacgtcggtccgcccctggcaccgcagccgcaacagcaagctcaagaaaggtggcttcgctgacgagggctcagccaccaccgagtccgacatcgaggagacgctcaagcgcctcgtgtccgaggtcggcaagtcccccgaggaggtgttcgaggcgctcaagaaccagaccgtcgacctcgtcttcaccgcgcatcccacgcagtccgcccgccgcttgctccagcaaaaaaacgccaggatccggaattgtctgacccagctgaatgccaaggacatcactgacgacgacaagcaggagctcgatgaggctctgtag

SEQ ID NO: 97936 - DNA, 1013 bp, Zea Mays
atggtggacagcctgctgtcgtccagagtcagaacggggacggaccgggtggatgggatggaggacgccgcgaaggtgttcgacgaaatgctgactaagggcgaggaggcaccatctgtggtgatgtacaatgctctgatcaatagctactgcacaggtgcaaatatggaaggcctttgtgcagacaagactcaacaattggttgacatcacggactggatcgtggacacagagattatcttgctcagggacaacaacaggccaaaacctggtggcaatgttacctttggcgagttgctcaagagcagtgtgctgacagaaggtgtccgcgtgcttatgctggtctggaatgctaggacttctgtcggtttgtttaagaaggatggcttgctagctgcccatgatgaggagcctgcaaattacttccaggggcatgactgtgttgtggattttgagttgaagcttgaagagtgtcaactgaagcagtaccaatgggagcaggaacagatggcttcaatgatggagtacattgctcgctttggtcctgattctgcaaagcttgtgaggggaattaagcaaccatggccgccaccaagggcagtcccgccgcagcttgattacagcgatgatgaggcatatgttggtagtgcttggactagattgtaccccttgacaaagaagcgtgccaagcctgcagtgccattgggtgccaactatagactgattgatattactgtcagcagttgtctcaacagcaacataattgggctaatgttccttggcatgttccctgtggtggtgtgtgctactaagatggaaatttggtgttcattgccaatgattggcacactgcacttctacctacttatctgaaggcatattacaaagaccatgggttaatgcagtacactcgccccattcttgtcatacataacatcgctcaccagggtcgtgatcctgtagatgaattcccgtacatgaacttgccttaagactaccttcaacattaaagg

SEQ ID NO: 97937 - DNA, 423 bp, Zea Mays
atgtacatgcagcaatggttcaaggactactcccgatccagcaatttgaccgatgataacggccgaaggacattcgcgctggtgaacaaggccacacgacaagcaattgtgaacagaaaagatacaagcatgcaaagtgatcttcaatatcgtcgcggcgacgtaatcaagcaggtggaactggccccttacaactatgatgatcgtgtggatatctccatgctatggaccgagctcgcggagaacggtaacgatgacggctttaacataattgcggtgctcagcgacaactctctgatgctttgttggcaacatgacggcaataatgtcagtacgggtcagggcatggtaaccgttaactatttttctggtcaaggcaaccggcactggaagatagttcccgtaggccgcaacgcgtggtga

SEQ ID NO: 97938 - DNA, 1299 bp, Zea Mays
gccagcgcgcaggagctcctccccgtcggccagccatggcgcccagaaaattccagctggctcccccttcttcttcctccagccagcaggtcgttccctcggctgtctagggcgcggacgagcttctctcgcccctgctcttctttggccggaccggccccccagctcgggcaggcgagcccaccatcgcccatggacgagctccctccctgctcccatattggctcgcctcctccaaccctttcttgtacctctagcgccatggccaagcttcctttttccctgctgttcccctgcgcgcagaggcttctccttgggcgcgggtacctctgctccaaccatggcgcctccctctgctgtccacggcgagcagcccagcagccgagcgccccacggttgaagtcccattggccgacctccactttcctgctccatggccacccagcaacagtgcccttcttccccgcacagcgcctctgctctccctctcccaagctccaactctcacagaacagcagatcaccggcgcccttgtttccctgctcggacagcagccatgccgccatgattccctgcgcagcaagccacgcgtcgtcgatttcctgcagcagccccggcgtctccgcgctctgcgggctcgctgttttataagcgcagtgaacaacacgtcgtcgacctcgcgcagcaaccgcgaccctagttcacgcagccacatgggttccctccgcgtcgcgcccttgtcgtgctcgacaaaatggcgcagtgagcagcagccatgagatcccgtctgtatcgcttgcattgacccgatttgcgcagcgcctacgcgccgttgtcgaaacccgtgctagccgtcaatgccattcgtcgcgcacgcgtgttcgatacaagaccggtcgggtgcaccacgtgcttgcacaactcaaatccgatcccgttcaggttgattgatttatagtttacattatgtatgatttggttgatgtcaggcagtgcatgtatatgtgtggatatgtgtaaagcattcgattatgcgcattggtaggatcgcgtttgcgattagagaacaagaggatatttgatgtgtgcgatttgtagttagtctaattaggttttggtcgatgatgtgcatgtgtgattatgtgtgcgaaaatacattggtatgaatggaagcgtgtagagaggaaaatgaagtagaaaagaactccggtgtttttatattttgataggaaaatatatgatgtcttgtctgatgcgaagactaagtttaaataaataaatgtggatcatgttttaggg

SEQ ID NO: 97939 - DNA, 101 bp, Zea Mays
gttgtgctaaggactgaacataatttgggtgtgttaatactttatttattgtctacacatggtttgtgttattctaatgatggatcatggatcctacaaat

SEQ ID NO: 97940 - DNA, 202 bp, Zea Mays
ataagtttgagttcatgtgaattattttagaaacttgagctcataaactttatcatatttggtctctatatggtggaattatgtcattctataatctttgttcattcagtcagtcgttgtgaactctcttctaatcactcccttcattggtcgtgttgcaccaagacatattggatggagtaaataacaacatcaattagtc

SEQ ID NO: 97941 - DNA, 186 bp, Zea Mays
ggaccaagaggcgggactcggcgattttctgtaccgcgcaggggcgatttcggtcggggccggcgcatcgccattgaaccgcgagactaccgtcgctccatccgggggcaacctgttcgtgtctgggcgctgacgagcaagctatagaggatgttgaggttcagctggtagagactgctgagcagg

SEQ ID NO: 97942 - DNA, 1176 bp, Zea Mays
gtacaagagatgaacaaaagtgcaaggaagcctccctcgatcccctcctctatatatatatatacaagaagaccttagagccgcaggaaggaaatctatccaagcaacaaacttggcattcttgcctgttcttaattattgccaggacaggagaaacaaagatgaggcctcagctgatactcgtcggcactctggctgttctcgccatcctcgcagctctcggcgaaggctcgtcgtcctggccctgctgcaacaactgcggtgcttgcaacaagaagcagccgccggagtgccagtgcaatgacgtgtcggtcaacgggtgccatccggagtgcatgaactgcgtcaaggtcggtgcaggaattcgtcccggcatgggccatggccccgtcgtcacctaccgctgtgacgacgttctcacaaacttctgccagagcagctgcccggaggcgccggcgccataggcgggtggccggtgtcttcttctgacgtacggcatgggacgccaagtcgagtttgcttctctccagtttcgtcagagaaaagaaataaataaataaataaatgtcgccggccgctctgttcggtgcttgctcttgttcgtcgtccgtgtattagtactctcttttttctttttctttcttgaataaagagccatatgctgcatatgccatgctcaaagcactgttggttggttttggttgtttgatttatgggctaggccctaccgtgaaattttattaaattctataaaaatcttaaaatctcatgtatagatatggcaaggaaatggtggaacaaatagtcttatattgctagtccaaatgaaatgaaacaagtagtgtagatgatgccaatcaccgataaatgaatatcaagacaatcaatcatgcgatggtgatgagcacaatgatatccaatgaatgccaatcaaattgacatagggagacaaagatttatccctatgttcgcgtgcttgccagcacgctagtccccgttgtgtcaaccttcacttggtggttcggtggctaatcgacgatatatgtgaagatcgacacacgagctccattagaacctaccacaagcaaggtattcattgacacgagcaatttactagttctaccttgaggcactccgttggagaaggtgctaacccctcacaatcaacaccggtag

SEQ ID NO: 97943 - DNA, 1123 bp, Zea Mays
gtacaagagatgaacaaaagtgcaaggaagcctccctcgatcccctcctctatatatatatatacaagaagaccttagagccgcaggaaggaaatctatccaagcaacaaacttggcattcttgcctgttcttaattattgccaggacaggagaaacaaagatgaggcctcagctgatactcgtcggcactctggctgttctcgccatcctcgcagctctcggcgaagccgccggagtgccagtgcaatgacgtgtcggtcaacgggtgccatccggagtgcatgaactgcgtcaaggtcggtgcaggaattcgtcccggcatgggccatggccccgtcgtcacctaccgctgtgacgacgttctcacaaacttctgccagagcagctgcccggaggcgccggcgccataggcgggtggccggtgtcttcttctgacgtacggcatgggacgccaagtcgagtttgcttctctccagtttcgtcagagaaaagaaataaataaataaataaatgtcgccggccgctctgttcggtgcttgctcttgttcgtcgtccgtgtattagtactctcttttttctttttctttcttgaataaagagccatatgctgcatatgccatgctcaaagcactgttggttggttttggttgtttgatttatgggctaggccctaccgtgaaattttattaaattctataaaaatcttaaaatctcatgtatagatatggcaaggaaatggtggaacaaatagtcttatattgctagtccaaatgaaatgaaacaagtagtgtagatgatgccaatcaccgataaatgaatatcaagacaatcaatcatgcgatggtgatgagcacaatgatatccaatgaatgccaatcaaattgacatagggagacaaagatttatccctatgttcgcgtgcttgccagcacgctagtccccgttgtgtcaaccttcacttggtggttcggtggctaatcgacgatatatgtgaagatcgacacacgagctccattagaacctaccacaagcaaggtattcattgacacgagcaatttactagttctaccttgaggcactccgttggagaaggtgctaacccctcacaatcaacaccggtag

SEQ ID NO: 97944 - DNA, 949 bp, Zea Mays
ctctgtcgcggccgagtggagctcgtcagatccgcgcgccgcacgccgatctgcgccacctccgggtttaagcttgggatggattgggcagcgccacccgaggttttgcatgcgcccgaccgcagcggaattccgtgaaccctgtacggcaatggcaattggcaatgacagggttactggggtgggtgaatggtttcgggatagacaattgtttgtgggagctgcgctggcgaaatgtaggctgtctattgttgcaattgcaggatggatgggtagcctctggtcggctctgctagtgtgtagtgttgctgtctgtggtctattcagggattcccatgcccatacccatgcagattgctaggtgccgttctgtcggtacatggttggtggcgtgtctgcgtctttgctgtcactgggtttaaggtttaaggtgtagtatcagtgggtaccctcatgaattaggggttaagcccaatgttcctttgtgggtacatcatgaatgcacttggccttgttccctgttagcttttgcttatgtgtcattctagcaagtgggttactgtaacatttgcaccctttgatggttgatggctctgcatcttttcgcttcctctcgttatttaatacctgagtgtaactgatgacctacttttgtgtaccatatactttacatccttttgtggtacatatcaattgtgaaaaataatgttttgcattctcagtatgttgtacacaaaaaaggaggctttacctgcaacttttgagaaaaaaaccaaacctttctgaaaaggagtgatggtttagtatgaagaaaatctgatttactttcttcagagagaatatttcaaaccaacatttatcttattgtctgagctactgaaatttgatttttatcttacttgcacaagccacatgaaaccttaccatccccatgataaaaaaaagaaaa

SEQ ID NO: 97945 - DNA, 678 bp, Zea Mays
ggagctcgtcagatccgcgcgccgcacgccgatctgcgccacctccggtgagaccgcgcgccggcattgctctcatggtagctgccggggtgctggggttcgttgctcacttgctctgcctgggtacacacatacagggtttaagcttgggatggattgggcagcgccacccgaggttttgcatgcgcccgaccgcagcggaattccgtgaaccctgtacggcaatggcaattggcaatgacagggttactggggtgggtgaatggtttcgggatagacaattgtttgtgggagctgcgctggcgaaatgtaggctgtctattgttgcaattgcaggatggatgggtagcctctggtcggctctgctagtgtgtagtgttgctgtctgtggtctattcagggattcccatgcccatacccatgcagattgctaggtgccgttctgtcggtacatggttggtggcgtgtctgcgtctttgctgtcactgggtttaaggtttaaggtgtagtatcagtgggtaccctcatgaattaggggttaagcccaatgttcctttgtgggtacatcatgaatgcacttggccttgttccctgttagcttttgcttatgtgtcattctagcaagtgggttactgtaacatttgcaccctttgatggttgatggctctgcatcttttc

SEQ ID NO: 97946 - DNA, 6978 bp, Zea Mays
atgtcgcagcttggattagctgcaactgcctcgaaggccttgccactactccctaatcgccagagaagtccagctgggactacatttccatcatctgcattgccgaggccctcaaaccgaaggaaaagccatactcgttcacttcgtgatggtggaaatgaggtatcagatgccaaaaagcacagccagtcagttcgtcaaggtcttgctggcattatcgacatcccaagtgacgcagtttcggaagtcgatatttcacatggacctaaggatcctagggggccaacagattcctatcaaatgaatgggattatcaatgaaacacataatggaagacatgcctcagggtccatggttgttgaattttgtgcagcactaggtggcaaaacaccaattcacagtatattagtggccaacaatggaatggcggcaacaaagttcatgaggagtgtccgtacatgggctaatgatacttttggatctgagaaggcaattcatctcatagctatggcaactccggaagacatgaggataaatgcagaacacatcagacttgctgatcaattcgtagaggtgcctggtggaacaaacaataataactatgccaacgttcaactcatagtggagatagcagaaagagtaggtgtttctgctgtttggcctggttggggtcatgcttctgagaatcctgagctgccggatgcattgaccgcaaaaggaatcgtttttcttgggccaccagcaacatcaatgaatgcattgggagataaggttggttcagctctcattgctcaagcagccggggtcccaactcttgcttggagtggatcgcatgttgaagttccattagagtgctgcttagacgcgatacctgaggagatgtatagaaaagcttgtgttactaccacagaggaggcagttgcaagttgtcaagtggttggttatcctgccatgattaaggcatcctggggaggtggtggtaaaggaataagaaaggttcataatgatgatgaggttagagcgctgtttaagcaagtacaaggtgaagtccctggctccccaatatttatcatgaggcttgcatcccagagtcggcatcttgaagttcagttgctttgtgatcaatatggcaatgtagcagcacttcacagtcgtgattgcagtgtacaacggcgacaccagaagattattgaagaaggcccagttactgttgctcctcgtgaaacagttaaagcacttgagcaggcagcaaggaggcttgctaaggctgtgggttatgttggtgcggctactgttgagtatctttacagcatggagactggagaatactattttctggagcttaatccccgactacaggttgagcatccagtcactgagtggatagctgaagtaaatctgcctgcagctcaagttgcagttggaatgggcatacctctttggcagattccagaaatcagacgtttttatggaatggactatggaggagggtatgacatttggaggaaaacagcagctcttgctgcaccatttaattttgatgaagtagattctctatggccaaagggccattgtgtagcagttagaattactagtgaggacccagatgatggtttcaaacctactggcgggaaagtgaaggagataagttttaaaagcaagcctaatgtttgggcctacttctcagtaaagtctggtggaggcattcatgaatttgctgattctcagtttggacatgtttttgcatatggactctctagaccagcagctataacaaacatgtctcttgcattaaaagagattcagattcgtggagaaattcattcaaatgttgattacacagttgacctcttaaacgcttcagacttcagagaaaacaagatccacactggttggctggatacaagaatagctatgcgtgttcaagctgagaggcccccatggtatatctcagtggttggaggtgctttatataaaacagtaaccaccaatgcagccactgtttctgaatatgttagttatctcaccaaaggccagattccaccaaagcatatatcccttgtcaattcaacagttaatttgaatatagaagggagcaaatacacaattgaaactgtcaggactgggcatggtaggtacaagttgcgaatgaatgattcaacagttgaggcgaatgtacaatctttatgtgatggtggcctcttaatgcagttggatggaaacagccatgtgatttatgcagaagaagaagctggcggtacacggcttcagattaatggaaagacatgcttgttgcagaatgaccatgatccatcaaagttattagctgagactccctgcaaacttcttcgctttttggttgctgatggtgctcatgttggtgcggatgtgccatatgcggaagttgaggttatgaagatgtgcatgcctctcttgtcacctgcttctggtgtcattcattgtatgatgtctgagggccaggcgttgcaggctggtgatcttatagcaaggctggatcttgatgacccttctgctgtgaaaagagctgaaccatttgatggaatgtttccactaatggacctccctgttgctgcctctagtcaagtacacaaaagatatgctgcaagtttgaatgctgctcgaatggtccttgcaggatatgagcacaatatcaatgaagtcgttcaagatttggtatgctgcctggacaatcctgagcttccttttctacagtgggatgaactaatgtctgttctagcaacgaggcttccaagaaatctcaagagtgagttagaggataaatacaaggaatacaagttgaatttttaccatgggaaaaacaaggacttcccatccaagttgctaagagacatcgtcgaggaaaatcttgcatatggttcagagaaggaaaaggctacaaatgagcgacttgttgagcctcttatgaacctactgaagtcatatgagggtgggagagaaagccatgcacattttgttgtcaagtctctttttgaggagtatcttaccgtggaagaacttttcagtgatggcattcagtctgacgtgattgaaaccttgcgtcatcagcacagtaaagacctgcagaaggttgtagacatcgtgctgtctcaccagggtgtgaggaacaaagctaagcttgtaacagcacttatggaaaagctggtttatccaaatcctggtgcgtacagggatctgttggttcgcttttcgtccctcaatcataaaagatattataagttggcccttaaagcaagtgaacttcttgaacaaaccaaactaagtgaactctgttccagcattgcaagaagcctttcagatctggggatgcataagggagaaatgactattaaggatagcatggaagatttagtctctgccccattgcctgttgaagatgctcttatttctttgtttgattacagtgatccaactgttcagcagaaagtgattgtgacatacatatcacgattgtaccagcctcatcttgtgaaggatagcatccaaatgaaattcaaagaatctggtgctattgttttttgggaattttctgaagggcatgttgatactagaaatggacaaggggctattcttggtgggaagagatggggtgccatggtcgttctcagatcacttgaatctgcatcaacagccattatggctgcattaaaagattctgtacagtacaacaactctgaggtcaacacaatgcacattgtgttattgaatgctgaaactgaaagtaatataagtgggacaagtgatgaccaagctcaacataggatggaaaagcttaccaagatactgaaggatagtagtgttgcaagtgatctccaagctgctggtttgaaggttataagttgcattgttcaaagagatgcaggtcgcatgccaatgcgccacacattcctctggtttgatgaaaagaactgttatgaagaagagcatattctccggcatgtggagcctcccctctctgcacttcttgaattgggtaagttgaaagtgaaaggatacaacgaaatgaagtatactccatcacgtgatcgtcaatggcatatctacacactaagaaatactgaaaaccccaaaatgttgcatagggtatttttccgaactattgtcaggcaacccaatgcaggcaacaagtttacgtcggcacaggtcagcgacactggattaggatgtcctgaagaatctctgtcatttacatcgaatagcatcttaagatcactgatgactgctatagaagaattagagcttcatgcgattaggacaggtcattctcacatgtttttgtgcatactgaaagaacaaaagcttcttgatctcgtcccattttcagggagtacaattgttgacgttggccaagatgaagctactgcttgttcacttttaagatcaatggctttgaagatacatgaacttgttggtgcaaggatgcatcatctttctgtatgccagtgggaggtgaaactcaagttggactgtgatggacctgcaagtggtacctggagagtcgtaactacaaatgtcactagtcacacctgcaccattgatatctaccgagaagtggaagatacagaatcgcagaagttactataccattcagctacttcgtcagctggtccaatgcatggtgttgcactgaataatccttatcaacctttgagtgtgattgatctaaagcgctgctctgctaggaacaacagaacaacatattgctacgattttccgctggcatttgaaactgcactgcagaagtcatggcaatccaactgttctagtgttcctgaaggcagtgaaaatagtaaatcctacgtgaaatcaactgagctggtgtttgctgaaaaacatgggtcctggggcactcctataattcccatggaacgtcctgctgggctcaatgacattggtatggtcgcttggatcttggaaatgtcaacacctgaatttcccaatggcaggcagattattgttgtagcaaatgatattactttcagagctggatcattcggcccaagggaagatgcattttttgaagctgtcaccaacctggcttgcgaaaggaagcttccccttatatacttggcagcaaactctggtgctaggattggcatagctgatgaagtgaaatcttgcttccgtgttgggtggtctgatgaacgcagccctgaacgagggtttcagtacatctatctgactgaagaagactatgctcgtattagctcttctgttatagcacataagctgcagctagataatggtgaaattaggtggattattgactctgttgtgggcaaggaggatgggcttggtgttgagaacatacatggaagtgctgctattgccagtgcttattctagggcatatgaggagacatttacacttacatttgtgactgggcggactgtaggaataggagcctatcttgctcgacttggtatacggtgcatacagcgccttgaccagcctattattttaacagggttttctgccctgaacaagctccttgggcgagaagtgtacagctcccacatgcagctgggtggtcctaagatcatggcgaccaatggtgttgtccacttgaccgtttcagatgatcttgaaggtgtttccaatatattgaggtggctcagctatgttcctgcaaacattggtggacctcttcctattaccaaacctttggaccctccagatagacctgtcgcatacatccctgagaacacatgcgatccgcgtgcagccatccgtggtgtagatgacagccaagggaaatggttgggtggtatgtttgacaaagacagctttgtggagacatttgaaggatgggcaaaaacagtggttactggcagagcaaagcttggaggaattcctgtgggtgttatagctgtggagacacagaccatgatgcagctcatccctgctgatccaggtcaacttgattcccatgagcgatctgttcctcgggctggacaagtgtggttcccagattctgcaaccaagacagctcaggcattattagacttcaaccgtgaaggattgcctctgttcatcctggctaactggagaggcttttctgggggacagagagatctctttgaaggtattcttcaggctgggtcagcaattgttgagaaccttaggacatataatcagcctgcgtttgtctacattcctatggctggagagcttcgtggaggagcttgggttgtgatcgatagcaaaataaatccagaccgcattgagtgttatgctgagaggactgccaaaggtaatgtgctcgaacctcaagggttaattgaaattaagttcaggtcagaggaactccaagactgtatgggcaggcttgacccagagttgataaatctgaaagcaaaacttcaagatgcaaagcatggaaatggaagtctaccagacatagaatcgcttcagaagagtatagaagcgcgtacaaaacagttgttacctttatatacccagattgcagtacgctttgctgaattgcatgatacttccctgagaatggcagctaaaggcgtgattaagaaagttgtagactgggaagaatcacgctctttcttctataaaaggctacggaggaggatctctgaagatcttcttgcaaaagaaataagacgaataattggtgacaacttcacgcaccaatcggcgatggagcttatcaatgaatggtacctggcttctcaggccacaacaggaagcactgctggatgggatgatgatgatgcttttgttgcctggaaggacagtcctgaaaactacaagggatatatccaagagctaagggctcaaaaagtatctcagtcgctctctgatcttgctgactccagttcagatctacaagcattctcgcagggtctttctacactattagataagatggatccttctcagagagtgaagtttgttcaggaagtcaagaaggttcttggatga

SEQ ID NO: 97947 - DNA, 1406 bp, Zea Mays
atggcttgggagctcattgaggtcccgggcaacctgaatatctctctccaagactctacagttgatgtggtggccgccaagattgatcccaagctagctaatactctcattaggcagttaagccaggtgtgtccattggaaaatctgaggcatgtaaagcgtgtacgtcgaggtactgaatgtgatggaaaatctgagttatcaataatcctatgtgtttctactgggtctgaaacttgtggcatacagttttctgaagatctaaaaaagatagtggatacttatcagctgagtcctttcactgcaaaagttgccaggtgttgtgctacatcaaaagaggagtgggagaaacagtgcaaactttggccaacatcttaccatcctgcacatgaccttgatattgtacgaggatttcaagaggaggaattaccatcaatatttaattgcatgaagactactattcaattatcaaagacgggcaatgctgcaatcattgttgacccatcaagcatgcaaatagtcgcaaaggccacggaccagacacacaagcatgatacgcctgaagggaacacggtttctgaagcaaatgcagatgttacctgctctttgaatgaatcgatgggtaatggcagcaatttgtcactgccaggatcctttcttcctaaatgcgacagcttgaacatggaaatctcatgtataaatccttggggatggatgaaaaaaaagacttgtgagcggaagccattgccctgtgatggctgttttgcatggcatcctctgagacatgctcccatggttgccattgaaaatgctgctgagagggatagaacgatgttcccttctttggcttcaataaccaagacagattcaaatggcaatctagagaagtattgtgataatgaacaagcaaaaaggctaaagacagatacaaaagataatgagccgtcggcatctgaatcattctgtggtgacttgtctgaaaccagcagaccatatctctgcacaggatttgatatctaccttgtttgggaaccatgcacaatgtgtgcaatggcacttgtacaccatagattcaagcgcgtgttctatgctttccccaatcctgtcaccggagcgctcggtggagtctacatgttgcatggggagagaagtctaaatcatcactacaatgtatttagggtttcagtacctgaggcatactcgaatggtttgaattagttgttcgaaggaatgctgacccaacatcctgttccattttgtttagaaaaaaaggatccatgagctcttgattttcactatgggtgccattttgttgcacaagagcttcagattaggcttaaacttgtccttttgtattattaaaattttacctatgttgtatcactaaaatagtctcttcattctct

SEQ ID NO: 97948 - DNA, 507 bp, Zea Mays
atgcggtggctcctccctctcctctcgctgatgggcctgcagagcaccgtgggcgcgctgtggttcgcgaggcagaacatgtcgagccctcggcacgccgccagcacctaccccgacgcctcaagctccaccgttgggagctccagctcgcccccccaatgcatgagcatatacctattctctactattctatatgagcctaacgagggcgtccacaactacaccgtgcccccgcccccgtcaaccacgcgcgtcatgcccccgcccacgctctcccgcgatcttcgccgccgcgtcttcaccacccaagcccgtgatctccgccgccgtccgcacttgggtcagttgttcccaggcccgttcaaggccatgcgtgcctatctgtgtgccgagggtaacatggagaacaccgtccgccaggctggctggcaagtcgtccccgtagcttcatctccattaaggggattgggaacaagaggaggccactgcacttgggacttcgaatag

SEQ ID NO: 97949 - DNA, 561 bp, Zea Mays
gaggatctatggatatctgctttcctgttggtactaaggaagccaacaggaaattttggactgctacttggattaatgctcgagaaaaaaggtgcatgacatcaatattgctattctatttgttctatagaaccttatgtggaaacgtgcattacacagtcccagcctcctagagactatatacatggtatgcagtccctagggaccgagcctcagagctagaggaagttattcgtgtacatggatatggaggaaaccctgaccgccttgcatcgctggcagtgcttggggagaagacaacattgatgtctccagatgttcttgtagcccgtggtgtgccctgctgtaggttagtacagtgtcctggagagtttgtggtgacattcccaagggcataccacattgggtttagtcatgggcgtccacaggctacgccatgcctccacctccgcagatcatgcctaccctgccccgcccgcgacagcctgcaagcattaatgaagttgtctgttttgcaataactttgtggagcggtttgatcatcactgtccatgggtcggt

SEQ ID NO: 97950 - DNA, 388 bp, Zea Mays
atcgcccgcgatggtgggcgccataaccggagttctgcagctgccgttggcgcaaccgtcggagcgggatcctcgcgtagtctgtcgccgcaggataagtgtgtggcccttgccctctttttctccccattcccctcgtctcggccgtagtgttgcgcagagagttggtgaggagctaaatactttatgccaccgtcgattactgccaaacaccgtcgtgagggtctgcgggctgtgcccggaagcttccttaggccgccgcgggggtgctcgtttatcgacttgggcgcgtgcgacgattggcgggcaacaatttctcgtcggagtgggcgcgccgccgtagatcgcgccgcgccgtggaccagggtctgtgcggcccaaatcctag

SEQ ID NO: 97951 - DNA, 661 bp, Zea Mays
attccatttccttccgcgtctgtccccaaaagcgggaggcccgccgccggaacgagccagcaaagccaagcaagcatattgacggaggaggcggaacggcggaagcgtgaatccggaggctctgcagctgttctccagaagcagccgactgggtgtccgtccgcggaccggtcggtgtataaatggttggcgaggagagcggctgcggcgtcgagggagggacaggaggaggagaagtgccggcggcctctgctcccaacggggaccgctcagggaatagccgcctcgccgtgccgtcatcctccgcagatgatagaggcttccatagatcaagcaccatgccaggggtgattaagaatgatgaaattaccaatgaatctactggaccatcaaatttggaaaggtccagaactgagcgtcgtcggcaaaataatccaactattgatcctgctaaacagttacttgatgaaaggattccatttagcttgtcggcatctgaagtacatatttgtttatggactgggaattgaatcgttgatagttatactaagtaatgtatactagtatccaaactccgtctttctttgaattacaagtatatttcaaaattcatgcattgccgatttggaactgatgaggaaatattgaatatatattgcaa

SEQ ID NO: 97952 - DNA, 1833 bp, Zea Mays
gttccacctttattgcagctcaaaatgctaaatcggattgctacagtaaaagatgatggaactgtggttgttgatgtgccaagtggtctggaaccaactatagttggtggaactgaggatatttatactgaagctgttgaagaagcattagatggaacggagatactatacaggcctcctatgcaaatagttatacttattgtgggtacacgaggagatgtgcagccatttgttgctatcgggaaatgtttacaggactatgggcatcgtgtgagattggccactcatgccaactttaaggagtttgtactaacagctggcctggagttttttccgcttggtggagatcccaaaattcttgctgaatatatggtgaagaataaaggattcctaccttcgggaccatcagaaattcctattcaaaggaaacagatgaaagaaattattttttctttgctgcctgcatgcaaggaacctgatcctgacactggcattccttttaatgttgatgcaattattgcgaacccacccgcgtatggacatacacatgtggcagaagcactaaaagtaccaattcatatattctttaccatgccatggacgcctactaatgaatttcctcaccctctttctcgcgtgaagcagcctgctggatatcgactttcttatcaaattgtggactccatgatttggcttggaataagggatatgataaatgagttcagaaagaaaaagctgaagctgcgtccagtaacatatctaagtggttctcagggttctggcaatgacattccgcatggatacatttggagtcctcatcttgttccgaaaccaaaagattggggcccaaagatcgatgttgttggattttgcttccttgatcttgcttccaattacgtacctcctgaaccacttgtggaatggcttgaagccggtgacaagcccatatatgttggttttggtagtcttccagttcaagatccacaaaagatgactgaaattattgtcaaagcactggaaattactggacagagaggtatcattaacaaaggctggggtggccttggaaccttgtcagaaccaaaagattttgtgtatctactagacaactgccctcatgactggctttttctgcactgcaaagcagtggtgcatcatggtggtgctggaacgacagccgcaggtcttaaagcagcgtgtcccacgactattgtacccttctttggtgaccaacctttctggggtgaccgggtgcatgcaagagggctagggcctccgcctattccagttgatcagtttggtttgcagaagttggtcgacgctataacattcatgatgaaaccagaggtgaaagataaggctgtggagctggcgaaagccatggaatctgaagacggggtgacaggtgctgttagggcattccttagacacctgccatcaaaagctgaggaacagagtctgccgcagtcatcgggcttcctggaattcttaggcccactaagtaaatgtttgggatgttcttagtgcacaaggcatcgttactattcacggattggcggtgtaccatttcctcgaagcagccacgagttatcgtaatattccatgcaaagaagcttcaggccagtagtgtttctcctcttcttttctgcgggtatttataatgtgtaaagagtgcttgtggtgtggatggtctgcacggatggcctgcatcctgtggtgcgtgtaattttgatgtgcatgtttgccgtgcagcacagacgacgatttcacgtctgcatggccaacccgttctgtatatgaaaagaaacaggtgcctacgttttcttcgttttc

SEQ ID NO: 97953 - DNA, 1395 bp, Zea Mays
acaagctgccatgtctctttgctgcatatatttctgtggtgaagacctattttagctcactagtttgaattataagaatgtttattcttgtgacctcaaatgttcttcaggacatacacatgtggcagaagcactaaaagtaccaattcatatattctttaccatgccatggacgcctactaatgaatttcctcaccctctttctcgcgtgaagcagcctgctggatatcgactttcttatcaaattgtggactccatgatttggcttggaataagggatatgataaatgagttcagaaagaaaaagctgaagctgcgtccagtaacatatctaagtggttctcagggttctggcaatgacattccgcatggatacatttggagtcctcatcttgttccgaaaccaaaagattggggcccaaagatcgatgttgttggattttgcttccttgatcttgcttccaattacgtacctcctgaaccacttgtggaatggcttgaagccggtgacaagcccatatatgttggttttggtagtcttccagttcaagatccacaaaagatgactgaaattattgtcaaagcactggaaattactggacagagaggtatcattaacaaaggctggggtggccttggaaccttgtcagaaccaaaagattttgtgtatctactagacaactgccctcatgactggctttttctgcactgcaaagcagtggtgcatcatggtggtgctggaacgacagccgcaggtcttaaagcagcgtgtcccacgactattgtacccttctttggtgaccaacctttctggggtgaccgggtgcatgcaagagggctagggcctccgcctattccagttgatcagtttggtttgcagaagttggtcgacgctataacattcatgatgaaaccagaggtgaaagataaggctgtggagctggcgaaagccatggaatctgaagacggggtgacaggtgctgttagggcattccttagacacctgccatcaaaagctgaggaacagagtctgccgcagtcatcgggcttcctggaattcttaggcccactaagtaaatgtttgggatgttcttagtgcacaaggcatcgttactattcacggattggcggtgtaccatttcctcgaagcagccacgagttatcgtaatattccatgcaaagaagcttcaggccagtagtgtttctcctcttcttttctgcgggtatttataatgtgtaaagagtgcttgtggtgtggatggtctgcacggatggcctgcatcctgtggtgcgtgtaattttgatgtgcatgtttgccgtgcagcacagacgacgatttcacgtctgcatggccaacccgttctgtatatgaaaagaaacaggtgcctacgtttt

SEQ ID NO: 97954 - DNA, 1281 bp, Zea Mays
gaagacgacggagatgcagcgcctgtggcaggcgccggccctcttcgtgggcttggtctcctccctccagacgttgccgaggtccttggcaatgcgcacggcgtcggtggaggcgcccaagagaccacgccgggtgaaacccacggcgtagagcccagattgacccttccacccgtgagggaaggccgtcttggggtatccttccttgttgaaggaatcgttgctgctgagccactggggaacgttgctgcggtatccggtggcgaggatgacggcgtcgaagtcaagagtgcgtccgtcggcgagctcaacctggccgccctttccgaaacgtgtcacggcagggacgacggcgatatctccggcacggatgcgcgcgagcgcgccggtgtcgaggacgggtgtgcggccgtgtgtctccttgagctcgagcgggccggcggcggggcgtcggaggccgagcttggcgaggttgcccaggacgagccaggcgaggatgaccatgatcttgtcgacgagccagagcgggagccagcgcctgaggagcacggcgagctggaaggtggacttgccgagcacctcacgggggaggacgtgcacggcgtcgcgcacgaccatggccgggcgggccccgtggtcggagaggtcgagcgacacctccatcccggagttgccgcagccgaccacgagcacgcgcttcccggcgtaggcctcccctgacttgtagtcgctgacgtgggtgaccttgccgtggaagccgccgagacccgggatgtcgggcacgacggcctcggcgttctcgccggtggcgacgacgagccagcggccgatgtactccacgtcgccaccgttggcgggcgccgaggtggtgacgcgccagaggcccgacgtctcgtcgtagcgcgccaacaccaccgtggtgctgaactccggcctgatctcgaacctggcggcgtagtcctcgaggtagtcgatgaactggcggcgggtggggtactccgggtagtggtcggggaagggcatgcgcggcagctcgcagaactgcttgggcaggtgcagcttgaggcggtcgtaggtgcgcctctgccacagcgacgcgatgcagtcggcgcgctccagcatgacgtaggggacgccctgctcgcgcaggcacgccgccacggcgagacccgagggccccgcgcccacgatgatggggccgttcacccactggcagcgcggggagaagaggctgtccatgcggtcggtaggaaggagccccatggctgatgtgtggctttc

SEQ ID NO: 97955 - DNA, 174 bp, Zea Mays
tttatgattctaattatgctcggatccataaccttcaaaacgattttcatgttcgtttagtttcaaatcatattaagtctcgtttagtttcaaatcatattaagtctcgcgagaatctctggaccactaagacgcttgggtggtcccctcgtcacaatcatgtcctttttaaaa

SEQ ID NO: 97956 - DNA, 423 bp, Zea Mays
aaaagctatacaaaaataggttcacgtaagaaagtgcgtattggtttgcgtaggaatgcctgttttagtttatggaagagtgcacatagaataacaaaaggggttattcatgttcaagctagtttcaacaataccattataaccgttacatacccacatggtcaagtcgttttctggtcttgcgcaggtacttgtggattcaaaaagtcaagaaaagcatcaccctatgctggtcaaagaacagtagtagatgctatttgtacagtgggtttgcaacgagcagacattatggtaaaaggtgctggtagcgaaagagatgtcgcattacgagccattgctaaaagtggtgtacggttaagttgtatacgcgatgcaacacctatgctgcataatggatgttgacctcctaaacaaagagatctg

SEQ ID NO: 97957 - DNA, 151 bp, Zea Mays
cctcaacatggtccaaaccaccttgtcaactgatcaactcagtgacatgtatcacctcgctatttgtacagctcgatcaaatcaatgatctgatccacgccacaaccacaccactgactctatgcatgtactctgctagtagagtactaac

SEQ ID NO: 97958 - DNA, 108 bp, Zea Mays
atggccacgcgaggcaccattggcgactgcagtggcacgattggctttggtggtggcagcagcggccacgaggggcgcgggtggcgacggcagtcgcatgaggcatag

SEQ ID NO: 97959 - DNA, 2703 bp, Zea Mays
aaggcatcctcgtcgtatttttatttcgcccagcgccgcagcccgtctctcatcgcggctgcccctcggcgatctcaagagcctcggtcgcctctcttcctcagcccgctcgccccctcttcgatacccccgataaaacccccgacccgccccgtctccagctggccaccccatcctcgtcttctccaattccaaagtaagaaagccacacgcgaggccgaccgaggaagtccaatctcatggcgctctcctgcatgaggtgccccgcgggcgccggcgccgcctccgcccgacgcgccgcagcgcagccgttggccgcggaggctgcggtctccttcgccagatgccgcggcttcgggaggtccgccaccgctgcgactgccgcctggttttggcgcaaccatgccgttgcctcacagggagtgaaagctcccatggatgctgatgtcaagaatgctgtcatacctcctacctcaccaaaggtggaaagtggctctccttcagaaatcactctggatgaatttgaagacttgagcgctctatgcaagaatgatgattctactgttagcatcacagtagttggagcatctggtgaccttgccaagaagaagatatttcctgccctttttgctctctactatgaagattgccttcccaagcatttcaccatctttggctatgcacggagcaagatgacagatgctgaactgaggaacatggttagcaaaacactgacttgcagaatagataaaagggaaaattgtagcgagaaaatggaagagttcctcaaaagatgcttctatcattcaggccaatatgattcagaagagcatttcatagatctagacaagaagctaaagcaacatgagggttccagagtttctaaccgccttttctacttgtcaatacctcctaatatattcttggatgttgtaaaatgtgcaagcaaatcagcatcttcggtgaatggttggacacgagtaattgttgagaagcccttcggccgagactcagaatcctctgctgcattaacaagcggtctgaagcagtaccttgtagaggaccaaattttcaggattgaccattatttgggaaaagaactggtggagaatttgtctgtcctgcgcttctcaaatctcgtttttgagcctctctggtcaagacaatatataagaaatgtgcaacttatattctcagaagactttggtactgaaggacgtggaggatactttgatggctacggtattattcgagacataatgcagaatcatctcattcagatactagctttatttgctatggaaactcctattagtttggaagcagaggatataagaaatgagaaggttaaagttcttcgttccatgaagccgttgcagctggaagatgtggtcgtaggacagtataaaagtcacacaaaaggtggtaccacataccctggctataccgatgataagacagtgcccaaggatagtgtgactccaacgtttgctgctgcggcgcttttcataaataatgccagatgggatggagttccctttcttatgaaagctgggaaagctttgcacacaaaacgagctgagattagggtacagttccgacatgttcctggaaatctctacaaggggagttttggcacagatcttgatagggccactaatgagcttgtgatacgtgtgcaaccggatgaagcaatttacctaaagattaacaacaagattcctggtctcggtatgcgactagataggagtaacttgaatctccattatgccgcaaggtactcaaaggagatacctgatgcttacgagagactcctgcttgatgccatcgaaggagagcgcaggcttttcatccgctcagatgagttggatgctgcatggtcactcttcacacccctcctgaaggagctggaagagaagcggatagctcctgagctctacccatatggaagccgtggacctgtcggggcccactatctcgccgccaagtacaacgtaagatggggtgacttgagtgcggagcactacaaggcatgaaacgaagatggctatatctttgtgatattcttgcttttccatttctgtaagtttgcacgccctcgcagtgagatagatttaagagagaaaaaagatgagaataaggcgggcagttaactaggttggaaggcatgtatccattactagactgaatagctttgttggcataattgcagctgttagggctagtttgcaacctcatgtttccaaggaattttcattttcccaaagaaaattagtttatttttcctttggaaaatgagaatctcttgggaaaatttagttgccaaactagcccttaaaaatatgttgtcaaggaatcagttcatttttcacaggaacagtaaaggaaacggaaaaaaattgccgcatttcaaggcctcggaagtgaccattgatgagtgcaagaaacggttgacatgtttcaactagttaacatttgttggtctcatttgttggctacttcacatgtgtagacgttcaggttggcaagtcggttaggttccgcttcaactagttaacatttgtactgaactaaatgaacacgctgagaacaactatctcgtgggatttgattaatcgttctgtttgtaggctactctaacatgtaaagacgaccttagtgaagagttgagacacgttacaaggaaacaataactgtaggctt

SEQ ID NO: 97960 - DNA, 1384 bp, Zea Mays
gctacagaagccatctgcacgctgcaacaacagcctctacgctacggttccttctatcctgaaggggcacgctactcccattccgccgcgcccgtagtcgccggtcctcttgctgcttcgtgctcccgcgcaatcagtgaatacctccacgcgcaacgccgcccgtcgactcctccatggaagctgatccgtcgccgccgtcggcgtgcgcgctgactgagtagctcgtggagaaggtcgtgctgcgcaccccatctgctgacccggcgatcctcgtccatgctgcactcgtctgcgcacgctggcgcatcgtgaagggcccgcggttgcgccgatgctgccgcaaccttcaccgcgagtgcgagggtcgcagcccccgatgcttggcttcctccccagcgccggcgcggggattcgcttcgtgctcacgtccaccttcggccccgcacgctggtggatggcgcgtgctggtcaccctccacggctgcgccctcctgtgcagtaacaccggcctccacgcgtccgtcgactgtgagcttgttgtttgggatcccggccgccggacataatgttgtgggacccacaggctggccggtaaaacggttggcctttattacttccgacgggccgaggcggccgtcagagataggttatttccgacggcggccgtcggacataaggctattttcgacgccttatgtccgacggcataaaaccgtcggacataggttatctccgacggttcaatccttatgtccgacggctttggccgtcggaaattgttccttttactgtagtgcatatactcgtcggaggagggcgtatcactttttctggtcagcagtggcattccgaattttaagccaataatattgaaactaaagataatggtgcatatagcatcaaatatgcccaagtggtcaaatctgcaattctgatttctgaatgtgaactctattttgctagaaacctcagattctgaagttgataaactgtccttggggtattcgaatttgttgttgcagttaactctgaataccgcacagcagctaaggttataacttagaactcaagctgatagctggacgccaacttatcatccttgttttgtacttcagtaagttcatctatccattgcaaaatttctcacactaattttggttagtgcagctgattgatgcagttaaagagctggacgaatagatgagatggataagaagcaggttgaacttcctctgaagcaactggaaaccatcttgacataataaaaccaagctctaatatcattgtaagaatctatggtaggttttgttagttttactgataatgtttttcctctcatttattgctaatgaatggtcaatgaaaaaccaaaattttccat

SEQ ID NO: 97961 - DNA, 891 bp, Zea Mays
gagtagtaattagtttgttcccgtgtccgtgttttggttgaataataaattgacgaaagagggccacgtatagcttagagagaagctagctagctgaaatggaggctagcagccgccgccgcgtctcacttgtgccactgctgctggtgatcatcgggtgctgtgcctgccgcgcccagatcccgatcccggcgaggacggacgggttcgtgtacggcgggaagccgccggcgtggggcgagacggtggtggtagaggcgttcttggacccagtgtgccccgacagccgcgacgcgtggccggcgctcaagaaggtcgtcgagcactatagctcacgcgtgtccatcgtcgttcacctcttcccgctgccttaccacagctatgccttcattgcgtgccggtcaattcatgcggtgaacaaactaaatccgtcgttcgtgtaccgtctgttggagaagttcttcaaggatcaggaacgttactataatcagccaacatacgaaaaatcaagagctacagtggtacggttgatgaaataaccaagaaccttgttgtgcccatcatcggtgaaactaatttggcggcattcagagcaggttttaacgattcacattctgatcaggctacaaggatatctttcaagaacggctgtgcacgaggtgtgaccgggacaccctacttctttgtgaatggcatacccatcaacgattcaggttctcctctggaatacaaggactggatttctatcctgggtcccttggttggaaagatgtagcgcggttgctagtttgttcatcaataaagtcctagtagagagtaaacagacaaaagctgaataataaataacattaatcagcatcgtcattctcagaataaaaagagtgctaactc

SEQ ID NO: 97962 - DNA, 853 bp, Zea Mays
gagtagtaattagtttgttcccgtgtccgtgttttggttgaataataaattgacgaaagagggccacgtatagcttagagagaagctagctagctgaaatggaggctagcagccgccgccgcgtctcacttgtgccactgctgctggtgatcatcgggtgctgtgcctgccgcgcccagatcccgatcccggcgaggacggacgggttcgtgtacggcgggaagccgccggcgtggggcgagacggtggtggtagaggcgttcttggacccagtgtgccccgacagccgcgacgcgtggccggcgctcaagaaggtcgtcgagcactatagctcacgcgtgtccatcgtcgttcacctcttcccgctgccttaccacagctatgccttcattgcgtgccggtcaattcatgcggtgaacaaactaaatccgtcgttcgtgtaccgtctgttggagaagttcttcaaggatcagagctacagtggtacggttgatgaaataaccaagaaccttgttgtgcccatcatcggtgaaactaatttggcggcattcagagcaggttttaacgattcacattctgatcaggctacaaggatatctttcaagaacggctgtgcacgaggtgtgaccgggacaccctacttctttgtgaatggcatacccatcaacgattcaggttctcctctggaatacaaggactggatttctatcctgggtcccttggttggaaagatgtagcgcggttgctagtttgttcatcaataaagtcctagtagagagtaaacagacaaaagctgaataataaataacattaatcagcatcgtcattctcagaataaaaagagtgctaactc

SEQ ID NO: 97963 - DNA, 1038 bp, Zea Mays
ggccattagtgctggtgtgtgtggtggttcgtcgatctcctgctaggtgctaagcttagctcgctcgctggcaacaacaatgaaagccgcaactggctcatcatcagtctctcgcgctcttgcgttgctcttggcggcgtgccttctctggaaggaagccgcgtgcttctcggcgtccgggctaaacaaggcgttcgccaccttctatggcggtagcgacgcttcaggaacgatgggtggggcttgtgggtacggcaacctgtactcgacggggtacggcacggacacggcggcgctgagcacggcgctcttcaacgacggcgcctcgtgcgggcagtgctaccggatctcctgcgactaccaggcggacccgcggttctgcatccgcggcacgtcggtgaccatcaccgccaccaacctgtgccctcccaactacgcgctgcccaacgacgacggcggctggtgcaacccgccgcggcagcacttcgacatggccgagccggcctggctcaagatcggcatctaccgcggcggcatcgtgcccgtcaactaccaaagggtgccgtgtgtgaagaaaggcggggtgaggttcagcatcaacgggcgcgactacttcgagctggtgctcatctccaatgtcggcggctgcgggtccatccagtcggcgtccatcaaggggtcgcgcaccgggtggatggccatgtcccggaactggggcgtcaactggcagtccaacgcgtacctcaatggccagagcctgtcgttccaggtcaccagcagcgacggccagaccaaaaccttccccgacgtcgcgcccgccagctgggggttcggtcagacgtttgcgacctcgcagcagttctcttagtatagacacatctttgttttctgcctcgttcgcttgtcgtttatatatatgcctcactcggctcggccctcgatcaatgccttgtaaagtttaccggcctttgttcaaatgccccaccacctgccgcgatgcaggagatatatgatatatatgctttgacttgtgcttaa

SEQ ID NO: 97964 - DNA, 1481 bp, Zea Mays
agaagaaacatcttattatgtgtttcagtaatatacgtccagagtccaaactccaaactcaattcaaattcaggctcatacaaacatgtgtacttctgttgtggcgatcgagcataaatttacattaattagggaatgttacaagcagctaatcttccccttggtattatcacacgatacataccgccccaacatttgcattttgctgttaaataagatgtcgttcagaattcacaacctgaaatcagctagagcagtcttctgttttccatccaagccaacagagtagtaacgtgcaacatactctctcacgagtgtttccctatacaaaggagggttctcctcggacagcagctccttgattgggccatacgttcttgtcgaagcgggatggaaatgggtgctgaaaaagcacgcgatcgaaactcttggttcagcattcttggctaccaccctgtgctcgacgctgctgaacttgtcgttagagaccagctgaagagcaatggagacaaatcagtgtcaaagaaaaaacacactcaattgtattcaactgtctgtgtttttcagttgatacttggatgatctcatcttacctgcaagagatcgcctatgttgacgatgaatgctccaggcgtcggtgcaacgtcgacccactgaccatcatggaggatctggaggccgccaactttgtcctgcagtagtatggtcaggaagccggagtctgaatgccggcttgtcccaatggcgagttcaggctgggggcatggagggtagtagtgcccaagtataatctgtccctggtcgcactcaatatctgtcaagtagctcggtttgagcccgagggattcggagagcagcccaaacaacctctgccccaaatctttcacttgtttggcgtattcaaacaatgctcaccggcagatctccggcagatcgtcggcggcgggagggtcaggtgccatccgcaggtagaccgtgtcgcgccagttggccacgggagactggtacaggtcgaagttgcagtggtacttgaccgccctcccgggctctcgcgagtagagccgcgccttgtcgctgccctccccgccgtcggcttcgtggaacgcccgcatcgccgccacggctgctgacatcacctgctcgggcaccgcgtggcccgtgacctggaagaacccccaccccgccgccgccccacggacggcgtcgatcacggctgcgcggtcgccgctgagatcgatcaccgggacggtcgccgccgctggcggttgttcatggtggagtagctcctccgggtaggggacgcgaaagatgcgaggaacttgcttcgcaccagacgctacaaggccgcggacgccggcgagggtgtcgtccagcgcgcggagctcatcggcgcggcccaaggcggcggcgacggacatatgcgtctgctgcaggttgcagctacagctctcgatcttggaggagccgtgtgccggtgtgcg

SEQ ID NO: 97965 - DNA, 2118 bp, Zea Mays
atgaggtgcgtcgcgtggtgggcggtccttctcgcggccgcctcgttggttggcgcttgggggaaccacactgtatcggcgctcacgttggtatcggagacgtggtacgatgaccgcttggcgctggttcctgttgagtttggcggcggtgacggcgaggatgccgcggggcttcgcagtgagctcccgtgccagacatactccgcgaactcgaggtcctgcgaggaattgaacggctccgggtcgttcaacaccacctgcgtcataagttccagctcttcgctggacggtgatctgtgcgtatatggcgacgggagtgtggagattcggccccatgtcaagatcatctgccccttcagggggtgctacatcaccgtcaatgtctcagggagcgtcaggattggtgagcatgttgaggtgattgcagggtcggtaagcctgtacgcggccaatgtgtcgttggatcaccactccaccatcaacaccactgcactcgccggtgagcctcctcctcagacgagtgggacgccgcacagcctggaaggggcaggtggtggacatggtgggaggggtgcatcatgtaaagtgtcaaatgacaccaactggggaggtgatgtgtacgcgtggtcgacattggattggccttggagctatggcagcatgggtggcagcatgtccgccggtcagtttggagggtacggtggaggccgtgtcatgcttaggacatccggctttctgaatgttgatggacaggtgcttgctgaaggtggtgttggcagtctcaagggtggcggcggctctgggggaagcattataatacatgctttcaagctatctggaaatggcacaataagtgctgctggtggtaatggatggggtggcggtggcggtggaaggatatctctggactgttacagcattcaacaagatttggaaataacagttcatggtggccagagttttgggtgtgctcagaatgctggtgcagcaggtacaatatatgatagttcactgcagaccctaaaggtcagcaatgggaatttcaccacacgcacagaaactccattgcttggtttcccaatgactagactttggtccaatgtgcttgtggagcgctatgcaaaagtgctggttcccttgttgtggtccagagtacaggtgacaggtcaaattagattactaaccaagggtagtatctgctttgggttatcagaaaatccaatatcagaatttgagctggttgctgaagaacttttaatgagtgactctgttataaaggctagaaacaaatttgtgtgtgcttgcattgttctttctatattcctaatttttcctcttatggaaggtctatggagctttcagaatattgatggcggtgctaaggatgttgttcttgcatctatgcttgaggcaagaaaccttgtagtcctcaggcatgggtcagtgatatcttccaacactgatttaatggtatatggacaaggacttcttaacttgagtggccctggtgatggaatcaaagctaagcgactgtttctgtctctattttacaacattgaggttggccctggttcccttgttcaggctccactcgacgaggctgttccaagcaacttggatgcactttcacgctgtgaaagtaaaacatgtcctagtgagcttattaccccacctgatgattgccatgtaaaccgctccttgtcatttacactacaaggtgagcttttggaaggtgaaggccatggcaggcgagctttggtccttgggcaaggagctgtccgattgccatctcgtcctcaccatgcttcggatgctgaacaagaagttcgagcacatgaaggcactaatcaagcgcatacatccgtctcgttccaggttgtctgcatggacctcaacctagaggaacttgacatggaggagacagtgggcaaggacaccgccctctacatagatggcgtgcgacctcagcagccgcaagctgtaccttctgtctccatgctgccaccatcctacacgcccttttgtggccctcgttcatatgcttctgttgccagcaataaaaacaaggggaagggcaagggcaagggccacaactgccaactgctttcaaaagtttag

SEQ ID NO: 97966 - DNA, 432 bp, Zea Mays
cccccgcgctgcaagtatttcatttggcttgcatctctcaatcgatgttggacggctgatcgactggcacgtcatggaatggatcatccagatagttgtcccttgtgtgatcagcaggatgagacagtgcatcacttgctggtggattgtgtttttacgagggaagtttggtttagaacactaagcaggctaggtttgcaacatcttgctcccacgtctgatgctacagggtttcaagattggtggagtgaggcagaaagactagtgtctaagcataagaaaaaaggtttcaactctattgtaattttagtagcttggcagatttggaagcatagaaatgcgtgtgtgtttgacaatgcttccccaaacattcacgcaattttgctgtccatccatgatgaggctttattatggggtcttggaggggctgct

SEQ ID NO: 97967 - DNA, 2376 bp, Zea Mays
ttgcagatttgtcgtgttgaagacataactgtcagtggcatagttaggggaagtataattcatattcatagagcaaggactgtgactattgcaaaggatggcacaattagtgcctcagagttaggttgcaaggaaggcatcggaaaaggaaagtttctcaagtatggagctggtggtggtgctgggcatggaggccgaggtggcacagggatttacaatggaatgagaagtgaaggaggcctagaatatggcaatgctgatcttccatgtgagctaggaagtggtagtggcggttctgctttgtcagcagataacactgccggtgggggattaattgttattggatccatgaaatggccactttcaaggttgctagtttatggctcgctgaactctgacggggaaagccatagaggcacatcgggaaattcaaatgggacttttaaaggtggagttggtggtggttctggaggatcaattcttttatttcttcaatggtttctgctagagaaaaactcatcattatcggcatctggtggcaatggaggtgtatacggtggtggtggaggtggtggtggtagaatacatttccattggtcatatattgctactggagatgaatatgttcacattgcttctgtcaatggcacaatagtatcaagtggtggatctggtaagaatgatggacattgtggagaagatggaacagtaacaggaaagaaatgccccaagggcctatatggaacattttgcactgaatgcccagttggtacatataaaaacgttgttgggtccaattcatctctgtgcatcccgtgttctgtggatagtcttccaaaccgtgctgaattcatatatataagaggtggtgttaccgagctgccatgcccgtataggtgcatatctgataagtacaagatgccaaactgttacacaccacttgaggaacttatgtatacttttggtggtccttggtctttttcaatcatcctttctttaacagttattcttttggcacttgtcttaagtgctctaagaattaagattggtgagagtgatatcacctaccgggcaactaatgcaatccacaatgatggttgttctttcccctttttgctttctttggccgaggtaccaggggcaagcagggcagaagaaactcagagccatgtccacagaatgtacttcatgggacctaatactttccgagagccctggcatctcccctactcacctcctgatgcgataattggaattgtttatgaagatgctttcaaccgttttattgatgagatcaatttggtggctgcatatgagtggtgggaaggatctatacatagtatactttctgttcttgcgtatccttgtgcctggtcttggaagcaatggcgcagaaggaaaaaaaaccatcgtcttcaagagtatgttaaatctgaatatgatcattcatgtctccgctcctgcaggtcacgggctctctataaaggcttgaaggttggttcaactccagacttgatggttgcgtacatagatttctttctcgggggtgatgagaaacgacttgatgtagcatccaccattcagaagaggtttcccatgtgtctaatttttggtggtgatggaagctatatgtccccatactatctacatagtgatacattgctatcaaatcttcttggccagtatgtatctactgcgatctggaatagattagtcgctggtttgaatgctcaattaaggacagtaagcttcaagagtagagaagacaatgaatggtggatactgcctactatcctttttctcatcaaatcactgcaagctggactagttaactggcacgttgccaatttggaaatccaggactactcgttatttagcccggacccagatagattctgggcaatgtagtcgcctgcagcaagctaagaattgcagaaagcatggtttagtgatcgcaagaatggcaagtattaattattggatgctgaatatttgcgttttgtcccttgcaacgtcatcagcccaatacaatctctgaatctgaaggggtctaacacgctggctggaacttccttctatttatgggaagcgctcctgcgtagtgcactagtgcagatatgttcattttctttttctcagtttttttcccgtcttggtcgtgtgcctagaataggtctgtcgctcggtggggattagatttgtgcattttctttggttcaaattaaaccgttgattcgagtgtacagcaagaaactattgtgattgtcgctctagatgtacatcactgtaagtataatagtagaaccatttcaactgtatacaatcctcaaaggaaagtatgtttctttctattttctttttcctattgtcatcgtt

SEQ ID NO: 97968 - DNA, 2863 bp, Zea Mays
atctttccctctcctgaattcagtgcatttggtatcaaactgctttaattgctgaacattttcacttccagttattggatccatgaaatggccactttcaaggttgctagtttatggctcgctgaactctgacggggaaagccatagaggcacatcgggaaattcaaatgggacttttaaaggtggagttggtggtggttctggaggatcaattcttttatttcttcaatggtttctgctagagaaaaactcatcattatcggcatctggtggcaatggaggtgtatacggtggtggtggaggtggtggtggtagaatacatttccattggtcatatattgctactggagatgaatatgttcacattgcttctgtcaatggcacaatagtatcaagtggtggatctggtaagaatgatggacattgtggagaagatggaacagtaacaggaaagaaatgccccaagggcctatatggaacattttgcactgaatgcccagttggtacatataaaaacgttgttgggtccaattcatctctgtgcatcccgtgttctgtggatagtcttccaaaccgtgctgaattcatatatataagaggtggtgttaccgagctgccatgcccgtataggtgcatatctgataagtacaagatgccaaactgttacacaccacttgaggaacttatgtatacttttggtggtccttggtctttttcaatcatcctttctttaacagttattcttttggcacttgtcttaagtgctctaagaattaagattggtgagagtgatatcacctaccgggcaactaatgcaatccacaatgatggttgttctttcccctttttgctttctttggccgaggtaccaggggcaagcagggcagaagaaactcagagccatgtccacagaatgtacttcatgggacctaatactttccgagagccctggcatctcccctactcacctcctgatgcgataattggaattgtttatgaagatgctttcaaccgttttattgatgagatcaatttggtggctgcatatgagtggtgggaaggatctatacatagtatactttctgttcttgcgtatccttgtgcctggtcttggaagcaatggcgcagaaggaaaaaaaaccatcgtcttcaagagtatgttaaatctgaatatgatcattcatgtctccgctcctgcaggtcacgggctctctataaaggcttgaaggttggttcaactccagacttgatggttgcgtacatagatttctttctcgggggtgatgagaaacgacttgatgtagcatccaccattcagaagaggtttcccatgtgtctaatttttggtggtgatggaagctatatgtccccatactatctacatagtgatacattgctatcaaatcttcttggccagtatgtatctactgcgatctggaatagattagtcgctggtttgaatgctcaattaaggacagtaagacaaggaagtgtccgttctactttgggccctgttgtttcttggatcaacagtcatgggaatccccaacttgagagacatggtgttcgagtggagttagggtggttccagtccactgcttctgcatattaccagcttggtattatcgtagctgtgaatgagaacttctacaagaatctccgccaccatgagcatgccacagaattttgtgaacgctcaaggaagaacgttgcagttccacttcaggatttcaatcaggcaaatctggatcagccttgcacaagctatgctgtttctagaaagcgattgacaggtggagtcaatggtgggatcataaatgagggaacgctcaagtcactgcactataaaagagactatctctttccattctcattgttattgcgtaattccaggcctctaggctatgcggaaacattgcaattgctcatttgtattgtacttctgggtgatttctccatcaccctgcttatgcttgtacagtactattggatatctgtcggagcttttcttgccatactgctcatcccccctcttgctttgctttcaccttttcttgctggtctcaatgcactttttagccgaggactaaaacgatcttcagtgacccgcatttttgcactttggaacattacttctgttgtaaacattattgtagcaatcatatacggctctttgtatttttggctctcttctttggcggtgtcctcagttcatcaagtatacaacacaaaaagcttcaagagtagagaagacaatgaatggtggatactgcctactatcctttttctcatcaaatcactgcaagctggactagttaactggcacgttgccaatttggaaatccaggactactcgttatttagcccggacccagatagattctgggcaatgtagtcgcctgcagcaagctaagaattgcagaaagcatggtttagtgatcgcaagaatggcaagtattaattattggatgctgaatatttgcgttttgtcccttgcaacgtcatcagcccaatacaatctctgaatctgaaggggtctaacacgctggctggaacttccttctatttatgggaagcgctcctgcgtagtgcactagtgcagatatgttcattttctttttctcagtttttttcccgtcttggtcgtgtgcctagaataggtctgtcgctcggtggggattagatttgtgcattttctttggttcaaattaaaccgttgattcgagtgtacagcaagaaactattgtgattgtcgctctagatgtacatcactgtaagtataatagtagaaccatttcaactgtatacaatcctcaaaggaaagtatgtttctttctattttctttttcctattgtcatcgtt

SEQ ID NO: 97969 - DNA, 411 bp, Zea Mays
gaggagctcgacaacccggtccctaaggagcccatcatgttcctaaagccgacctcgtcgttcctccatgctggcgtggccaccatcacagtcgagatcccagagacgctcgagtctctacaccacaaggtcgagctcgttgtagtcatctcccggcgtgggcgtgacgttcctgaggcgtccgccatggacttcgtcagagggagaaaagtttgtgcgattgtgtcggcgtttcgagacaggggggtccctaagccgacgagtgagtgtgctgcgtgccccagcccagatgggtcgagcgcgtgggcgagcgcggaggggggagaggcgaggcgcccgagccaaggggtcgggcgagggcggaagtcgttcggccgaggccagggcggagtccgagccctggggtcgggc

SEQ ID NO: 97970 - DNA, 2048 bp, Zea Mays
cccaaaacgccgctaccccctctcattttcttcctcgtctccacctccttctctcctcctcgatacatccgagcacgccgaacgctgtcggaaggcacaaagcggcgagcggcgccgggcttcccctctctttctcgcccccgatctgcgccgatcggggcgaccgctctctggggacgccgatcgaaggtcgggcggcgatgcttccgatatacggaagcagtttctagttttcttcagttggtcgccacagtttccagcgctttcagccagttgtctaataacttgttgttgttgttgtacttaagattgacacgcttcgtgttgtaaagcattgccatgtttggggcatgacttgtttttgttgaaatcaattgacttccaaggggtacactaaatccttgatgcaacataataggatcaccgtactgtcttcctcagagaccttccaacttggttctagttccagcaaccctgtcatggatcatcagaatttacttcccaacaactctaatgtggatgaacagattttactcccaaatgcattagagcatgaggactgcccacactatttgctcaacggtcatgatgtgggtgtgccaaatggaagcttgattggtcagcaaaatacaagcttgagcttgtgggaaccagctggatctagctcaatgagctgcttagttgatcatgacaactttttccaggcaaaaagggagcatcttgcctcttctctgtctattggaggccccttaaatatagacaggaggagacatgaaggcactagttcattgcctttacacaacctaaacatagacctcaacattaatcaggctgatcaatttggctctgatgatgttgatcttgtacatggtaatggacaatcaagtgcaaatactgtcacagcccacaggggctctttcataactgatcatattatgcatcatggagtttcttcagatgctacaggaagttcatcatggaatgcagaatgttttaatggtgcagcaagccagcacagtcgtcatccagcttttaagagaaagtatcttgatggatgtcaatgtcatgcagagtcttctgctaatggaagctcacacaattgtcaccagaatgatagtactctgctacctcttcggaccacctgtgaaagtttgactatgccaaccacgacaaattttagtgttccacatcctcctgtggaacagctaaaccagagcactaatatttctgcaaattctactttgattgaccactattcttcttatagtggtccacatgcaaacgaattcatgcgaaatacacggatgcgaataaaccctagtgattatgatcaatcactgcccagccttttacctgaagggagtttcaggtgcccagcttatcagcatacacagcagcagtcatcatttaggccagtgcaacctagacaagtgagctcttctggttctcatagtcgacctcacttgcctgttgttactcaattttcgcaaaatcttcaccgtccttcagcaaatattagttttggatcaaggattgggagttcttccagttctggttctacagtactgatacctgcttcacaagatcccagtacaagcttgataggaagtgattttcctgagccccttttgttaggttctttgtttacagctgattcaacaaatttcttatctgcatctggaaacagaagtaaccagcaaaattctggatccagctctagttccatgcttagacctgctgtaaatgttgcagctcaacaagtccctgggttcaacgtatctcagccaagtacaactctaagaggttcagctgatgtgtctaggaggtccttaactgctgctggtgtttctcattttagaagttcaagcatggcattgcagcaccgtgggacttcatccacaccgcatgagattcggagtcaccagccaggatcaagctctcgtgcccatcagcagtcattaagacctggtcattcctcgatagacaggcagagctctggttacttggaccttcagtcttttatgcagtccatagcttcaagggaagga

SEQ ID NO: 97971 - DNA, 1919 bp, Zea Mays
cccaaaacgccgctaccccctctcattttcttcctcgtctccacctccttctctcctcctcgatacatccgagcacgccgaacgctgtcggaaggcacaaagcggcgagcggcgccgggcttcccctctctttctcgcccccgatctgcgccgatcggggcgaccgctctctggggacgccgatcgaaggatatacggaagcagtttctagttttcttcagttggtcgccacagtttccagcgctttcagccagttgtctaataacttgttgttgttgttgtacttaaggatcaccgtactgtcttcctcagagaccttccaacttggttctagttccagcaaccctgtcatggatcatcagaatttacttcccaacaactctaatgtggatgaacagattttactcccaaatgcattagagcatgaggactgcccacactatttgctcaacggtcatgatgtgggtgtgccaaatggaagcttgattggtcagcaaaatacaagcttgagcttgtgggaaccagctggatctagctcaatgagctgcttagttgatcatgacaactttttccaggcaaaaagggagcatcttgcctcttctctgtctattggaggccccttaaatatagacaggaggagacatgaaggcactagttcattgcctttacacaacctaaacatagacctcaacattaatcaggctgatcaatttggctctgatgatgttgatcttgtacatggtaatggacaatcaagtgcaaatactgtcacagcccacaggggctctttcataactgatcatattatgcatcatggagtttcttcagatgctacaggaagttcatcatggaatgcagaatgttttaatggtgcagcaagccagcacagtcgtcatccagcttttaagagaaagtatcttgatggatgtcaatgtcatgcagagtcttctgctaatggaagctcacacaattgtcaccagaatgatagtactctgctacctcttcggaccacctgtgaaagtttgactatgccaaccacgacaaattttagtgttccacatcctcctgtggaacagctaaaccagagcactaatatttctgcaaattctactttgattgaccactattcttcttatagtggtccacatgcaaacgaattcatgcgaaatacacggatgcgaataaaccctagtgattatgatcaatcactgcccagccttttacctgaagggagtttcaggtgcccagcttatcagcatacacagcagcagtcatcatttaggccagtgcaacctagacaagtgagctcttctggttctcatagtcgacctcacttgcctgttgttactcaattttcgcaaaatcttcaccgtccttcagcaaatattagttttggatcaaggattgggagttcttccagttctggttctacagtactgatacctgcttcacaagatcccagtacaagcttgataggaagtgattttcctgagccccttttgttaggttctttgtttacagctgattcaacaaatttcttatctgcatctggaaacagaagtaaccagcaaaattctggatccagctctagttccatgcttagacctgctgtaaatgttgcagctcaacaagtccctgggttcaacgtatctcagccaagtacaactctaagaggttcagctgatgtgtctaggaggtccttaactgctgctggtgtttctcattttagaagttcaagcatggcattgcagcaccgtgggacttcatccacaccgcatgagattcggagtcaccagccaggatcaagctctcgtgcccatcagcagtcattaagacctggtcattcctcgatagacaggcagagctctggttacttggaccttcagtcttttatgcagtccatagcttcaagggaagga

SEQ ID NO: 97972 - DNA, 718 bp, Zea Mays
cacagatccgtaatgtttttgatcagattcgtcaggggagaaatgcaagattggaggatttgcttctcattgatcggtcacttattatgagacgcgcaaatttgattgatagacatcgggatatgcggcttgatgtggataatatgtcctatgaggaattgctcgcactaggtgaacgcattgggtacgtaaacacaggacttagtgaggaaaaaatcctaagtaacttaaaacaacggaaatatgtcttaatatcattggaagatcctccaacaggtgttgaaccatgttgtatttgccaggaagactacgcggaaggcgaggacttgggcagactggactgtggtcacgacttccacaccgcatgcatcaaacaatggctggttataaaaaatgtgtgcccaatctgcaagaaaacagcactggacgcctaagacatggctgcattttccctccctagggaaaatccggtagccggcactaagggcaagtggttgtcatctaaccacaccatgcacccaaagactagcaactggttacaagcatgttacaccttcccattatcaacacacatgtgggaatttatactataggtggtacatggcacttacctgaagccaatggctgtagaccccggagtttcatccttgttttgtttaaacctagatttgggatttataatttattgaatgacattcgatttacttgggcaatcagc

SEQ ID NO: 97973 - DNA, 1853 bp, Zea Mays
gcctcctttaactctagcaattgcagttgtggtattgggacagttgaggatatctttgtatccactcacaagatttttcttcactctcaagattcctcctttaatctgccttgggcaaagggcacattggatcaactctcgcttgccaggctctacataataataatacttccagcctggatcatcagatttgggcttcctttttggaactttcagtggatcatatccatcactttgtatttgagaaccagctgcagatgcttccgtgctaaaatcagccatttcccctcttatccctgcttctgcaaataatgaaatgcatatgttcagaacacatcaagccagcaacaagattgtgctgtccactgtccaatacacagattaaccatgttaagtttaatcatgccagcaacaatgaagattgtgcttttacggcctatgctgtcgaacacctaggctgcagagaactacgggagcaagtttcatctgtgctgagaactatgggagcagagaattacggacacctggatgagaggtcaagttgccatagcttgcagagaactacgggagcagaagacgactcataccagaggagcattgggggcacataccagacgagcagcatacgtcggttggccgtcggcccggatcggtgcaggcgcgtgcttcctgagccggtggcgtgtgtgtcagggcggagcttcctgagccagcggcgcgtgcgttgtgcagaccttgccctagtgtgaggtggagctgagccgacgacgaggctgagcaccaggcgatggcggccaggcaccaggcgtcaggcgacgactgtaggccttgcgtactggactctggactctggaggcgctgcgacggctggaaactgagcagacttttgggagtggcgagagactgagatgggccgttgggctcaatttctaagaccgggccgggccaaatgtcacaggctagggataaaacgacgcgacgttccactgcaaatagcgtttaaacgctaaaacactacgtttaaacgtcataaaacgatgttttacgaccaattttaaaacattccaacatttaacagccctaacagcgttttgatgacgtttaaacgtcgttttaataaccatgcttggaaggtggtccctgctgtgtgttgagtgtccgcagaagcgttggcctgtctttctttttaattgttaatgggatgatgtgtggttgcatgttgcagcctgtcttttatatgtctgtggctgcgatactcttgtcaaagtttaggcgttactataataattgttttgggagcatctcttgttttgtttggtgctcttgcttagaacgggtttattgttttttcccaatctctttattgattctactgatgtaattccagacatcaatggtagctcattggcactactgaactttgttgaccttgaacattacaggaagactacgcggaaggcgaggacttgggcagactggactgtggtcacgacttccacaccgcatgcatcaaacaatggctggttataaaaaatgtgtgcccaatctgcaagaaaacagcactggacgcctaagacatggctgcattttccctccctagggaaaatccggtagccggcactaagggcaagtggttgtcatctaaccacaccatgcacccaaagactagcaactggttacaagcatgttacaccttcccattatcaacacacatgtgggaatttatactataggtggtacatggcacttacctgaagccaatggctgtagaccccggagtttcatccttgttttgtttaaacctagatttgggatttataatttattgaatgacattcgatttacttgggcaa

SEQ ID NO: 97974 - DNA, 209 bp, Zea Mays
gggacaagatctagattccagcaaggaggaggaagacgaccctgtcgccaggtcgcggaccgtccggccctatggcgcggactgtccggccctagggcgcggactgtccggccgtcaggcaggaaaccctagcctcgcgccaggtcgcggaccgtctggccctgtgccgcggaccgtccgcgcctgaccagagagcaccgccgccggtt

SEQ ID NO: 97975 - DNA, 1928 bp, Zea Mays
gaattcctaaggttttgggcggaatgggaatggctattctttctacttctcgaggtataatgacagatcgagaagctcgactaaacagaattgggggagaagttttatgttatatatggtaatggccccacctatagtacccaaattctatctcgaacttcctattttgaaaataaaaatagaaaaataggagaaaaatatatgacagaaaaaaaatagtagagaaaaaaaacccgagagaagcaaaagtcactttcgaaggtttagttacggaagccctacccaacggaatgttccgcgttcgcctagagaatgacacgatcatcctgggctatatttcaggaaagatccggtctagttctatacgaatactgatgggggatagggtcaaaattgaaataagtcgttatgattccagcaaaggtcgtataatttatagacttccccataaggattcgaagcgtaccgaagactcgaaggatactcagccacgtcttaaacgtatcttaatgcctgaaagttggataggctggcccttacgtaaggactatataacccccaatttctatgaaatacaagatgctcattgagtgataataaattcatgttcacttatacaacacaattccagattttattcaagtcaaggaatattttgaccttctgttcctagacgaaacgaaatacttagaatataatattctaattaattcctattatacaaaaaggtccagatagactgaacaaaaagggcttcatttctattttccaatttggaaaatcacatatttgtttccttcgtatgaacagaaaaatacaatgactcaaagaagttcctaccatgaactttgtaccgcgcatattacttagaacaactgggaaagtaggataagcaagaataaaaaaaaatatattcttcggaatagcggtatacaaaatttaataagaaatgcaaaatgaagaaaagggcacctaatctcacctctttctataccataaagaaccagagatttaaaccctttttttaaaagaaaaagaagtgtttagagatttatctacttactctagagatttatctacttactctagactaaagactaagtagatttttaataaatatttaccccaatccatctcaaaatatttgtatcaatatctattcagtagatccttttttctgtgccaggaaccagatttgaactggtgacacgaggattttcagtcctctgctctaccaactgagctatcctgaccctttcttgtgcatcatcttagtaaagtatttgcatctatgtcaattaaagggactaaaaaatcaataaagtattccattcaaaattaggaaatggggaggggtagtcctatgcattgtggatggcttacttaataatacttaaaaaacgaattaataatcgagattccttgtcgatactctactctaataaataaaaaagaaataaaaaagaaatcatctatttaatgaatagcataagattcattgagttcttgtcgcactcctttgtgaaagagtagaatgagaaagctagtgaatcttaaacccattgataaaagaaaaaaaggataacaactatggttagggaataaaagagggtttggggatagagggacttgaaccctcacgacttataaagtcgacggatagtcggcttttttttctatcgatgttctatgaacaagaatttctctttttctccgaataaaatggggaatccagggtctattatgtcgttttaccttacaattttgctagatacaaagcataaaaataaataatatatatacaaaaaatccagatgttgatgaaattccattttttgtgttactccattttttgtgttactttagtagattttactctgtttatcctttagtttaattctgtttgaatttcgctgtattctgtaatg

SEQ ID NO: 97976 - DNA, 1653 bp, Zea Mays
ctatacatgaagttgtttcgccttgacacacccttcgtgatgacgccacgtgccgtctctgattcccgccagaattgccactgagttttgaggccaaactcggtcgaaacccgtcgtctgtagcgctgggtggtttttcgaggatcaaccaccaaaccacagcgagtagcgcaccgtgtgtgtgcgtcccccacgtcctagacatgtgtctccccagtcctcgacaatgctggcaacaaggcccgctccgccacgtcctcacgtgagtgcatgtcccaggtgtcagccaccacggctagttacccgatgacactggtccctcggtcaagtcacagcactcgtcattcaccactcccgatccatcaccatgaatctgcatgaccttcactttcaccgtcgaccactgtacctgtgctccacacctgcacaccacaagcagccgagagacatggtggcacacatataactcacgcctcagttagtccacgactcaacccaagacgctacccgttgacaatcactcatcatcaacccgaaccataagagacaaattaaccttatttcgcaatacatctttaacatgtacgtttagttttttttctttagtcgtgtgtctatcacttagccatatataggctaagagttttgttccgtagtcgtgtattaacttgatgtactgctctaggatgcattaaaatcttctttttcaaagaaaaaaatctttcaatttctaggaacccaaacaacaatgccttatataaagagagagagatagggagccattttgagatattcttctactagcaaaaaatctgcactgctggtcaatagttttgcacacatgaatctgctgaaactacaaagtcatcattcggtatgccaaaatattgctccttcgcatcaccttccaaattcacagtaaactgactcaggcacaagacaccaccactaggggtagacaagaattgatcgcaaccggtcatttcaaattcatgagataacgctgcaacccaccatatattgcctgttgtgccaatttacaggactatagcaacaaggaattaatgcgtcaaaaagtacttggctcaaacagttttgcaccttctataaattggatgccacacaaacgaatgtgcgtatcgaaccaaccgaagatcattgctggcaaggagagctacgtaaccggttcatcaggctcacccaagatcagcaatgaagattcttgtgtgtgctattctcatgcttgtcctcatcggcaattgcactgcagagatgcccccgataatggctgcagaaaagagccgtgaccagctggtcgcaggacgagcaaagccatgtgtaacgttgaaggaggaacatggtactaataacaaaaacagtccaggaccaggagagcatgagcctcgccctacttaaaccatgtgtatattgacctaatttcccagaaaacttaaaccgtctacgtactacccgtcttagagacgatgacggtatatatgcgtgtgtaatctatctatctatctacatacatatataaataaaaatggatgcggctgtcaaaaaggggtggcacaatatgtacctcatctcgcctccaaacttccaggtcacaactcaccaagaatatgaattacatagaaaaaaattattatc

SEQ ID NO: 97977 - DNA, 108 bp, Zea Mays
atgtttcttgctgatggcaaatatcagaatctctcatttagaagaacacatccgacctggcatccaagtaactacctaatctataaataaaagacaaatataaacacc

SEQ ID NO: 97978 - DNA, 1570 bp, Zea Mays
caaatataaacaaaccatggggggcaagaagatccccagcaccacatcgtgttcaccactaccctccactgattctgatcaccggggcatcagtgacgggcacgtcttgctcctgccatacccgggagcgcaagggcacaccaacccgctgctccagtttggccgccgcctcgcctaccacggcctccaccccacgctcgtcactacgcggtacgtgctctccaccacgccgcctcctggtgaaccattcagggtggccaacatctcggacggtttcgacgattgcggcgcggccgcgtgcccggacctctccgagtactggcgccagcttcaggccatcggctcggtgacgctagcagagcttatccggtcggaggcctccgagggtcggcccgtgcgcgtgctggtttacgaccctttcctgccatggtcacggcgggtggcgcaggaggctggggtggcggcggtggcgttcctgtcgcaatcatgcgccgtcgacgtcgtgtacggggaggtgttgtcggggcggctgccgctgccagtggtaaatgggaaggagctctttgcgcgcgggctgctcggtgtcgagctcgggcccgacgacgtgccgccgttcgtggcaaagcctgactggtgccctttgttccttcgggcatcgctgcagcaattcgaggggctggaggacgccgacgacgtgctcgtcaactcattccacgatattgaacccaaggaggcagattatatggcactaacatggcgtgcaaagacaataggcccaaccttgccatcattttatcttgatgatgaccgttttccgttgaacaagacctatggtttcaacctcttcaacagcagcgagccatgtctggcttggcttgacaaacagcttccgcgttctgttattcttgtatcctacggtactgtctctaattacgatgaagcacagttagaagagcttggcaatggattgtacaattctggcaaaccattcatttgggttgtgaggtcaaatgaagaacacaagttgtccgatgaacttcgtgacaagtgcaaggaacgtggccttattgtttcttggtgcccccagcttgaagttctagcacataaagctacaggttgtttcttcacacattgcggatggaactcgacattggaagcaattgttaatggtgtgccaatggtggcaataccacactgggcagaccagccgaccatatcaaaatatatggagagcatgtggggcttgggtgtccgggtgcgcaaggatgagaaaggcttggtgacgagggacgaggtggaaaggtgcatcaaggatgtcatggatggtgatagtaaggataagtataggaagagtgccactatgtggatgcaaaaggccaaggcagctatgcagaatggagggagctcggacaagaatattacagaattcgccgcgaagtactcatcaggtcaaaaaaatatagtggcatagaattagtaggtgagcaatttgtagtcaatatttgttggaggtatcttctgaaatgtggagcgagccaaaagaaaatttatgacggaaccgtccaattta

SEQ ID NO: 97979 - DNA, 315 bp, Zea Mays
atggccggcggccaagtcgccatgacgatcgtgcttgtgctgcttgtggtggtggttgccgccgtgttgccgtctgctccggagctggcgtcgaccggcagcaccgaggtggctggcgagcggaggccaccgtcgctcgtgccgttcaggccgagacagcatggcggcagacggcagccgttgttccacgggccggcggccggcgggtgcatgccgagagggttccgcgtgccgccgtccgcgcccagtcggtacgtcaactaccacaccctcgacgccggcgcgtgcgctcacggccgtgccggaaagccatga

SEQ ID NO: 97980 - DNA, 126 bp, Zea Mays
cctattgcacttataactaatgatgatcttgtattggtaacattatttgtagtgattaattatatgtactacaccttctaattccatatgcagggtgtataagcgacacagttttcattataatgc

SEQ ID NO: 97981 - DNA, 603 bp, Zea Mays
ccgttgtcaaaggagttctgcggtcggattgggttccagatggcttgcaagatcacgcttaagacaaaaatggacagcgccagatcatggctggtgcatggtgctgcatacaagaactactgctgcctcgtcggagtggcctggaagagcttctgccaggagaacaggatcaagccaggcgacctgtgcaccttcaacatcatcgaaaccacactgtggcatgtcactatcacgcactgtactaacagaaagcaagaagggtcaccttgctcatccagaagagaggacaggaccaagaagggtggttcaagaagtaaaggaacaaaggaacggaaatcccctatggcatctttgaccaagcaggctccatcatacacaagatgagtctacggcattggaccactattttggatgatacggaaggagatgaataccaacggccctctcggaagttagtaggttcacgtcgttaagttacgtagcgctgtcaactagctaactttctaggggctatagtaagccgtctaactttctagagacccagtaagcctctaggatgttaatttgactagcattataaatgatgtttatttttattttaca

SEQ ID NO: 97982 - DNA, 1310 bp, Zea Mays
cacttgcttgctccctctcttctccccttcgtccaggcgccggatctgacacctctcccaccaccaagcttggctgcgctgccgcgcctcgcagatcccgatctccccatgcctcctcgcccccgctgaccccactgcggctgccgacagccacgatggcgtcgcgcccgcccctccgcactacctccgtcgcctccgtcttttcctccaccgactcctccacttccaccggcccccccggtggcgtcccgcagtccatcaccgcgctcctcaacaacccgctcccctcctccgccgcctcctcgtactcctggttgtcgtggccgcccaccaccataacgctacccgatgcggctccaccgccgccgtcgcacccctgcgagatcacccgcgccgacttcgcaccctaccttgccgccgtctccgaccccttcgcgcgcttcgccgacatccgcctccatgcccacgccgagcttgccgcctcttctgacgccgagggcgcccccgcggcctcctccggcctcgccgcctgtctccgtgaggtgcccgcgctcttctttaaggaggacttcgcgctcgaagacgggcccaccttccaggccgcctgcccgctcgacgacgatgcgctgcaggagcgcctcggacagcacctcgacgtcgttgaggcccaccttgtgcgggagatagcactccggtctgagtccttctatgaggcgcagggccggctgcgcgggcttgatggggagatcgtcacggcggtagggaggatccgcgagctcagagaggtggtccaggttctcacgggggacctcgtcggggcagcgaggcaggtgcaagagctcaatgctacccgaggcaaccttgtggcgctgcagcagaagctcactgtcatcctctatgttagccaggcgcttaccgcgctgaagctggtcagtgcattaccagacaactttgtcgttccttgcatcttgcttattgatcagtctaatgtagttgttcgaaatggtttgtatatattcactacgccatatattttcacggtctattacaaatgtcaaaatgtaaaatgtagtctgacatggaattacactagtatattctggaacttgttatatgaggaaaacttacagatgttttttttttggttgatggaccattgccacacctcgcaactaaaatggaaagaacatttccactctttgctagtttgcttatttgtgggcactgtaaatgcttattggaagcgtatcatgactttgttcgggggagttgatcttgtgcatgtgcttcataagcccatgactgcttga

SEQ ID NO: 97983 - DNA, 107 bp, Zea Mays
ctattagataggagttagttagataaaataagatgagaggagggactataaaacaactctgcacacctctatttggaatctatttggaatcaagtagaagcaactta

SEQ ID NO: 97984 - DNA, 195 bp, Zea Mays
atgaaagcttcaatcaaagcaacagtagcggaattactccctgttttaactgccagaccaatagattctgattcagtaactggaggcagagctaccgatgctgacgctggaggccagtccttggcaaataagttgcggagtctttcatctgaaggatttgttcaacttttatctgccattttcaggatagtacag

SEQ ID NO: 97985 - DNA, 1066 bp, Zea Mays
gactttgtattaaatgggtgcacatcaaatataaagtggctactatgtacatttacagcaagcagctgaagtgaaaagaatagttgagtggatcatgggaaaccttgatgaaacattaagtattgatgctagtaatcctacattacaacatggtggttcagttatttatgatacccaagagaatgactcttcacggggctctaatactcttgcacggagtacttccaagatcccatttgtccaaggaaaaataaatgatttttccattataagttcaataaagaatgttcgggctgatgtcttgagagaaaacactgaagcagttttcgcggcttgtgatgctgcccatggacgatgggctaagctactaggtgttcgtgctggattacatcccaggttaaggcttgaagaattcttgatcatctacagcataacagaagaatttatagctgctacagaaaagattggaggcaggttgggttacaacattcgtggaatcctacaacaacaatcaaagcaatttgttgattatcagcataatgttcggatgacaaaaatcaaggcagttcttgaccaagagacgtgggttgctgtggatgttcctgaagagtttcaagcaatcgttctttcactttcatccacttactcttctgttaatggcatggagatgcctagcactgatgataactcaaagttcagtgatcatcagcctacaagtcaagaactgacatattctgctgaaaataatgctgataatggcaaagtaacatccgggactggtgaaaaccaggttgaatccacttctcagagtgcaaataatgttgccgggaatctgaaatccaccttgcaaacaattgtacatggaggtgttggctatcatatggtaaactgcggtttgatactgttgaagatgttatctgaatatgttgacatcagtaaatgtttaccatcactatctttggaggtggtccaacgtgttgtggaaatattgaagcttttcaacactaggacttgccaacttgttctcggtgcaggggccatgcagaacctgagctgcatacattga

SEQ ID NO: 97986 - DNA, 1285 bp, Zea Mays
atggcaggagctttgcctttcattaagaggggaaaagaaatgtacaatagaagggagtttgacaagctcccgaggccttgccaaggttttgagtcatccgtccaatcctaccaaagccagcggagcctgagcgcacgtccaaacttctcaaggtcgaggaccccaagttcgcccaagtctttaggtctactcaccgttgtccaattgaccagtttttataagtttttttttgaaactgcagatatcagacgagtgcttttcctgaaaatacctgaagcacgcaaacagttgctaatgtctgagctggatagagtggctcaggactacaagatccatcgcgatgagattcacagtaaacttgtccagatcatgagagagaggctgcttgcaaatcttagaaaattaccccaaattgtggaaggctggaatgccccacaggataatgatgtgcagccgagtcaatttgctaaagctgttacaaaggaagttacctatttgcaccgtatcctttctcaaacactgcttgaggttgaggtgcaaacaatattcaggcaagtggttcaaatatttcattcacatattacagaagcatttacaaaattggaagtcagtactcctcaggcaaaggatagattatgccgagatgttcagcatattcttgcatgcatccggaagttgccagctgacaacttcagttcagaaactattccaaattatggtcttcttgacgaattcttggctgagaactttgggacgaaagttggtgaatgattgactgtacattaggaactgactcatgtctataaatgttcaatggtggaaactggaaactatgttgattgggacgtggtccaagatgttgccgtttttggcgtgaattctgtgcaggtattgctgtgcgggtttgtgaaaaaaaaatcagctgctctgatgttcaacaaactaacatgctgatcctcacacttcccgagatgaatttttgggtccacagctttgccatttcaggcaattttttgtttttattttgattcaatagtaatttgattcccgtttggcaagctgatatcggttagatgctggtatagaggaaacctgagttttggcagcacgacctaatctttgcatggtgcttcatgctgttaggtccactgtatcgaacatgccgttgagatggcaacccatgtattttatccctgtaatgtttgtaattattcttcctggtgcgaaagtaatcaattgttaaatgctaatgtaggcagaacttcaagctccgtcagtgtctatt

SEQ ID NO: 97987 - DNA, 2924 bp, Zea Mays
ttgaaagaaatgagaaccgtcaggctcttttaattgttctgaaggactctatacagttcatctcccagcgcggctaatgtgaccggtttctggatcaggccatttactcctgacctctggcaacgatcccggatgttgtcgtcgattcttgctgctagggcaataatcaacggcagccaactattgctactgaacttcctgatcgcgcgggctacttcgaatccatccatcgtctgcatgtcaagatcaagaaccaccagctggaaggacgactccgcagcgaaggagctgatgcattggacgccagaagcgaccgaaaggactcggcaaccaagcttctctaggagcctgtgagttacagctcggttggtgcagtcgctgtccgcaaggaggactctgagcccattaaagttgggaattgcggatgatctgtacaaatctgaggacgctccagagaccggagtcacaggttccaactggaactggaggactagcatgatagtttctccgatgcttttagaatctgatactgaccaaatattgccattcatcatctgcagcacaaaggagggctcgtatcagtaagcacactaatgattgcacatcaaatcaagtatacattggccacttccacaactggatgaacaaattgcaaaccaaaacataacaatcaaatagagtcgctgaggttcgggctactacaagcataccaattaaatatatctatgcaagtcacacatactacggaagaaataccataaaaatagttatgactaaaacgtaagttcaacataaggaccaatatgtcctctcagtatgcccagtttgaggtgagataataaatattccaagcacttgcacaaaaaggccacactatagccactaaacacattctgtagtttggcagttcaattggtgtatagcaaactatctatgtgacggccaagtctaagctgctagtgcctagctgtacaaaaaaatttgcgggtataaatgcttaagatattctattattttgatttacctgcacaatcttcttgcacatattgaagctaagccccatctcagaattgttgggtttggatccctgacttatctgactgcttgatgaactcaacagatagccctttgattttctaatcctaatctcaaatttcacacatacatagcccccagagaagtttgctcttcgcagcatccagtcatgattatgcctatcttcaacctcattatggacatttacatataatgagatacagccagcattacatcggtctgttagagtgcctaccatgtgcaggacaatatggaagactctcttctcatcaccaatgatcctttctggcaaagaattctccacttgaaactcaaactccacacccttgcaaccagttagacatctgaccactccaacaacttctttaatgaaggaatgaaggttgaacggcctcctgaccaaagacaagtgctcacagttcattgtcgatgtttgcatcacatcgttcatcagtgtggatgcaacactgcttgtcttggcaatggcatccatcacaagcctttgctctggattcatgctctcctgttgcatcattgagacgagaccaaggattgagtgcattggccttcgcattccatcgtacattgcagtctggaaggaattcctagcgtcccctgccctcatggcttcatcctttgcctgcagcaagtccctatgctgctcggcaagcttctctcgcatcagctgagactcctctaggagtgcagcatgtgacagagcgactgcaacttggtcagcaactacctcaacaatctccaactctcttcgaccccaccctaatgaaccatcattaggcaaaaccagaaccaagatagcatagctcgtctgcatcacttccggagtccctcctttgaaatttgacacccttaacatcggcatccttattgcagccacaggccctgcttcatgcttgcttcggctagaaacccctagcgccgaatctgggccaagaacttttgcatccttggttgcctttatttcttgaacatccggatcatcaataggaatcgagtgtttctgtgggtccattatatccctttccctcagctgatgtgttaagatcatcgtgctcctggtctcatcaggcatccagacagcacaattctgcagttccagtgccttcgagagctcaaccatggtggtgtacaagatggtatgtctgtcgagcgacttgcggatctcctgtgtgagcatgcgcacatgccagctcgcctcttctttccttttcatcctccccacctcccggtccagctcacgcgccttgttcatcaggaagttttccctgaccttcaccctcaggagctgtggtatcagcgtcagcagggtgatggccgtcgcgaaggagaccagtgccgtcaggaacttggcgacggtaagggcgagtacgaggtggaaggagtgcggctcgtaggtgaacacagtgatgaggtgcgtgaggccgcagagcacgatgaaggcgccgaactgcagcacgatccatttgagggggaagaggtcggagcaggtggcgaagtagagcagctcgagcgggatggagaagtaggccgcggcgatgaggaagtcgctgaccttctggcattgcaggatgttataggtgctggagagggcgccgtcgtcggcgtcgtcgcagccgccgcagtggccgaaatcgacagacgccgctgacggcgagaggagcagggaggagaggaacaggaggatccacgcggaggaaaccccgcgcagcagtgccgttcccaccaccatcggctctaccacctccaaccaggcttcattcagacgcgcatttgcgcatttctgaaccgactggaggcgcccgtcgtcgattccacgctgcgggtgccgacgctcctgcattcaccagacg

SEQ ID NO: 97988 - DNA, 967 bp, Zea Mays
gcgtgcacatgcatgattcacttagacacaaagtgttattatctagctagtctggctcagctcctcgctacgtacaggaccacaccgccggccacgcgtacgccagcaatggagagcagtagagaccacggccgcggcctcaagccgctgccagcgtggacgacgacgacgacgccggcgggaacgggacacagcttcagcctggccgccggctgcttcccgtggccgccgcagaggtcgtcgccgccgccgtcggtgtcctgctacacctgcggctactgcagacgggagttcaggtcggcgcaggcgctgggcggccacatgaacgtccaccggagggacagggccaggctcaggcagtgctgctcggcgtcggcggcagcgcacccttctgcttcccttccgagccccgccctgaccgcgcgccaccagcacagcagagctccgattcccaacctcaacttctcgccgcagcactgcgccgccggcggctcgatggccgccgccgaccccgtcatctacagcttattctcgacgacgacgtcgtcgtccaccgctgtggcaacgaaggcggcagttgaggtgagcttggagctggggattggggtctgcggtagaagcagcggccgtggcggtggtgtcgtcgaggacgacgggctggatcttgagctcaggctcgggtgcgcatgggagtgatgactgatgactgatgaggcacacgtacgtagtgtgtcgtcgtaagtgtgaaccatgcatgcatgcaggtcggtgtagtgtagggttaaattaaatggtcgtcgtagctgtcattatgtgaaccttatttccttttattttattacacgtgtcctccctcgctagctctcgtccatgtatgaactatgtgcgcccccgcagcagcattgccacgactttgctaattgaagtaaaaaaaaactttataatgttagtgtggtttgtggctcca

SEQ ID NO: 97989 - DNA, 230 bp, Zea Mays
aagggcattttctggaaggaggacatcatccccttcttccagaacgtgaccatccccaaggattggggcaccgtccagcagtgctacatctacctctctggacaagtgaaagagaagctgggcaagattgacccctactttgtcaagctcggtgatgccatggtcacatggattgagcctgggatgagctgaacccggcgacccctgctgtcgcaaatggcaaggtcaag

SEQ ID NO: 97990 - DNA, 2033 bp, Zea Mays
cgcagtctcgcacaccacaccaccccccacgcggacgccaaggcgcaacggagagaaagaaagagaagggggatggagcgagaagaataagacatcgtcttcgaccaccccggccggcccctccactcgatctcccagcccctccgtcagccacctcgatctcatccgatgctctagctaggcaggctagcttcgcatggattcacccgcggctgcgtcgtcgctgctcctggaccactcgtgccgccgctcttcctcttcctcttcctccgccgcctgatggtgatggccagcgccggcgtcaacgtgcccggcggcgacgaggtacggaacccgaccgctgcgtccgcgtccaccccagaatgccggatgcgcaggcgccaccgcctcgagccccaaggatccggcgacgccgccgccgctgcggcgccgggcccgagctgggtgcgccgtctccgtcctgcggcctcccggttctcgccgtcgccgtcgccatcgctgtcgccgtcgtcgtcccagagctctgcggacaggcccaacgacgaggagcaggaagagctcgaccatgaggtggaggtggagctcgcgccggcggggccgcagctcgagcccggcgaggctgaaggtgaacctgaagccgaggccgtcgccgtcgccccgcaggtgtggcccgtggccttcggctccctgtccatggcggggcggatgcggatgatggaggacgccgtctcgctccatccggacttgtgcacctgggccgccgacggctcgcccatgcacttcttcggcgtctttgacggccacggcggctcccatgtgtccgcgttatgccgggaccggatgcacgaggtggtggcggaggagctggccagggagggagccaccttcctgcggcggcggcaggagtcggcggcgtcgggcagcgccgcctggtcggagcgggcggaggaggagcgcgcgtggcgcgcggcgctgcagcggggcttccggcgggtggacgatatggcggcgctggcgtgcgcgtgcgggcgcgtggcgcggccaagctgcagctgcccgctcgccggcacctcctccggcatcgtcggctccaccgccgtggtggccctcctcgtccgcggccgcctcgtcgtcgccaactgcggcgactcccgcgccgtgctctgccgcgggcccgccgggacgccgcccgtcccgctctcctccgaccacaagccaaatcgggcagacgagaaggcgcggatcgaggcggccggcgggcgggtggtgttcaacaacgggcaccgcgtgcgtgggatcctcgccatgtcgcgcgcactaggggacaggctgctgaggccggaagtgatcgctgagccggagatcaccgtgacggagcgaacggtggaggacgagtgcctgatcctggcgagcgacgggatgtgggacgtgatcagcaacgacatcgcctgcaacgtggcccgccaatgcctggaggacgggaacccgcctcccgccgaccccactgcgggaggaggaggaggagctccggccgccggcgtagtcgtcgtcgccgcccgcgaggccgagccccggtgcctccgcgccgcctcgctcctggccaggctcgccatcggcagggagacacaggataacgtcagcatcgtcgtcgtcgacctcaagcacagggactgagtcagtgagtgagtggtggtatccggtttctgatcctgcagcgcatcagcgtaatcgatctagggctgagctgaactgatactgtgaggaggtgatcgtctagatcgtctagacctttgacatttccttggttctttcgattctaagatataagatttgtagcctgtttcttttctttcggtcgaaatgtatgtgtggagagaaagaaagtggatggaagatttgccgtcctcaactgaaggtggggggaaaaaacggaggacaaaaggaacaatgaaaaagagagcaattgtacagagtatgacaacatgatgctacatttatgtgcattattaataccaacttgtttccgttttctt

SEQ ID NO: 97991 - DNA, 571 bp, Zea Mays
ctccccaaccaaatagaccactagtactctcggtgttgcttcgcttctagaagatagaccgggactcccgccatcatgtgtggattctacgactaacttgaactcggcgcgataatcatcagagggagtgggattgctcgtcgtgatcgctgtggcaccatggagtcgccttcgacgtcgtcaggggccttcgcgtcatcaccgctagactagaaaactaaggaggtggaggtggagcgaacaatgtagatggtagagctacacccttgcggtgccaagagtctgcatgtactgaaaaatctcaatcatccattgctgatcggccaagcgaatcccccgctcagccttctgcttggcctcccgctcgactctcatcctcgattccaactccacatgttacctcctcttttcttctagttggcctaagtttattttatgaaaccttgtaatttttttcacaacctcctcttatgatatcatgacatttcaacaagttttatgattttatgactctgttgtgtttttacaatttgaaaacaactgggtcataagtttgtgattgtgtttcgtg

SEQ ID NO: 97992 - DNA, 1350 bp, Zea Mays
gggggctccggacatcgaggggcggggttgccggctcggttttggtttggttcgacgtacggttcagtttccgattttaaagtgcccagtcctagaaacgaagaagcgcacgaacccatcgtttgaccgaccaactgcccaacaaacgatggccggcgtgtcagcaagcatcccgtgcgtggtgctcaacacgggccacgcgatgcccgtgctgggcttcgggaccggctcctccagcacgccggaggatctgccggcgaccatcctccacgccgtccgccttggctaccgccacatcgacacggcctccatgtacggcacggagggggcggtcggagccgccgtctccgacgccgtcgctgcgggggccgtcacctcccgcgctgacctcttcatcacctccaagctcgtgatgaaggacgcgcatccggaccgcgtgctccccgcgatccgggagtcgctggcccgcctaggcctggactacctcgacctcttcctcgtccactggcccgtcgccgccgacgagaacaacaagcccgtgccgttcgacatggaaggcgtctggcacgccatggaggagtgccaccgcatcggccttgctaggtccgtcggcgtcagcaacttctctgcggccaagatgtcccggctgctcgccttcgccgccgtaccgccggctgtgaaccaggtggaggtgaacgtcggctggcgtcaagagaaggtcagggaggcctgcgccaagaacggcgtcgtcgtcaccgccttctcgccgctgggcgcgatcggcacggcgtggggatccaacgccgtcatggaaagcggcgcgctggaggacatcgccgccaggagaggcaagaccattgctcaggtagcgttgaggtggcttcacgagcaaggggtgtgctttgtggcgaggagctttaacaaggagaggttgaagcaaaacatggagcttttcgattgggagttgagcgtcgatgacaaggagaagatcatggggattccacagaggagagcatgccgtgcagagttctttttgtcaccagacgggccgtacaagaccttggaggagctatgggacggggagatatgagataccatgtagctgttgtatctattgtttgtcgacatcgttgttgcttgctgctgtggggaaatatcttcggaatactctctgaatgaatgtggactaacagttggtcctggacaattgccttgcatgtcagtatacattttgttgcattctagctaggttgggtgtggtagtactgctagtgattaagattattagggcttttcttagatcatgtacaacctttagtttgccaaataataacttgattttgtgtcatt

SEQ ID NO: 97993 - DNA, 786 bp, Zea Mays
catgcaagctagctgcatgtattcaggtgaggtccttctgctgcgcgcggtggctataaaaggagcacatgtacccctgctggctaatgcacacctcagtcactcgtccagtgcaaacgacagatggcctccttggtcgccctccttgcggtggcccttgttgcgcagctggcctcgtggcagcaggccgccgtcgcctacgatcctagccctctccaagacttctgcgttgctgacaagaactcgcctgtgcgtgtgaatgggtttccttgcaaggacccaatggccgtcaccccggacgacttcttcaacccggccatgatcatcggcaagcgcagggacaccaacaacaaggtcgggtccaacgtcaccaacgtcaacgtggagagcttcccgggcctcaacacgctgggcatctcgctggcgcgcatcgactacgcgcccctgggcgtgaacccgccccacatccacccgcgcgccaccgagctcctcaccgtgctggaggggaccctctacctaggctttgtcacgtccaaccccaaccgcctcttctccaaggtggtcaagaagggcgacgtcttcgtcttccccaaggccatgatccacttccagatgaacctggaccacgagaagcccgccgccgctctgtcgtcgctcagcagccagaaccctggcgtcatcaccatcgccagcgcggtgtttgggtccaagccacccatctcggatgacgtcttggccaaggcgttccaggtcgaaaagaaactcatcgactggctccagtctcag

SEQ ID NO: 97994 - DNA, 1286 bp, Zea Mays
acataaaaccctcgttgctgcctgtacatcccgtactcccctagcctgcctcggtgcgccgccgccacacctccaccatggctgcgaccacgccggccaccgacccgccggatgccttgcttgcagtaacagctgatgctcccactcctgctcgtcccaccccggcggagctggtagcccgcgccgtcgcccccgtcaagcccgccttcctctgcccgcctcccgtccgtgaggcacccaaggaggagggtaaagccgccggcggcggggccgtcgtaaaggtggagaagaagtccaagcgccagctcaagcgcgagcggcagcaggaacaaaaatctacttctcacctttgtatcgaagtagggaaaagtggaaatgttattggaaatggcgatgtattctcctttactgactggaacaagcatgtttcagactgctccaaaatttccacttgcatgattgctagaggtgcacttatcaagccttggttatttactgagataaaagaacaaaggcactgggatatcacatctggcgagagattaaatattcttaaagattttgtgcgttttggtctggaacattggggctccgatttcaaaggagttgagacaacacgccatttcctcctagaatggcttagttacacctgccgctacattccggtgggtctgctggatgtgattccacaacgattgaactggaggcctccaagctactatgggcgtgatgacctcgaaaccctgatggtctcagattcagcagctgactggataaggatctcagagatgttgcttggcaaagttccagaagggtttaccttcgcaccgaagcacaagtccaatgcctatgaccgagcagaaaacggttaaacctttgttccgttgttcgtcagggcaggaactcagcaacaccagtggtgggttctcttgaggatcagagacaactactgaggtccatgctgcttgaacccatcatgttgtgtaacatgattttatatttagccaaatggtgattgtaccaatagtttaagtatagactatagagcacctgataattgaattgctcaattctcctctattcatgctagctctagcatcttacttatccatatacctatatttaaacttactctatgaacaatgcagtttacagtgcaaaacattggtttgagtggctatatgggtgaactattggatacggtctccgaaacaatatctaatgtatgaacgtacgttttctcagctttcccaatggtttaatgctgggcagagggctcaaatctg

SEQ ID NO: 97995 - DNA, 2552 bp, Zea Mays
acataaaaccctcgttgctgcctgtacatcccgtactcccctagcctgcctcggtgcgccgccgccacacctccaccatggctgcgaccacgccggccaccgacccgccggatgccttgcttgcagtaacagctgatgctcccactcctgctcgtcccaccccggcggagctggtagcccgcgccgtcgcccccgtcaagcccgccttcctctgcccgcctcccgtccgtgaggcacccaaggaggagggtaaagccgccggcggcggggccgtcgtaaaggtggagaagaagtccaagcgccagctcaagcgcgagcggcagcaggaacaaaaatctacttctcacctttgtatcgaagtagggaaaagtggaaatgtggactcatgcaaatatggtacttcttgtcatttcagccatgacataaatgcttatttgtctcagaaaccagctgaccttgaaggcacatgcccatttactgcactgggacatttgtgtccatatggactaacttgtcgattccttagtacacataaggataaccttgctcctcaaaatcatccagagggaaattgtgagagaaatcctttgagcaaagaaattcaaaagctcttatggaagagcaaatataaatttcccaaggccagtgcccagatcaaacttcttggtcttaaggatggaaacaagaataaagcagaagcagtaaatgatgataatccagatgaaacatgtaacctaaatggtgatgacaaaacacttctttctagcattcctgaaaatgttgaacctgatcccacgttgtgcaaagaaatagataattcagggggagaacctttagttgttgactcagttgaatctgtggagccaagggcatcaaagaaatcaaaggttgaagttgatgaaactcgggataatgaaatcaaaggtcctaccactggtattcatgacaatgaggctgaatctgaagttaattcaatcagtggagtaaaagtttcctcaaataaccaaagttcctgcaaagttgatctgatcacgatacctcatttacgtgaaaagaaaattatagattttcgagagaagctgtaccttgctcccttaaccactgttggtaatcttccttttcggaggctctgtaaaaccttgggagctgatgttacttgtggagaaatggctatgtgcacaaatcttttgcaggggcaagcttcagagtgggctttgctgcgacggcatccatcagaggatttgtttggggtgcaaatttgtggaccgtatccagatactgtagcacgaacagttgaacttgtggataacgaatgttcagttgatttcatagacataaatatgggctgcccaattgatatagttgtcaacaagggtgctggatcatcattgctcacaaagcctatgaggattaggagtattgttcaagcggcatcaactgttactgaaaaaccgttaactgttaaggtaaggacagctttctttgagggcaggaatcgtgctgattctttagtttcagatatctacaactggggtgcttcagctataacaatacatggtcgatcacggcaacaacgctacagcaaacttgctgattgggactatatctaccagtgtgcacagaaggctcctgactatttgcatgttattggaaatggcgatgtattctcctttactgactggaacaagcatgtttcagactgctccaaaatttccacttgcatgattgctagaggtgcacttatcaagccttggttatttactgagataaaagaacaaaggcactgggatatcacatctggcgagagattaaatattcttaaagattttgtgcgttttggtctggaacattggggctccgatttcaaaggagttgagacaacacgccatttcctcctagaatggcttagttacacctgccgctacattccggtgggtctgctggatgtgattccacaacgattgaactggaggcctccaagctactatgggcgtgatgacctcgaaaccctgatggtctcagattcagcagctgactggataaggatctcagagatgttgcttggcaaagttccagaagggtttaccttcgcaccgaagcacaagtccaatgcctatgaccgagcagaaaacggttaaacctttgttccgttgttcgtcagggcaggaactcagcaacaccagtggtgggttctcttgaggatcagagacaactactgaggtccatgctgcttgaacccatcatgttgtgtaacatgattttatatttagccaaatggtgattgtaccaatagtttaagtatagactatagagcacctgataattgaattgctcaattctcctctattcatgctagctctagcatcttacttatccatatacctatatttaaacttactctatgaacaatgcagtttacagtgcaaaacattggtttgagtggctatatgggtgaactattggatacggtctccgaaacaatatctaatgtatgaacgtacgttttctcagctttcccaatggtttaatgctgggcagagggctcaaatctg

SEQ ID NO: 97996 - DNA, 891 bp, Zea Mays
gttgctcaagaatattcatgtctatattgacatgattttatgtatgcatgcatgattgattttgtgctaacacatgacacttggcagccttggttatttactgagataaaagaacaaaggcactgggatatcacatctggcgagagattaaatattcttaaagattttgtgcgttttggtctggaacattggggctccgatttcaaaggagttgagacaacacgccatttcctcctagaatggcttagttacacctgccgctacattccggtgggtctgctggatgtgattccacaacgattgaactggaggcctccaagctactatgggcgtgatgacctcgaaaccctgatggtctcagattcagcagctgactggataaggatctcagagatgttgcttggcaaagttccagaagggtttaccttcgcaccgaagcacaagtccaatgcctatgaccgagcagaaaacggttaaacctttgttccgttgttcgtcagggcaggaactcagcaacaccagtggtgggttctcttgaggatcagagacaactactgaggtccatgctgcttgaacccatcatgttgtgtaacatgattttatatttagccaaatggtgattgtaccaatagtttaagtatagactatagagcacctgataattgaattgctcaattctcctctattcatgctagctctagcatcttacttatccatatacctatatttaaacttactctatgaacaatgcagtttacagtgcaaaacattggtttgagtggctatatgggtgaactattggatacggtctccgaaacaatatctaatgtatgaacgtacgttttctcagctttcccaatggtttaatgctgggcagagggctcaaatctg

SEQ ID NO: 97997 - DNA, 715 bp, Zea Mays
acaatcgtcgaggccaggaattataatcagaagcagacaaatatactgtcgccagaaaaactaggcattcaggagctcaacgcatcatcattaatgcagtttaagcataaatgctgttgcaaacgtgtcgtcacacatgatttatctttgcacggaatggaactcaggctcccagcaggaatacaaatacaggttctaacagaacgccataagcactaactgaaagcctgagaggacagtgtgatcccctcctcaggcagtccgcaggatgatgtgaaccccactgtcagtgtccacgatgtcgctgagctcaccaaccttgagggcatatgtggcgtcctcgaagggtttctgcatctgcctcctcccaaaggtacctgtgtccccaccgcgtcgcgcggacgagcagtcggagtgccgagcggcgaggtcggcgaagttggcctggccggagagaatctggttgcggaggtccaggaggcgcgctgcggcgtcgccgcgcgtggtggcggagatgatgcggccgtcagggtccttccaggaggccttgcggcgggaaccctcgtgcttgatgaggatgtgcgacgcccgcaccgtctcctccactcctccagccgccgacgacatggtgcgctcggttcggtgtgtgagggaggactgagggcttcgtactagtggcggctacacaacaaacaagaacagcacggagatctgg

SEQ ID NO: 97998 - DNA, 132 bp, Zea Mays
atggcaaggtggcacgggcgtttgctatttatgctccagaacgacccagatgacaacggaaatcgggctaagcacgggatccttggcgacatagcagcaacgacaaaggacggtggggatcttgatcggtaa

SEQ ID NO: 97999 - DNA, 914 bp, Zea Mays
gcagcttactcgtaacggtaaagccaccgacccaactggtctcgtagccgaactgcaagagggaagagaagcatcgcatctctgagtctgaaaccctagccgcctgtctccctgtccggtctccactcgtccgggcgacgagacgacgacggagggtttctgcgggggatttgtttgtcgctgactcgccggcgaccaagatgaggccggttttcgtggggaacctagactatgatacccgccactcggagctcgaccacctcttctaccgctatggcagggtcgagcgcatcgacatgaagtcaggctttgcttttgtctactttgaggatgaacgtgatggcagtgatgccatacgtgctcttgatggttatccatttggccctggcagacgcaggctttcagtagagtggtcacggggtgatcgagctgctagacgtgatggcaacaaaccagaagtaaatactaagccaactaaaacattgtttgtcattaactttgatccaatggacacaagagtcagtgatatcgaaagacactttgcaccatttgggaacatatcaagtgttaggataaggaagaactttgcttttgtccggtttgaaacactagaagaagcccgtaaggctcttgaagctactcatgctaccatgcttttggatagggtgatttctgttgagtatgcctttagggatgatgatgaacggagtgataggtacgacagcccaagaagaggtggtggatatggtaggcggggggatagcccagcgtacagatcacgtcctagtccagactatggtcgcccagcaagtcctgtatatggttcgtatggcaggagcagaagtcctgttcgtgaccgctatcggaggtaatgccctaggattattttcattggtttgcatgttgtcttgttg

SEQ ID NO: 98000 - DNA, 1311 bp, Zea Mays
gcagcttactcgtaacggtaaagccaccgacccaactggtctcgtagccgaactgcaagagggaagagaagcatcgcatctctgagtctgaaaccctagccgcctgtctccctgtccggtctccactcgtccgggcgacgagacgacgacggagggtttctgcgggggatttgtttgtcgctgactcgccggcgaccaagatgaggccggttttcgtggggaacctagactatgatacccgccactcggagctcgaccacctcttctaccgctatggcagggtcgagcgcatcgacatgaagtcaggaactaccagggcaaaacatagctccccagggctcctcaactcctgaaatttcttccattcactgacctggccacctttttttcatttgaaaccatctgttcatgtgccctgatgcccactgttatgtctgctcgagcatgtttagcgggattgtgattcatgctatgtcatcagcaccatcatgccttaccatgtcacgatagaagtatcaccaacatgacaacatgctatgttactacattgataagcaagagagttctatttatggtgaagcatgttcaatgtctccggtcataatttcttactttggatataagttgttgaacaccattcttagccctcatcatgaatggagtctaccacactagtgctcttcatgccatcagaattatgcaggctttgcttttgtctactttgaggatgaacgtgatggcagtgatgccatacgtgctcttgatggttatccatttggccctggcagacgcaggctttcagtagagtggtcacggggtgatcgagctgctagacgtgatggcaacaaaccagaagtaaatactaagccaactaaaacattgtttgtcattaactttgatccaatggacacaagagtcagtgatatcgaaagacactttgcaccatttgggaacatatcaagtgttaggataaggaagaactttgcttttgtccggtttgaaacactagaagaagcccgtaaggctcttgaagctactcatgctaccatgcttttggatagggtgatttctgttgagtatgcctttagggatgatgatgaacggagtgataggtacgacagcccaagaagaggtggtggatatggtaggcggggggatagcccagcgtacagatcacgtcctagtccagactatggtcgcccagcaagtcctgtatatggttcgtatggcaggagcagaagtcctgttcgtgaccgctatcggaggtaatgccctaggattattttcattggtttgcatgttgtcttgttg

SEQ ID NO: 98001 - DNA, 2001 bp, Zea Mays
gcagcttactcgtaacggtaaagccaccgacccaactggtctcgtagccgaactgcaagagggaagagaagcatcgcatctctgagtctgaaaccctagccgcctgtctccctgtccggtctccactcgtccgggcgacgagacgacgacggagggtttctgcgggggatttgtttgtcgctgactcgccggcgaccaagatgaggccggttttcgtggggaacctagactatgatacccgccactcggagctcgaccacctcttctaccgctatggcagggtcgagcgcatcgacatgaagtcaggttgcccgcccttgcttttgcccacccctcgttttgtcgtcgtgttcggtcgatttaggttcgatctgatcttattgtgtacctagtcagctgttatatcttgatgtttgaatttcattgaattgaaggaaaaaaagtgagggaattcccccattctgtataaaaaaataaaaaatgagggaatgagcacgtttgtacagtaattgttttgataagattcatcatccaatagtgctgtattagttgttccagttattcttggttgattagctaatgatattgttgaaatgattcgtcatctaagttttgaacacgttataccactaggaaatcttttgccgtacagaacttggatagatgtgtttttaaactgggattgaagttgaaatgagtaagatactctgatactttgcagctgtgctgtactcgtgttacatctacttcataaagagcacagacttgcatgtgtgtgctgctccatgctaactggagttgcagtttgtgtaatagtaggcacagaagttttaatttttactctggcgcaggaactaccagggcaaaacatagctccccagggctcctcaactcctgaaatttcttccattcactgacctggccacctttttttcatttgaaaccatctgttcatgtgccctgatgcccactgttatgtctgctcgagcatgtttagcgggattgtgattcatgctatgtcatcagcaccatcatgccttaccatgtcacgatagaagtatcaccaacatgacaacatgctatgttactacattgataagcaagagagttctatttatggtgaagcatgttcaatgtctccggtcataatttcttactttggatataagttgttgaacaccattcttagccctcatcatgaatggagtctaccacactagtgctcttcatgccatcagaattatgcaggtgcagtacttttctgattcttttaggtttgggtataatgacgtgctgaattgttattgtaaaacaaaagtggaaatattctcgtgattgtttggatattagttattcaatttttattgtcctgacttgcatgattacactgtaggctttgcttttgtctactttgaggatgaacgtgatggcagtgatgccatacgtgctcttgatggttatccatttggccctggcagacgcaggctttcagtagagtggtcacggggtgatcgagctgctagacgtgatggcaacaaaccagaagtaaatactaagccaactaaaacattgtttgtcattaactttgatccaatggacacaagagtcagtgatatcgaaagacactttgcaccatttgggaacatatcaagtgttaggataaggaagaactttgcttttgtccggtttgaaacactagaagaagcccgtaaggctcttgaagctactcatgctaccatgcttttggatagggtgatttctgttgagtatgcctttagggatgatgatgaacggagtgataggtacgacagcccaagaagaggtggtggatatggtaggcggggggatagcccagcgtacagatcacgtcctagtccagactatggtcgcccagcaagtcctgtatatggttcgtatggcaggagcagaagtcctgttcgtgaccgctatcggaggtaatgccctaggattattttcattggtttgcatgttgtcttgttg

SEQ ID NO: 98002 - DNA, 1165 bp, Zea Mays
gcagcttactcgtaacggtaaagccaccgacccaactggtctcgtagccgaactgcaagagggaagagaagcatcgcatctctgagtctgaaaccctagccgcctgtctccctgtccggtctccactcgtccgggcgacgagacgacgacggagggtttctgcgggggatttgtttgtcgctgactcgccggcgaccaagatgaggccggttttcgtggggaacctagactatgatacccgccactcggagctcgaccacctcttctaccgctatggcagggtcgagcgcatcgacatgaagtcagcgggattgtgattcatgctatgtcatcagcaccatcatgccttaccatgtcacgatagaagtatcaccaacatgacaacatgctatgttactacattgataagcaagagagttctatttatggtgaagcatgttcaatgtctccggtcataatttcttactttggatataagttgttgaacaccattcttagccctcatcatgaatggagtctaccacactagtgctcttcatgccatcagaattatgcaggctttgcttttgtctactttgaggatgaacgtgatggcagtgatgccatacgtgctcttgatggttatccatttggccctggcagacgcaggctttcagtagagtggtcacggggtgatcgagctgctagacgtgatggcaacaaaccagaagtaaatactaagccaactaaaacattgtttgtcattaactttgatccaatggacacaagagtcagtgatatcgaaagacactttgcaccatttgggaacatatcaagtgttaggataaggaagaactttgcttttgtccggtttgaaacactagaagaagcccgtaaggctcttgaagctactcatgctaccatgcttttggatagggtgatttctgttgagtatgcctttagggatgatgatgaacggagtgataggtacgacagcccaagaagaggtggtggatatggtaggcggggggatagcccagcgtacagatcacgtcctagtccagactatggtcgcccagcaagtcctgtatatggttcgtatggcaggagcagaagtcctgttcgtgaccgctatcggaggtaatgccctaggattattttcattggtttgcatgttgtcttgttg

SEQ ID NO: 98003 - DNA, 822 bp, Zea Mays
gactgggatggagcacgggtcgatgtggctgcctgctttaccggatctgctcacctatgtgactatgtgagcatgcaggtgtaggttgagccgtcggcgaccaaggacatgatggacaaggtggagcaggtacgacaacggaggaaggccgagaagtccctgctcagcttgcaacgaaggttggctacgacaagcgcagaagaattggagaatagtggctgtcagaagacatatgcgagccctggaaaaagtggtgaggcatcatttgctaatgcatccatgatggatatgcagaagattattacgaaattaacaactcaatgtagtgagaaggcttttgagttagagttaaagttagctgataatcgtgtcctctaggagcagctactacagaagaatgtgaaaatcaacgatttacaagaaaaaatcacgttgaacaacaactctcaacaaaagtggatatatcctctgagaaggaagttgattgtgcgcaacaggagactattgatttgaaatctaaacttcagtccaaggaagctaaaattgaaaagatgaaatatgagcatctgacgagggaggctgctttgaccgagaatgagcttcttgaagaggagtacaagaaaaagttagacgaggcaaataaggaactatctctggagaatgatctagcaggcatgtgagttcttgttgctaagttgaaaagaagggttttagatatatctgatttgagtgttgatgatggaactaaagtgtaagggcgtagcgatcgcaacactgttgtctcataattggtgttaatgaaaaataacatggtgctgcacg

SEQ ID NO: 98004 - DNA, 787 bp, Zea Mays
taacccgtcagtccctcggatctagtccgataaagccacttaccaggatcgaataccactagctcacacgaaggtgaggcacagaaaaatataataaaacataataccacaaatttaataagtatcattagtgattacattatcggagtttcagaaataataaccataaattttaatgcagcggaaataactaacggagaaaaccgagtaacatggcgaagcctggccacgctactcctcctggtcctctcctgcggaagcagtaacccacccgaccgtctgtcccgatggaagggatggaggccaagtcacaccatcaatcaattcaacctaaggagtacctgcaaaaattatgccacaagcaaggctgagtatactaatactcagctagacttacccggtgtgaggagtctactcctctacctctagacatgcagctgtttggctgaggggtttggtttgccaaaagcactagctgagtctaaaatcaagttttagcttttcaagttttagtatgatcctctttactagatgtgtacctagctagtcatacatggtatcaaacattttatcaatcaacatcttttgccatctcatttccacttattactcaatgcagtacaatggatcaagcagtctcattagctgcgagaagcagacgattcgaatcgagtttttatccttgcaaggtaaacctaaacacacgacatgtaggggcactccgtccccacacatatcaaccgtccccatcgattccctggcaacagatcagggctcaccgccttgg

SEQ ID NO: 98005 - DNA, 430 bp, Zea Mays
gtcccccgcggcgatatccggggatgaggcgtcggaacggacggtgggaagggagagcgcgacaaagtcacggtcgacgtccccagcgccgtcgttgtaggtgcggagcagccccgacagggagaggccgctgtcgtcgaggaggatgaactaggcgcaggtgcggaacacctcgtcgaggatggcggagatctggtcctcgctgaacttgacccgaggattgacggcgacgacgatggcggccatctcgttgcggtccagcccgccgtccccattggtgtcgaagcgctcgaagatcctcctcaccttctccgcccgtgacccgcggccggttgacgttgccgacgcggacagcgccattacggctcgctgcgcacggggaaaaaccagccggattacggcgaaattcgggcacgcggggcgggcgcag

SEQ ID NO: 98006 - DNA, 444 bp, Zea Mays
atgcgggactgcgggaggcaagcatgcacgggaaggaaagaggcgcgcaggagcaaagtaaaggaggcgccgcacacgggaaggataactgagtcctcttctggcacgccgcgcctgcaagctccacccaggtggccaggcctgacatcaggaaagaagggaatcaggatcgcactgggcctcttctcaagagaaaatcaaatgattttggatgggagtgggggaaggctatgtgatccaaatgacaagactaaagtcaagtgccttatttgtggccatgagagctcaggaggcattcatcaattcaagcaacaccttgcacacaaagtgactggtgtgaagtattgtgcaaagttgcaagaactcttaattgcgcttaagctttttcacccatcaagcgctcgcttagcgcttagggcttttttgaaccttgtcctcagttaa

SEQ ID NO: 98007 - DNA, 162 bp, Zea Mays
ctattttattttgtctatcgaaacagcctaggatttgacctagccagcttatgcttcatttccttcgatttcttctttcgatatgagcgagcttacccaaaacctatactttaatgatctagtagccctattcacatatgcctatttctctaaacctagtcc

SEQ ID NO: 98008 - DNA, 1728 bp, Zea Mays
atggaggctgcagcagcgacgacggcggcggcgcttcttcctcccgctcggaaggtgttcatcctgcccctgcttctcctcctggctgcatcgtcgctggttccacgagcttcgtctgatggagcgcaatatgattatagagcttacactgagtgcaaacctcaccctgagccagctctgtacaacggtggcgtcctgcgctgggcgagcaaaataacggacttcagaacggaggacgaaggcaactactccccggcatttgtgctctacaacatgtcggcggcgactgcgtacagcttctcttgctgggtgaaaatcgacgggccagaaagcgcacacgtgaaggcgaagatactgaccgtggagaacgcagcgtcgcagtgcgtcggcaccgctatcgcgcgcaacgactgctggtcttttctcaagggtggctttactctcaactccacgtctcaaacctcggtgctctatttgcagactgcgagcccaaatgcttctacgatctcaatcagaagcccctccttgcagccattctcacccgatcagtggaatcagcacagggaggagcgtatccaacagattcggaagcgtttcgtgaacctgcatgtctccgacggcaacggcagccgcgtggtcggggcggacgtggccgtgcaccagatcaccagagacttccccttcggctccgccatcagcaagagcatcctcgggaacgggccgtaccaggactggttcaacgcgcggttcaacgcggcggtgttcgagaacgagctcaagtggtacgcgacggagccgtcgccggggaaggaggagtacggggcggcggaccagctgctgcggttcgtgcagtccaacgacgtgacggcgcgcgggcacaacatcttctgggaggaccccaggtacacgccggcgtgggtgaagaacctgacgggcccggagctgcgcgccgcggtggcaggccgcgtccagagcctgctgtcgcggtacaagggcgacttcgtgcactgggacgtgagcaacgagatgctgcacttcgacttctacgaggaccggctgggcggcaacgccacggccgacttcttcagcacggccaggcgcgccgacccgctggccacgctcttcctcaacgacttcaacgtggtggaggcgtgcgacgacctcagctccagcgccgactcctacgtgtccaggctgcgccagctcgccgacgacgccggggtcaccttcgagggcatcgggctggagggccacttcgccaagcccaacgtcccctacgtgcgcgccgtgctcgacaagctgggcacgctccgcctgcccgtctggctcaccgaggtcgacgtcagcgccgccttcgaccacgccacgcaggccgcgtacctagaggacgtcctccgcgaaggcttcgcgcacccggccgtcgacggcatcgtgctgtggacggccatgggcgccaacgccacctgctaccagatgtgcctcacggacgccgacttcaccaacctcccggccggagacgtcgtcgacaggctgctgggggagtggcagaccaaggaggtgctgggcgccaccgatgaccgcggctccttcaacttcagcgccttctacggcgagtacagactctccgtcacctatctcaaccgcactgccgacgccaccttctcgctgcctcgcagcgacgacactaagcacatcaacatccgcctaccgcctggacctgcagcctga

SEQ ID NO: 98009 - DNA, 1424 bp, Zea Mays
atccaaatttctcgtgaatatctcagcgccgagctcgagcccgcagtctgccatcccctttcggtggcaaccaaatccggcttgcctgcagcggatctccatctggtcggagtggatcgggtctccggtggtgtttctcgcctccgtggcggttagtggcgccggacggaccacgtccccgcagcagcggtcagcggcggctggcctagctgcggtggcttgaggcggctctcggacgggtgcctcgagctggcaccagcgggtgggtgccgcaactctcaccgctagctggtgtagaggcggcgagtcccggcgccatggagggtaggccgcaagtgtccgcttagagaggggtcaacaaagggacttgtcaagctacgacactgcggtcttcggttgccctgctcagcttgttgttgccgtacatgatccttcatgatttgtgagagatctatattccccgaatcttcaccggctctgccagatcactggcgatcttcttgccagccgcctccgctaacctgcgcggcacagtagagctcaggaaaagcggtgggactgagggagaaaagaggagatgactagcctgtcgatcacagtgatgacgctgaacttgcatgaaggcgagcagccgagcgagagtcccaacagctgggagaagcgccgggacatctgcgtcagcgtcatcaccagctactctcctaccatcctttgcacccaacaaggcttaagatggcaactggactacctacaacagtgcttgccaggttatgaacagtttggaatctcaagaaaaggctcacaggacaacactgatgaatactgcacaatattctatgaaaaggaaaaggtggagcttactgaaggtggcactttttggttgtcggaatcaccatctgttccaggaagcatttcatggggagcaaatgcaccctgcattgcaacatgggcaacacgtttcaactcaaaagattagaaccacctggattcagttttcagatcgtaaatacaaatcttgatgaagttagccctcgtgctcgacgaagaagtgctttgcttacatggcaacatatagcatcgctggcccccaatttgcctgttatctattgtggaggcttcaatacacagaaggaatctatgactgggcggtttttgcttggcagatccagagaacatggtgttgttggtgatatgagagatgcttggccaaatgctcgagtgcgaaaaaatgtgtcaataatacacacatatcatggatttaaaggtgcccctgacacttcatttaggtcttattttccagtttccgttgtaaaaactgctagggaatttttgcgtttattatgccaaagtaaaacttggaattgaggaactgacaatgttatttgatcctttattcaattcatgtcgggataaatcaatttttt

SEQ ID NO: 98010 - DNA, 2061 bp, Zea Mays
atccaaatttctcgtgaatatctcagcgccgagctcgagcccgcagtctgccatcccctttcggtggcaaccaaatccggcttgcctgcagcggatctccatctggtcggagtggatcgggtctccggtggtgtttctcgcctccgtggcggttagtggcgccggacggaccacgtccccgcagcagcggtcagcggcggctggcctagctgcggtggcttgaggcggctctcggacgggtgcctcgagctggcaccagcgggtgggtgccgcaactctcaccgctagctggtgtagaggcggcgagtcccggcgccatggagggtaggccgcaagtgtccgcttagagaggggtcaacaaagggacttgtcaagctacgacactgcggtcttcggttgccctgctcagcttgttgttgccgtacatgatccttcatgatttgtgagagatctatattccccgaatcttcaccggctctgccagatcactggcgatcttcttgccagccgcctccgctaacctgcgcggcacagtagagctcaggaaaagcggtgggactgagggagaaaagaggagatgactagcctgtcgatcacagtgatgacgctgaacttgcatgaaggcgagcagccgagcgagagtcccaacagctgggagaagcgccgggacatctgcgtcagcgtcatcaccagctactctcctaccatcctttgcacccaacaaggcttaagatggcaactggactacctacaacagtgcttgccaggttatgaacagtttggaatctcaagaaaaggctcacaggacaacactgatgaatactgcacaatattctatgaaaaggaaaaggtggagcttactgaaggtggcactttttggttgtcggaatcaccatctgttccaggaagcatttcatggggagcaaatgcaccctgcattgcaacatgggcaacacgtttcaactcaaaagattagaaccacctggattcagttttcagatcgtaaatacaaatcttgatgaagttagccctcgtgctcgacgaagaagtgctttgcttacatggcaacatatagcatcgctggcccccaatttgcctgttatctattgtggaggcttcaatacacagaaggaatctatgactgggcggtttttgcttggcagatccagagaacatggtgttgttggtgatatgagagatgcttggccaaatgctcgagtgcgaaaaaatgtgtcaataatacacacatatcatggatttaaaggggagaaaaaaggtgccctagaatttcttaaattaatatttagagctctttgcctctgctgggatcgacagacacaggacttgcatgttgactggatcctatttagaggacgcccactggttcctgcactttgtgaggtcataaatgacaatatagatggcgtttatccgtcgtcgcacttccctatctttgctgagtttttgcttccacgctcagttcgcctagccgagacaccttcatagccatcgtgtcattttttttatattttttcccaatctcattctgattacggctgattgttcctttcgacgacttcaccatgaaattggggtaccacccttcaccacaattgctggtcacttcattccgcaaaacaagacaatatacacgtgcatcctttttatatatgtttccagtcagtagtcactattatgtgttgcctcagccttgctatctttttaaagttcaccttttccatatggcgttgattttcatgtatatatactgtacctttacatgctatttatcacaactgtgagagttcaagtaaatctgatgtaatgaaatttccaagctgctcttttttcacattcttatatatttgtggtcctcaggtgtcaccaaatttttcctttttttgttggctcatatttagaaacagagtagacagttcagggaataaatcactgtaagcaactccccatcacacatgaagtggtcacacggaggactctttcgtggagtggagaagctctgtagtggacgtttggtgaagaagctctgtaatgggcacatcg

SEQ ID NO: 98011 - DNA, 693 bp, Zea Mays
tcacaccttatggtggtacatgctagaatgccttgctatactatttcaatcaatcaaagaagcaagtcaagcatttaccatcagaacaaacatccaatcattttagacgacatgtccaacaactatgtgtggcagagatgcgtatgttgcgctagatatgtggccacacaaggagagaccgagtccggaatgatgacatacgagagagagtaggagtggcgtcaattgaggagaagcttatgcaacatcgtttgagattgtttggacatatccaatgaagacctggagaggcatcagtgcatatcggaataattaggcgtcccgagaatgtgaagagaggtagaggtcgaccaaccttgacgtggacagaggctgtgaagagggacttgaaggagtggaatattgataaagagctcaccgtggataggaaggggtggaagtgtgcaattcacgtgccagaaccttgatttatagtttcgcttttcctccttaatcgtttgaccttttcttgtgcccatttagaccttgctggttcttgtgggttttatctcttttatgtgtttcctcgtttcgtcgtttttcggttctcctttgcctttgtttccccttttttttctttgggggttgagctctgaggttttcatacggggtttcatctctagcctaccccaacgtgcttgggacaaaaaggct

SEQ ID NO: 98012 - DNA, 128 bp, Zea Mays
ccacgagccgtccgggatgacgttgaagagaaactcgggcctgtgacgcacgagcactcacctagtagtgtagtatacaagatttaacaagacaatttaaaggcaaaaattcaagaatgttctttcat

SEQ ID NO: 98013 - DNA, 378 bp, Zea Mays
tttgagttcatatgacttattttagaaacttgagctcacaaacttcctcttatttgatctctgtatggtggaattatgtcattctataatctctgttcgttcggtcagtcgttgtgaactctcttctaatcgctcccttcattggccgtgttgtacaaagacatattggatggagtaaaaaacaacatcagttagtcaaataaaaaaatattatatagagagtggagacaatcaataaaaaaatcttgagattttttggtggatagtttacgtggatattgttgtgagccatcccaacgcacgggcaaccgactagtctctaatctctactatacttaaagcaccagtttcaacggtcgtcccgcgtcatatttttac

SEQ ID NO: 98014 - DNA, 360 bp, Zea Mays
atgaagtacaggcagaggattgggtggagtggccgcaatgcaacgacccgagggacgcgtggtctaggccacgctgttgcaggaccccgtcgagctgttgcgcaactgcgcaagctggacgagccgagggaccagatcgcgcgctccgtgcaacatcgtcgggcagccgcggagcaccggcactaccgccagtactctgggagacagtgggagaatggtgggatggggcctgggagcttccatcccacttgcatacaaggttggagacaaaatgagtggaattactacaagatcagtaaatatagagtttgttcaaaggaaatgcaattcgtactgaagcttattcattatgacaattag

SEQ ID NO: 98015 - DNA, 1610 bp, Zea Mays
acgtctagtaaatctgaagcaaagaacaagcggcgaggtgcaccgtgcacctccagctctgacctgctcggtcgcccgtgtcttcgtcttccttaatctcgaattccgaatcctcctccaacacctcgttttcctggattatccagcgagggacgccggtttgttgctcgtcctcctccctggttgcccgaggcggcggtggcggggcgaccatgtacagatcggcgggggtcgcgatggcgtggaacgtgttccggttctgcacggctctgcgtgggctaggttccatcatgatcctgctcgtcctcgcgatcgtcggcgtcacctactacgctgtcgtcctctgcaactacggcccccgccctgttcacccggcggcggcaccactctcgccgcgctcgccgtcctgctctccttccacttcctgcttgctatgcttttatggagttatttttctgtcgtgttcacggaccctggttctgttccaccaaattggaatcttgattttgatgtggagatgggagaaactgctcctcttgctagctcagagctctgtagccagatgaactcacagcaatctgtggctcttggcaatatgacaaatccaagggttaggtactgtaggaagtgcaaccagttgaagccacctcggtgccaccattgctctgtttgtggaagatgtgttcttaagatggatcatcattgtgtgtgggttgttaattgtgttggggcgctgaactacaaatactttcttctcttcctgttttacaccttcctcgagacaactcttgtcactctctctctattgcctcacttcattgccttcttcagtgatgccgagatcccaggaagtcctgcagcacttgcaaccacatttctcacctttgtgttgaatctggccttttctttgagcgttcttggttttatgattatgcatatttcacttgtttctgctaatacaacaacaattgaggcatatgagaagaagacaactccacattggatatatgatcttggccggaagaggaattttgctcaggtttttggaaatgacagaaaatattggttcatccctgcatactcagaagaggatttgagaagaactccagctctacagggtctggattatcctgtgagaccagattttgatggtcaggaactgtaacacagcaatttttgccagtgtcctcgtcagatacctcagtgttggacatctactgatacaactgacagcattgctgattgcgctatgcaaggcatcaaatgaaatgttcacaagattttagtaaccatgagtaattcatctgttgcacgtcatgtatgtgacgaagtgaaatttctcctagctgggccagaggaagtttgttgggatgtaaattagttttatcgacaacgtggattggtttcattccatccaaactggtagtgtgcttcaaatagtgctgtactttagtttagttattattatgtgatataaatatcatttctgataattgtgcctctgttatacactatcaatagtaaatggataagcgctgtgtaattctttcgaaattgtacaatgtgttctttccattgccctataaaagtattgaagtactagtttgcaa

SEQ ID NO: 98016 - DNA, 520 bp, Zea Mays
gccgccacccgcccagccgtcctcagcgccgccagccgcccagccgttctcagccgctgcgacgtcgtcctcagccactgcccgctaccgtcgtccagagccgccaggctccagtgtgccgccgaccctaaaaattccagtgcgccgccgccgccatgctccagagtccagagctgccagcctccagtgccccactccccactgcgctgctctgcgcaaccagcgcaagccgccagtgcccagtgctgagcaacagagcaagacaccagtgccctgacctgtcactgcgctctggcagctctgctctgcctcacttctgctgagcaagaccagcagctgagcagccactccgcaagaccagcagccagcctcaaattgaatttgttgattttgctcacattgaatcaatctttatttgctgacagtgaatttcaatggcaacaaatagtgttgttgaacttgatctttttctttttatgctaatgctattttgtttgtgaactcaacttatgtatgaact

SEQ ID NO: 98017 - DNA, 316 bp, Zea Mays
acaatccaaatacgccgaacacgcaaaaaccctagacatccggcgcccaagctcagcagtgtctctccaccgccgccgccacctcgtgctccccttgccctcgcatcgcgggatggagcacgacgcgcacgccgaggcgtcgtcgcacgcagtcccgccaccggaggacgccaccgtcgatgattgggctcgcgacgacgcggagcccatgtccgtcgaatcaagcgccacccccccggaggtagctgcagtggattccggcgctgataccccgcccgcgccctcggcctcggccgcggttgcgggagaaggtgcc

SEQ ID NO: 98018 - DNA, 917 bp, Zea Mays
agaaaatgttcactccccttcctcggcattggcgtcacattcgcagccgtctcactcctctcgcacagcatccgcttctcctgccaaaccctagcacctccgtcctccgaccccctcagctccggcgatggcctccaccccgcaccctccgccgctcatcggcaagtcgggaaacctcacggtgttcttcacgccatcggcggagcacgagagcccggggtccgagttctctacgcccccgacgagccctcgcgccgaggactcccctgaatcaccaccggcgcagacagcccctccgcccgcgcctgtttactcagtatccacgccgcagcttgtcaagatggtctccccgccgcttcccgccgagaagctctcccgaccctcgctggtccaggtgccgccattgcagttcgggaaggcttcggcaggatcagatggatcgctgcttgcgttcttctgggacgcggttgcacgcatgcaagaagcacacgcgagcttggacgagcacatctcgagatggttcgggctggaccagtccaagtaccagtgggcgctcaacgactattatgagaggaccgggcaggtaaaacattcaattcctgcaaggttggcacgtcatagctatatttattaaggagatagatttgagcaacgttggcactcgttagcagcacagttgtaaaaattcagaaagcttgaaaaagtggattatttctagtttttatgtgtgtaactaagctggtgccgtgtcaagctgcatatagaatccttttggttgcgtgaagactgagttctctttttctgcacccggaagctcttggttgtaacaaatccatatttagcacctttattgtagcttcgttgtggataaagaaaaaccttgctgaccttttttttattgtaccttcattttcatt

SEQ ID NO: 98019 - DNA, 946 bp, Zea Mays
agaaaatgttcactccccttcctcggcattggcgtcacattcgcagccgtctcactcctctcgcacagcatccgcttctcctgccaaaccctagcacctccgtcctccgaccccctcagctccggcgatggcctccaccccgcaccctccgccgctcatcggcaagtcgggaaacctcacggtgttcttcacgccatcggcggagcacgagagcccggggtccgagttctctacgcccccgacgagccctcgcgccgaggactcccctgaatcaccaccggcgcagacagcccctccgcccgcgcctgtttactcagtatccacgccgcagcttgtcaagatggtctccccgccgcttcccgccgagaagctctcccgaccctcgctggtccaggtaccgtcgccgcccgtcaagtcggtctcaacgccgctgcaggcaccaaaggtctcttcctgctccttgccaccggtccaggtgccgccattgcagttcgggaaggcttcggcaggatcagatggatcgctgcttgcgttcttctgggacgcggttgcacgcatgcaagaagcacacgcgagcttggacgagcacatctcgagatggttcgggctggaccagtccaagtaccagtgggcgctcaacgactattatgagaggaccgggcaggagatagatttgagcaacgttggcactcgttagcagcacagttgtaaaaattcagaaagcttgaaaaagtggattatttctagtttttatgtgtgtaactaagctggtgccgtgtcaagctgcatatagaatccttttggttgcgtgaagactgagttctctttttctgcacccggaagctcttggttgtaacaaatccatatttagcacctttattgtagcttcgttgtggataaagaaaaaccttgctgaccttttttttattgtaccttcattttcatt

SEQ ID NO: 98020 - DNA, 325 bp, Zea Mays
gacgtcgctgcttcctctcggtctgccatggatgcctctctgtcgctgtttgcctctgcaccgctgtagcaagttgcacagtcgttcgcctccttgtgtccctcaccgtcgacacttccatgtctccaacctcatgcgctcacttcatcgacgtcgtgcactgctactctgcgccaccgttcgagatcatgtcgcgcccagtggctcgtcgttgatcagttcgcctgaacgcatcctcctgttagcaacctagttgggagagtagacttggggaagaagaagaggagagttcgtagatgagttagtgcaattttgcttacaagct

SEQ ID NO: 98021 - DNA, 1184 bp, Zea Mays
gtttaatcccgcgtgacatgcatcagatgcagatgcaacaccgccacgacgtcgaacggcgatagtgagatgtcccacgccacctcctcctctgcgctccccgttccccaggtcgcgcgcacctgctcccgcaccggagaacccaccgcacgttggcctcgtcccgagatgtcggcgacgctgtgcttcatgggggttgcgagggagtctctgtctctggacgcgcccgtcgccgcccccaagctcgggagggagcggcgctcggccctcgcgagcgcgaactcggggccacaatgctggaggtggaggaggggcctggcgatgcgctgccagacggggtccaccgcagcgcccttcctcaggacggaggaggcccccgcggccgcgtcgggggcaaggaatgcccaggcggggttcaccatcgtcatgaagttcgatggctcgtcgctcgcttcagtcgagcggatgcgggaggtggccggcctcatccttagtgcaggggaaaggacacgccttcctctcgaccgcacggaagggaagattcataccacagccgacagagtcaggcgcaagatggctatcacagaaccgatatagagattgatgtgtttgccgtgcgctccggcagcagcgattccgacaggccccacggcggtcgcaacccagccagcggcgagaaccctgggacaaggacaattactagcgtcggcgctacagcaagcggatcaggccaagaggacctgcttgtggccaccaatattacagaggcgtgtaagagtgaatccagtctcgctgctccgccatcgaagccgtctgtatctttttgttttgttttggtcggagtttatttgctctagagagaccagtcacctggtatggaacatctactaatttcagagaattttgcatgttcgtctcggtgtgtcgttacacaatttgcggatgttgcaacgacactgaatcctgcgtagaggtgacgggcggcgaagaagctagccaagctgtgaaaacggacacggacatatggtaggttatcctgtatccttttcaatcgaatgtaggattggatacacataattataaatcgattgtttcaggtatgttgttgtttgctccactctgctcttggaacgcctcagctgttcctcttgctctatcatgaatgcttctgttagccatacaac

SEQ ID NO: 98022 - DNA, 585 bp, Zea Mays
cttaatttttgtcctatatataattatttttttgcatgataactgggaattgtatgttgtgtcacgaccatccaacagtttatgaactatactcatcaagtcttggtggtgctcctaatgcaaatggggattcaatgacaacacgagtagctgttgatcaccatatgcatcaagattttcaaccaacaagtaaaagttcagacatgtctttcagtcacattattgctctggtatacattctgctttattaatgatctttcaaaacaatttagattaaagcatttaactttggcacaactacataatcagccaaaatatgaagcttagtttctcacgataaagaccttggtaggatgtcaaggagcaccctgtcgtcatctatatgaagggttatcctgatgctcctaggtgtgggttcattgcattaggagtgaaggtcgtccatcaatatggtaatttgtctataagtgcggcttatttcaaatgcaagttacggtggtatcgtcttcaagcacacctcttcaagcagcagttgccgatgttcaaaaggtatcgtagtttaacacacaagttactgtggtttgt

SEQ ID NO: 98023 - DNA, 80 bp, Zea Mays
gtgcacccgacgacagaaagctgctgctttctgtccaacggctagttgagggtgtggaggctataaataacaccccaacc

SEQ ID NO: 98024 - DNA, 1133 bp, Zea Mays
ttatcttacaaagaacatactatggttgctgatctccctactgatatccaagaacttttatctcgattttcttcagttttttacatacccaataccaggccaccagtgagagaatgtgaccatcagattccactcattcaaggggccatgccagttcaaatgcgaccctataaatatgctcctaccttgaaaactgagatagaaaaacaagtggaagaaatgttacaatcaggcattgtccaacctagccaaagtgaattttcttcatcagttatcctggtgaaatagaaagatcatacatatcacttttgtgttgactacagacatttaaatgccttgactctcaaaaccaaatatccagtccctgttattgatgaattccttgatgaattacatggggctgcatggttctctacccttgatttaagggcaggatttcaccaaattcgcatgagtccaaaagatcaacacaatactgcatttcaaactcaccacgaccattttgagtttagggtgatgccttttgatctttcaggagcaccaacaacttttcagagtgcaatgaactcaactcttgctcctcttctcagaaaatgtgtgctagtcttttttgacgatatcctagtatacaacaaaacctggacagacctcattggtcacttatagcaagttctccaaattctttagaaggatcaatggtttatcaagatgtctaaatgtgcctttgcccaacagaaaataggctatttgggacatgtcattagtcagcaatggatggctactgacccatcaaaaatagaggcagtgtcttcatggcctacaccttcaaactgtaaagacctcagaggatttcttggacttgcgggttactataggaagttcatcaaaaattttggggtaattgctcgacctctcaatgatctattgaaaaaggggtattgttcatatggacacaagtgcatgaagaagcttttcacaccctcaaacagggcctaactacaactcctgtactcattcttccaaagttttccaaaccgtttgtcatagaaacagatgcttctagcaaagggattggggctgttcttctacaaaacagtcatcctttggcatatatgagcaaggctcttggggtt

SEQ ID NO: 98025 - DNA, 438 bp, Zea Mays
atgcagcagcagggacagagcagaggccgaacgagctctagagagaggcgcgatacggcgggcggcgcagaaccgccgcgcggccaggagcagcgcatcgaggagctgcgacgccaggccgagcccgaggagcgcggggcccggagggagactggatcttccggcagagcatctgcgcgcgcagagggactcggcggccatggccgagggagcagggaaggagtaccgcggcgagcagagaggagcgaggagcagaggctgggcgagtcccggcgtgcagggagggatccaggggagccgccatgggaggggcaaggaagaagggcgcgccggccatggatggagatggcgaggaactcggctggagggggcgtcgcgaggaagggtgacgcgctggagatagtcggcggtgcgagcagggaagaagcaaagggatga

SEQ ID NO: 98026 - DNA, 474 bp, Zea Mays
tcctttcttcgtgcgcactccactttcgccggcgtcgccatggacgccaacgtcgtgcagcgctgcctcgaggccggcggccgcgacttcctcttccaccatacctcttcccctccctctccgacctccgcctctgccgctgcatcctcctccatcctccaatctctccccctccacgtgtccttcgaccgcgggtattacctcctcgtcaaggcgatccaggagctgcgtgcgcgcaaggacggccacgtcgttaccgtcggcatcggcggacccactggctcgggcaagaccagcttggctgagaaggtggcgtcggtgctagggtgcgtcgtgatcgtctccatggaggactaccgcacggcacctggtgtcgacgacggcatcagcgacgtcaatgccgtcgatttcgacgcacttgctcgcaacctccagatctttgcagtttcctcaatcaaggctgattacacatga

SEQ ID NO: 98027 - DNA, 1371 bp, Zea Mays
ttgattagtgcccttacagtcatgtctattgagcaggatcttgtgaagggtaaagatacaatggtgccactagttgattttcaagagaagaaacgcaccggatggagggaactgagaatttcttcatctggagtggtgattgtcgatggtgcgtatgctctgcattcaacactacgatcattgcttgatatccgagttgctgtggttggcggcgttcattttagcctgctttctaaagttcagcatgatattggagattcttgctcattggactatctaatcgacagtatatttccattgtttagaaagcatattgagccagacctgcatcatgcccaaattaggattgataacagctttgtctgctcatttcgagaaccgtactacaagctgaagtgcaaaaatgagtcatcagatggcaagaagttatattcttttgaacaaaataaagtggaaactgagaactttattgagatgtaccttaggccgccttttgcttctgaagaaatgaagattgatgattggattaaggttaggcaatgtggaataagatactatctatctctcggagaccaaaggattgttgacaagtacttcataatccgtccaaaagctgagtttgaggttggacgaacaactcttggaggattgttggccttggggtacaatgttgttgttagctttaagcgtacatgcacatctgtcaatatagatcaattactgatagctgcagagaccattgacactctaaatgagacctttttggtattaaaaggtccaagcagaaagattgttgcagcagaggcttcaaagcttggtataaagggaccatggatcacaaaatcatacttagaaatgatcttggagagcaaaggggttccacgacttaatacaccaccaccggtatcaagcaaactgctaactgaaagtcaagaaaagaaaattgctgcacctaaacctattcgtgtttctgctgaaaacattacaaatcttgatgacttgatgcaaccgtggacgagatccccgcccaagaagttggaacaagaacacgtattggcaaaatggcagtttatctcagattcttcttcaagaagtaacatccagctggctcctctgccagattcttatgacctggataggggccttctcctatcagttcaagcaattcaggcattgttggagaacagaggataccctatcattgttgggattggtggtcctagtggatcgggaaagacaagtttagctcagaagatggcaaatataattggctgtgaagttgtaagcttggaaagttattacaagcctgaacaagtgagagattataagtatgatgattatagctcattggatattgctttgctcactgag

SEQ ID NO: 98028 - DNA, 751 bp, Zea Mays
gaggttgaggacgagagtacgatccaggaccggctcgttgaggtcatggagttcgccatgcccttcgtctggcgatagtacttagtgatggagagatcaccctagacgaagacccggaaggcagtgtcaaggtggagggcttggatcttgcggctgccaaggaattgctcctcaatggcaagtcacgcctgatgaacgatgagggtgttgaggatccaagaaaggaccacactgtctatccggtaccaagaaggcacctgtgaacaaccgacgttgatgaggacgtggtcgttgtgggcatatcgttgcaagggtgagaaggataaggtcgcgctagcgagcgtaagcggagaaggctgggtcgaggacgattggaaccaacgacctcatgttttgaacatcggtcgcttgggcgtggaggatagtgacgacagaggcttcgtacgacgagggagctacatcgtcgtggtcgtaggtggtgaggggagcagccacaagctgccgctttgcctccgcgagctgagtagtaagggcatatgtggcagccatagttattaaggtggtaaggcgaccgaccgcctttttaccttttagacggtaaagcgtaaggcgaggcgacgccttaattatatagtaacataaaagattataccaattattatctatataacactatctcaaaattaataagcaagctagcataactataaagcctagtaggcccattttagcctagtagaagagagataag

SEQ ID NO: 98029 - DNA, 123 bp, Zea Mays
attataacacagaacattatggacataaaaaagaggcataaagcggaagttccttgcttcgactttgaaaattttagccgaaaggggttcaaggagcttcaagtatccgaggaaagtggagtg

SEQ ID NO: 98030 - DNA, 950 bp, Zea Mays
ggtttcagccgccgccgccagactcccgcccagggcttccgccgccgtctgcctggcaccgcgcccctgcttcaccgcgcctggccgcgtccctgctgcgcagcgtctggccgcgtccagccgcggccccgccgccaccgcgcgcgccctcagccgcgcaaggaccggccgcgccgcccagggcgcctccgccgccgcctcatctttcccggcgcgcccatggctggtcagcagcgcccctctctctccaactcctccttccctcccctctcctcctgggtgcgcgctgcatcccctggccgacgcgccgccgtgccccaccccctgccagccgccgccgaccctacctcccctgctggcgcgcccgccctggtagcaggagcgtgggggtcggttcccgtctcccccgcacttgggcccgcgtggggggctgcgcctagcgccaccagtggggaccccactgctgccggcgccgcctctgctcttgcggccgtggcggctgtggttccggcgggaactgccgatctggaggactccaacccgccaccgccaatccccccgtcgatggttgtcgatccgccgcctcctccaccgctcacccaccaggaagacactgtcgccgccctcaccgctgctcgtgcggagcacgctgctcgacaggcccgcttgcgggaagcggccctcgcgtgggatcgcgcgcgcggccgccgatgctatcgctgctcaaattgccgcggcggaacagcacctcgcttcgcctgcggcccacgacggcggggccacctccgctaacaccatgggcggcgtgtacggcgtcccgaccgtaccgacagttgggaccgggccccggaccatccccgaggtgctctggcatgacccggctgacccgctcgtggctcagctccacctacaggctgggagtgtccagaacattcgcctgatggttccgg

SEQ ID NO: 98031 - DNA, 628 bp, Zea Mays
ctgaccgaaggtgagtgtatccgggtcagaatttgtgaaggaagatttgcattgttgatacgagaggtatgcacgcttattttgttttcattatgcttctttcattctttgacatgaatctataacacattgccctttctcttcccttcaatattttgctagcctataagggaaggaaattttattatccagccaaaggttgattttgatattagtgccagtactgttgcagggcttcttaagcttggttaccaagctgttgcatatattgaagcttctgcggtgatttaccaagatggaaaggttattatgttccttaaccagtgtagctcttttttttatttagagaaaaggatgcatacttgcctaccactaaatggacaaagtcttttttatttttgtaaaagtctccctactcctgtgctattatgccattattgcttgcttgtacaaagatttatcctttagtattattgctgagtatgcatgattaaggcttaaataacttaggaattgtgaattttgctggcacatttccaggtttggtttattatttgaatgcctttaatcctttattaagaggaaggttttaatgttttatcaaagcatcattacgtttttatcctgt

SEQ ID NO: 98032 - DNA, 968 bp, Zea Mays
tagttaccaagctgttgcatatattgaagcttctgcggtgatttaccaagatggaaagattttaatagaagttgaccatctacaaggagtgtcgactccatatcttcaaattaaagggacaaataaagaaattgttacctctgctggttctgcactctgcttggatggttcatacacaacaaagagttatcttcaaattattttggagagcttaccagctgatggtaatgtatctattggtattcacaatcaacaagctgcaaggctgcaggaactggttgagttcatccagtcacagggagggagctttaattcagatttatcgtcaccaatacgagaaacttcctctacagatagtgtgattgatgatatgcagtccaggataaggaagcttgagagatggaatacgataaacatggttttgtggactatattattgtctgctcttgttggatattccctataccagaaaaaacgtcactaggttctctggcagttttactgatagggtaggacgcatacctcattcatggcgtctgcagaactgacttgcacgcttcaggcacaaagttgtaagtgctagagaaaatgaaaagcagcatgtagatacaagatctaagacgtgagagatggcctgcgctcatgccatccctgatggcagtcttatttgtttgatcactcaatgtctgtaataatcttctcgtatgagatccatcaaaaaaatttgtgcagttaatgtgtatgaagcactaacgttgataatcttctcatatggtccatgggcgtttatgtattgtcatcaccacttaagtattctcatctccattaggccttgttagacactcgtatttgtctcgatccatgtgtattgaggtggattggaatgtaacttaaattaaattacatctcaatccatgacaatacacgtggattgaggtgtccaagtattcttcacgtggattgtttaa

SEQ ID NO: 98033 - DNA, 956 bp, Zea Mays
tagttaccaagctgttgcatatattgaagcttctgcggtgatttaccaagatggaaagattttaatagaagttgaccatctacaaggagtgtcgactccatatcttcaaattaaagggacaaataaagaaattgttacctctgctggttctgcactctgcttggatggttcatacacaacaaagagttatcttcaaattattttggagagcttaccagctgatggtaatgtatctattggtattcacaatcaacaagctgcaaggctgcaggaactggttgagttcatccagtcacagggagggagctttaattcagatttatcgtcaccaatacgagaaacttcctctacagatagtgtgattgatgatatgcagtccaggataaggaagcttgagagatggaatacgataaacatggttttgtggactatattattgtctgctcttgttggatattccctataccagaaaaaacgtcactagttttactgatagggtaggacgcatacctcattcatggcgtctgcagaactgacttgcacgcttcaggcacaaagttgtaagtgctagagaaaatgaaaagcagcatgtagatacaagatctaagacgtgagagatggcctgcgctcatgccatccctgatggcagtcttatttgtttgatcactcaatgtctgtaataatcttctcgtatgagatccatcaaaaaaatttgtgcagttaatgtgtatgaagcactaacgttgataatcttctcatatggtccatgggcgtttatgtattgtcatcaccacttaagtattctcatctccattaggccttgttagacactcgtatttgtctcgatccatgtgtattgaggtggattggaatgtaacttaaattaaattacatctcaatccatgacaatacacgtggattgaggtgtccaagtattcttcacgtggattgtttaa

SEQ ID NO: 98034 - DNA, 2041 bp, Zea Mays
tgtgaagcatagtcatatatatagcttatttctaatttccagtttcatggttcctttgtgctatccagagttatcttcaaattattttggagagcttaccagctgatggtaatgtatctattggtattcacaatcaacaagctgcaaggctgcaggaactggttgagttcatccagtcacaggtatattgctgtagattcgtatgtaaaatatttgtacaccatactaggaagctgccttgataagctatttgtgagggaagtatcaatgcaacgtttactacaacttagaatgcttgtctgaattcaggtaccatattgttaaccattgtttcaattaacatgttcgactatgtaattaggatgatcaggcttgccatatgtgttgatcagccctgcccgcatatgtgccttggtgtttatggtagttgatcagaggctaggcaaggatctccactgattgagtgctttctatcaaccttagacgatccttgtctatatattgtacaccccttctacctctataatcaacctactattggcggcatatactttcctacatggtatcacgagattatctcacttccgctctctagggctagtcgccgcctttcctgctgccttcctctctttcgcccccccccccccccccctcggcctcaccccgccgctcgtcctccatagcggctccaccttcaccgtgaccctaaaccctgagttagggtttcccacagtctacaccgacattgactcggctagctgccccgacacgctccagtttacatccagctatgccgtgttccaggacgccaacctcgtctcctgggactcgaagcggcaacccgttgtctcccactccggtgctgaggcgtcgagtgtattcactgagttccgatccagtctcaacatctgtacaggatagagttgatactgcgaggggtgtttgactcctgtttagggttagattagagtttttctgtatttacctaattagccctgttgtaatgggcttggcccacttaactcctctatataatatattcccaactctggattagcgttagggtttcagtctatccaacagctaggcttctaaaatgtacaaggctacttagttcttcaacaactatctttctgctaatattttatggttactgttctttccaagttattctcatatactggaattgcagggagggagctttaattcagatttatcgtcaccaatacgagaaacttcctctacagatagtgtgattgatgatatgcagtccaggataaggaagcttgagagatggaatacgataaacatggtcatcttttaaattctgtgttatgttttgtttattaaaatttagctgatgcggatttgaatgttttggtacatataaatataactttgttggtgtaattatatatattatatcctaaataaatttaacattatgcaaagtcattgctcaactgttgacccacttggtttcatatgcaggttttgtggactatattattgtctgctcttgttggatattccctataccagaaaaaacgtcactaggttctctggcagttttactgatagggtaggacgcatacctcattcatggcgtctgcagaactgacttgcacgcttcaggcacaaagttgtaagtgctagagaaaatgaaaagcagcatgtagatacaagatctaagacgtgagagatggcctgcgctcatgccatccctgatggcagtcttatttgtttgatcactcaatgtctgtaataatcttctcgtatgagatccatcaaaaaaatttgtgcagttaatgtgtatgaagcactaacgttgataatcttctcatatggtccatgggcgtttatgtattgtcatcaccacttaagtattctcatctccattaggccttgttagacactcgtatttgtctcgatccatgtgtattgaggtggattggaatgtaacttaaattaaattacatctcaatccatgacaatacacgtggattgaggtgtccaagtattcttcacgtggattgtttaa

SEQ ID NO: 98035 - DNA, 1055 bp, Zea Mays
agttcccatctcagactcagggagagacgagagaagtggacacctcgcctgcctggactcgtctactctagtatacagaaaaaagcagaagagatacggggatgtctaagacggcgggcgtcggcagactcggaggagccggggcggcggacgcggcgcagcagcagcagctggcggcgggtgatgctgcggtggcgcgggcggcgcggcccatcgagacgctgctgcgcgcggcgccgctggtgctgtgcgtggccgccatgaccctcatgctccgtgaccagcagagcaatgagtacggcaccgtcgcctactccgacctggggggcttcaaatacctcgtctacgccaacggcctgtgcgccgcctactcgctggcgtccgcgttctacacggccgtgccgaggcccgccaccgtgtcgcgctcctgggtcgtcttcctcctcgaccaggtgttcacgtacctgatcctggcggcaggtgctgcggcggcggagctgctgtacctcgcctacaacggcgacaaggaggtgacgtggagcgaggcgtgtggtgttttcggcagcttctgccgccaggcgcgcacatccgtggccatcaccttcggcgccgtgctctgtttcatcctcctctccctcctctcctcctaccgcctcttcagcgcctacgaggcgcccccgccgtcggcgctcggcagcaagggcgtcgagatcgccgcgtacccacgctgaagccgccggccattcatcggaggctctggagggcgatcaagtaacgaagggagtaacgaaggctgaattgtgcttgactgcatcgttcttgcgtgtactgggtggattgaccttgaacttcttactacagccgtaaattctgtgtatgtttcgttatggcaacatctttctgtggaaagaatgtttgtaacaagcagacgagaagttgtgtgggtaggaaattgtagcaaaattgtttgccagcatcagcttcgacttctatcgttgggccttcaatttgaaggtgccaggacttagcccgctaggaaatcagtaactaactcc

SEQ ID NO: 98036 - DNA, 846 bp, Zea Mays
gcgccaaacaatcaaaccgggacttccttgtcacagtccatgtcgtagctattatgacatgggaatgggatggatgctgaaactttgctagctagctagctgaaaggctccggccgggcctggctggtacacacgcccagatccttgttgtgcacgtacgttccaaacttgctcatactactcagagcgcggcgacatgttcggctttctgaaacaacggaggcagaccccgtcagggttctcgtcgtcgtcagccgccgaggaggtcaccgccggcatcgatggctccggcctcgtcgcgatcgtcacgggcgcgtctagtgggatcggtgccgagacctgccgagttctggcgctgcggggcgttcgcgttgtgatgggcgtgaggacaccgtctgccggtgagcgcgtcaaggaagagatcgtgaagaacgtccccgctgccggtatcgacgtcctccaacttgatgttgggcctgtttgtttcggcttctggcagcttctggccaccaaaagctgatgcggactgccaaacgctcagcttttcagccagcttctataaaattcgttggggcaaaaaccatccaaaatcaacataaacacataatcggttgagtcgttgtaatagtagaaatccgtcactttctagatcctgagccctataaacaaatttatcttcctccacacgtaatcgtaatgatactcagattctccctacaaccagattctccccacagccagattctcagaaaagctggtcagaaaaaagctgaaccaaacagacacgttagcagcatgtcatccgtcaagagattcgctgacaacttcaacggactaaatctccca

SEQ ID NO: 98037 - DNA, 1223 bp, Zea Mays
gcgccaaacaatcaaaccgggacttccttgtcacagtccatgtcgtagctattatgacatgggaatgggatggatgctgaaactttgctagctagctagctgaaaggctccggccgggcctggctggtacacacgcccagatccttgttgtgcacgtacgttccaaacttgctcatactactcagagcgcggcgacatgttcggctttctgaaacaacggaggcagaccccgtcagggttctcgtcgtcgtcagccgccgaggaggtcaccgccggcatcgatggctccggcctcgtcgcgatcgtcacgggcgcgtctagtgggatcggtgccgagacctgccgagttctggcgctgcggggcgttcgcgttgtgatgggcgtgaggacaccgtctgccggtgagcgcgtcaaggaagagatcgtgaagaacgtccccgctgccggaatcgcattttctcctttcaccctttcggatgatggaattgagttacaatttgcaacaaattaccttggccattttctactcactaatcttttacttgaaaagatgaaaatcacggccatggagagtggaatagaaggtagggttgtgattgttgcttctgacagctacaagcacacgtatcgagagggaattcgttttgataaactcaatgatgcatcaggctataaaggcatcctggcttatggccaatcgaagctggccaatatattgcgttccaatgaactttcttgccgcttgaaggaagaagatgcaaaagtagtagtcaactcactgcatccgggagttgttgccaccaacatcacgcgccatctgggtatcataaaagatattctttctccaattgctaaacttgtactaaggggtgttgaacaaggtgcagccaccgtttgttatctggcattgcatcctcaggttgctggagtcaccggcaaatactttgtggatttcaatgctgttgaactaaaaccgcctgcaactgacaaggagttgtccaaaaagctctgggattttagtgtcagcctactccagtgatataactgccgattagttctcctacgccagctggtaaataaaggtcgatctgaatgagagatcatgtttcagtaatagaacaaggtgatccagcagtgtaatatctactactacttattgtttgactagatatggatgccatatgtttgtaatttgaataaattgattggatacatttctgcac

SEQ ID NO: 98038 - DNA, 3399 bp, Zea Mays
tcccgaatcgatatatagccgaacacgaaccggcagtcctcaaatacagttgctgcaccgcaaccccgcgccaaagccagcgcggccaaacgacgtgacgaccaaacgaagcaaccaggcgccgaaaaggatagccgaagtgcgaaacccaacagcaaggagaaggcgaggggaaaaaagaaagaaaaggcgcatcgaaaaggcaaagagcgagctccctctacccgcgatccccgcacaccggccgccggcgttcgtcgccgccgcggatgagatgcgctccccctccggcggcggcagcgtggtggcccgcgcacgttcgtgaggggccctccgccacgcgcccaggttactgtggctccgagtccgagttcgctccccgcgcccgcgctatcgccgcggggcggagcggatcccccaacatgtggcttttctggcgcactaggaatcgcttctcccttgaggagctccggtatctaacagatcagctacaaaaggttcatgttgtcaatgaagctaataaggaatttgtgattgaagcattgcgatcaattgcggaacttatgatatacggtgaccagcatgatgctttgttttttgaatattttatggagaaacagatcatgggtgagtttgctcgtgttctaaggatctcaaagctgtcaagagtgtcactccaattgctacagacaatgagtatcatgatccaaaatctgagaaatgaacattcaatttattacatttttagcaatgagcacatcaacttcttggttacgtacccattcgattttcgaattgatgagatgttatcgtactacatatcttttctgcgggcgataagtgggaagttgaacaagaatacaatttctttgctcgtgaagacgaaaaatgatgaggtcacttcctttcctctttatgttgaggccttaaagtttgcttttcacgaggatagcatgattcgagttgctatacgtaccttgacactcaatgtctatcacgttggagatgaatctgttaacagatttgtttcccgcacgcctttatcagattatttttcagacatggttcagcattttcagaagcagtgcattgacttggataagttggttgcacgctcctcacgaaagggaaattcttctgtgccaatatcttctattgaagatgcaattgtgcaaattgaagacacactgtattatttcagtgatgttatgtcttctggtattcctgatcttgaaaggttcatcactgaaaatatcttgcgagttctggtatttcgattcttactcccgtcactgcagaggcagagcacagatttggacttaagtgtcactacatccatgtatctactttgttgtatactacacatttttaagaataaggatatggcaagtactgtagctgctgccctttttcatcaacctgatggccctgatgataggaagcaaaggacacctaatggatatacatctgagcatgatagttgcaaatctgagaatcattgcaccactgcctctggtatcgagcaatcaagtgaggagccaaattctttgtcttctgttagttggaaacacttgcccaacaattcatcgcgaagtgattgctgccaaggaaacacaccaagggaacacttgctgtcctatatcacagaaggagatgattcacaagctttgggttcattgtgcttattcgctacattattgcagacgaaagaacttgatgaatcaatgctggatgcccttggaatcctccctcaaagaaagcagcataagaaacttctattacaagctttagtaggtgaagaccttgctgaaacacaattattttcgtcaagcagcagtctaactgatgacagcatttgtagtgattttgatatttatgtaaggaagcttcaggataaatatgggctacaatgtcaccatccacggcaaatgacttccaaagctcacagatatcaggtgctcgatgctttagtcgaccttttctgcaggtcaaaggtttctgcagatgttcgtttggttggtggctggcttttccggcaactgctgccccatggagaggaagagttcactgcttttcatctaagacgactaaaggattcacacaaggattgtagctcaaagctttctgaggaatctggaggatgctggtgtgacatgcttcttcctattgttaaagaagcttggaggaactgcaagaaagcaattgaggcatcttcgccaccaaaaggatccaaatctattattgtacccatggatttgtgttcatttgaaggtgattcttctgttgccatcgcagaggcactctatgagatggttaagggttttgtgctgcagcatcaagttatactcttctgtcttggagaaactttcacagagctacctcctatttaccctctggttgatttgcctataaatactagggcaagcgctgcagattttggtggttcagttcctaaacctgggcttgaagtcaacttagtcgacgctgttccttgtcgaatagcatttgagaggggcaaagaacggcacttctgctttttagccatagctcatggaacttctggttggattcttcttctagaagaattacctctaaaacgggaacgaggaattgtccgtgtcatggcacctttggcaggatctgatccaagaatagatacaaagcatgggaagtggttacatctacgcattcgcccttcttcggtcccttttttggacactgagaagcataaagcgaagacaaagaagtatcttgttgatgggagatggacccttgcttttagggacgagcagtcctgtaaggttgcagagagtatggttattgaagagatgaaactccaacgaggtgctgttgcagagcaattgaagccattggttgaatttgacatgcctgaggatggaatgcagcacccccagacttcacatgaaaccccttctgatgatggatcatgactaaattttcatcaagtgcagtgttgagcttctcaattaaggagacatggcaacagatggccgcaaaagtgccgcattgaacatttcaagcatgctggcaggaaaacccaccatggcaagtcatcgacaattctgtacattacattgggagattagagatgtctccttgttaacacacaactgtagagtttcgggccgtcctgagttgaactagctggataggattctttgtacaatagtttgtttctctccttgcccgttgtaaccttatatatcacatcaaaacccattctttgttaagtttcagggcacagttgtgttgtgcacacgaaatgtttaaagaaatttgcagttagtcatacctgttgtcaaagcaagccttgcctatgtggtaataaaatgtcagatcgataatttttcttggaaatatgaatgttcatggactgtt

SEQ ID NO: 98039 - DNA, 3234 bp, Zea Mays
aggagaaggcgaggggaaaaaagaaagaaaaggcgcatcgaaaaggcaaagagcgagctccctctacccgcgatccccgcacaccggccgccggcgttcgtcgccgccgcggatgagatgcgctccccctccggcggcggcagcgtggtggcccgcgcacgttcgtgaggggccctccgccacgcgcccaggttactgtggctccgagtccgagttcgctccccgcgcccgcgctatcgccgcggggcggagcggatcccccaacatgtggcttttctggcgcactaggaatcgcttctcccttgaggagctccggtatctaacagatcagctacaaaaggttcatgttgtcaatgaagctaataaggaatttgtgattgaagcattgcgatcaattgcggaacttatgatatacggtgaccagcatgatgctttgttttttgaatattttatggagaaacagatcatgggtgagtttgctcgtgttctaaggatctcaaagctgtcaagagtgtcactccaattgctacagacaatgagtatcatgatccaaaatctgagaaatgaacattcaatttattacatttttagcaatgagcacatcaacttcttggttacgtacccattcgattttcgaattgatgagatgttatcgtactacatatcttttctgcgggcgataagtgggaagttgaacaagaatacaatttctttgctcgtgaagacgaaaaatgatgaggtcacttcctttcctctttatgttgaggccttaaagtttgcttttcacgaggatagcatgattcgagttgctatacgtaccttgacactcaatgtctatcacgttggagatgaatctgttaacagatttgtttcccgcacgcctttatcagattatttttcagacatggttcagcattttcagaagcagtgcattgacttggataagttggttgcacgctcctcacgaaagggaaattcttctgtgccaatatcttctattgaagatgcaattgtgcaaattgaagacacactgtattatttcagtgatgttatgtcttctggtattcctgatcttgaaaggttcatcactgaaaatatcttgcgagttctggtatttcgattcttactcccgtcactgcagaggcagagcacagatttggacttaagtgtcactacatccatgtatctactttgttgtatactacacatttttaagaataaggatatggcaagtactgtagctgctgccctttttcatcaacctgatggccctgatgataggaagcaaaggacacctaatggatatacatctgagcatgatagttgcaaatctgagaatcattgcaccactgcctctggtatcgagcaatcaagtgaggagccaaattctttgtcttctgttagttggaaacacttgcccaacaattcatcgcgaagtgattgctgccaaggaaacacaccaagggaacacttgctgtcctatatcacagaaggagatgattcacaagctttgggttcattgtgcttattcgctacattattgcagacgaaagaacttgatgaatcaatgctggatgcccttggaatcctccctcaaagaaagcagcataagaaacttctattacaagctttagtaggtgaagaccttgctgaaacacaattattttcgtcaagcagcagtctaactgatgacagcatttgtagtgattttgatatttatgtaaggaagcttcaggataaatatgggctacaatgtcaccatccacggcaaatgacttccaaagctcacagatatcaggtgctcgatgctttagtcgaccttttctgcaggtcaaaggtttctgcagatgttcgtttggttggtggctggcttttccggcaactgctgccccatggagaggaagagttcactgcttttcatctaagacgactaaaggattcacacaaggattgtagctcaaagctttctgaggaatctggaggatgctggtgtgacatgcttcttcctattgttaaagaagcttggaggaactgcaagaaaggcatcttcgccaccaaaaggatccaaatctattattgtacccatggatttgtgttcatttgaaggtgattcttctgttgccatcgcagaggcactctatgagatggttaagggttttgtgctgcagcatcaagttatactcttctgtcttggagaaactttcacagagctacctcctatttaccctctggttgatttgcctataaatactagggcaagcgctgcagattttggtggttcagttcctaaacctgggcttgaagtcaacttagtcgacgctgttccttgtcgaatagcatttgagaggggcaaagaacggcacttctgctttttagccatagctcatggaacttctggttggattcttcttctagaagaattacctctaaaacgggaacgaggaattgtccgtgtcatggcacctttggcaggatctgatccaagaatagatacaaagcatgggaagtggttacatctacgcattcgcccttcttcggtcccttttttggacactgagaagcataaagcgaagacaaagaagtatcttgttgatgggagatggacccttgcttttagggacgagcagtcctgtaaggttgcagagagtatggttattgaagagatgaaactccaacgaggtgctgttgcagagcaattgaagccattggttgaatttgacatgcctgaggatggaatgcagcacccccagacttcacatgaaaccccttctgatgatggatcatgactaaattttcatcaagtgcagtgttgagcttctcaattaaggagacatggcaacagatggccgcaaaagtgccgcattgaacatttcaagcatgctggcaggaaaacccaccatggcaagtcatcgacaattctgtacattacattgggagattagagatgtctccttgttaacacacaactgtagagtttcgggccgtcctgagttgaactagctggataggattctttgtacaatagtttgtttctctccttgcccgttgtaaccttatatatcacatcaaaacccattctttgttaagtttcagggcacagttgtgttgtgcacacgaaatgtttaaagaaatttgcagttagtcatacctgttgtcaaagcaagccttgcctatgtggtaataaaatgtcagatcgataatttttcttggaaatatgaatgttcatggactgtt

SEQ ID NO: 98040 - DNA, 1784 bp, Zea Mays
gatctcttaccggcggtaatggttactagttataattggattggatagtagtacctagtattactagaaagaactcaaccaaacagaaatatcggtatccattaccccatgtaatccatttacgttacatttcggcgaaccaaacaccaccatatttcttgcttaatgtttcgagggtgattccgtgattgtgacacattgctgtgaacttcaaacttacacttaaaatattggccttttgctttatgagcctttttttctgaatacctgatgctttataatatgtcgtgggatgtttacgtgtttctttgccatttatgcacattgattgtttttgtaggtgctcgatgctttagtcgaccttttctgcaggtcaaaggtttctgcagatgttcgtttggttggtggctggcttttccggcaactgctgccccatggagaggaagagttcactgcttttcatctaagacgactaaaggattcacacaaggattgtagctcaaagctttctgaggaatctggaggatgctggtgtgacatgcttcttcctattgttaaagaagcttggaggaactgcaagaaagcaattgaggcatcttcgccaccaaaaggatccaaatctattattgtacccatggatttgtgttcatttgaaggtgattcttctgttgccatcgcagaggcactctatgagatggttaagggttttgtgctgcagcatcaagttatactcttctgtcttggagaaactttcacagagctacctcctatttaccctctggttgatttgcctataaatactagggcaagcgctgcagattttggtggttcagttcctaaacctgggcttgaagtcaacttagtcgacgctgttccttgtcgaatagcatttgagaggggcaaagaacggcacttctgctttttagccatagctcatggaacttctggttggattcttcttctagaagaattacctctaaaacgggaacgaggaattgtccgtgtcatggcacctttggcaggatctgatccaagaatagatacaaagcatgggaagtggttacatctacgcattcgcccttcttcggtcccttttttggacactgagaagcataaagcgaagacaaagaagtatcttgttgatgggagatggacccttgcttttagggacgagcagtcctgtaaggttgcagagagtatggttattgaagagatgaaactccaacgaggtgctgttgcagagcaattgaagccattggttgaatttgacatgcctgaggatggaatgcagcacccccagacttcacatgaaaccccttctgatgatggatcatgactaaattttcatcaagtgcagtgttgagcttctcaattaaggagacatggcaacagatggccgcaaaagtgccgcattgaacatttcaagcatgctggcaggaaaacccaccatggcaagtcatcgacaattctgtacattacattgggagattagagatgtctccttgttaacacacaactgtagagtttcgggccgtcctgagttgaactagctggataggattctttgtacaatagtttgtttctctccttgcccgttgtaaccttatatatcacatcaaaacccattctttgttaagtttcagggcacagttgtgttgtgcacacgaaatgtttaaagaaatttgcagttagtcatacctgttgtcaaagcaagccttgcctatgtggtaataaaatgtcagatcgataatttttcttggaaatatgaatgttcatggactgtt

SEQ ID NO: 98041 - DNA, 1521 bp, Zea Mays
aaaatcagcatggtttctgtctccatcaattaccttgctaggtagacattttgtatggcaagtaattttcggggagagattaatttaaaaaacggtttctaaagaagaagctgtgtcttcacgcaaatcgatggtagatgaaactacatgcattgcatcagggatggctgctagtttcttcctgttgttggacagggagagcggattgaatggaggattcacacaaggattgtagctcaaagctttctgaggaatctggaggatgctggtgtgacatgcttcttcctattgttaaagaagcttggaggaactgcaagaaagcaattgaggcatcttcgccaccaaaaggatccaaatctattattgtacccatggatttgtgttcatttgaaggtgattcttctgttgccatcgcagaggcactctatgagatggttaagggttttgtgctgcagcatcaagttatactcttctgtcttggagaaactttcacagagctacctcctatttaccctctggttgatttgcctataaatactagggcaagcgctgcagattttggtggttcagttcctaaacctgggcttgaagtcaacttagtcgacgctgttccttgtcgaatagcatttgagaggggcaaagaacggcacttctgctttttagccatagctcatggaacttctggttggattcttcttctagaagaattacctctaaaacgggaacgaggaattgtccgtgtcatggcacctttggcaggatctgatccaagaatagatacaaagcatgggaagtggttacatctacgcattcgcccttcttcggtcccttttttggacactgagaagcataaagcgaagacaaagaagtatcttgttgatgggagatggacccttgcttttagggacgagcagtcctgtaaggttgcagagagtatggttattgaagagatgaaactccaacgaggtgctgttgcagagcaattgaagccattggttgaatttgacatgcctgaggatggaatgcagcacccccagacttcacatgaaaccccttctgatgatggatcatgactaaattttcatcaagtgcagtgttgagcttctcaattaaggagacatggcaacagatggccgcaaaagtgccgcattgaacatttcaagcatgctggcaggaaaacccaccatggcaagtcatcgacaattctgtacattacattgggagattagagatgtctccttgttaacacacaactgtagagtttcgggccgtcctgagttgaactagctggataggattctttgtacaatagtttgtttctctccttgcccgttgtaaccttatatatcacatcaaaacccattctttgttaagtttcagggcacagttgtgttgtgcacacgaaatgtttaaagaaatttgcagttagtcatacctgttgtcaaagcaagccttgcctatgtggtaataaaatgtcagatcgataatttttcttggaaatatgaatgttcatggactgtt

SEQ ID NO: 98042 - DNA, 119 bp, Zea Mays
tcaaagttgagtttgaaaaagtcaaacgaattataaattatagttttaaacggagggagtattacatcgaggactgccggagtaggagtaaaaatgaagaacttgcctcacatgcatct

SEQ ID NO: 98043 - DNA, 108 bp, Zea Mays
ttttatatgcatatatatcattatttaccttatgttgttatagtggtttagtagggtgcatgcatttttatgaagctgacacaacagttcgggtaattcgggaatacc

SEQ ID NO: 98044 - DNA, 95 bp, Zea Mays
gttgtttcatatcaactaaaagtctgtaaaagaaaatctaatgtcgtgctaagtagttgtaggctgctgtgcactagagcgctgcgatagataag

SEQ ID NO: 98045 - DNA, 114 bp, Zea Mays
ttttcattttttgaatgtttagtattgtttatagctttcttgttagcatagatttaccatgttgtatggatttgctcaccatggccaaccgcggtaaatgtatttgctctggac

SEQ ID NO: 98046 - DNA, 1211 bp, Zea Mays
catttctacttattgcagcaactcatgctgccaggatgagagtgcaatgtaacaaaaataaggtagtgtttcttttggagtttgggttggatgcatgttatcaacatactacaggctgttccactcagcgcacgaaaaactagtggaggtaactccgaaggaatagcacatttcttgcagctgccacatttcacagaagcaactgtgaaaaagattgctcgcaagaaaatccgtgccttccaagaactttgtgacatgtctgtggagggtcgtgctgcattgctcacacaagttgctgggctttctgaagaacaagttcgggatgtggagcttgtactggagatgattccttgtattgaagtagacatcaaatgcgagactgaaggtgaagagggcattcaagagggtgatgtcgtgacaatgtatgcttgggtctcgctacgacggcgtaatggactgactgctgctcttccccattgtcccaacttcccattccacaaggaagaaaacttctggctgcttctagccgatgcggcatcaaatgatgtctggttgtcacagaaagtgagcttcatggatgaggccactgccataactgcggcatcaaaagctatacaagatacccaggaagcactaggtgcaagtgcaaaggaaataggaaatgcagttaaggaggcagttgacagggtgaagaagggcagtaggctggtaatgggcaagttccaagccccagcagagggtactcacaacctcacctccttttgtttatgcgacgcttggataggctgtgacatcaagaccagcttcaagctcaaggtcctaaagcgcagccgtgctggaacaagaggccatgtgcctgaagaagggtcagcagcagccgtagaagatggtattgaggacgaagaggaggaagatgaagaggagtatgatgactatgagagcgagtacagtgatgacgaggaggatgagaagaacaaggggaaagggcaggggaaggtcgtgaacggatcggcccatcaaggggctgaatctgatatagattcaggcagcgatgagtgattctacactgtattatgttgagaaaatcatagaacttaaccccatctattttttttaatttgaacatatccctattaagttgcatgcatcaatctaacccaaaagtttaatccgataagagttgtgcaattcacttatattatattccaaca

SEQ ID NO: 98047 - DNA, 201 bp, Zea Mays
atggcggccatggggatggcgaaggtgctgctgctgctcgtcctcttcgtgcaaatcatcaacgtgctcaccgtctctgcgtctgcgaggccgttcaaggcggaagcggaagcggggacgacgacgatccagatggtggtggacatgttcggcgacaagaagcagtcgggatccaattcccacacgcactgctgcaattaa

SEQ ID NO: 98048 - DNA, 654 bp, Zea Mays
cacagccaaggccaagtgctccgacaagaacctgaacgagcgacacgcacgtccaaggcatcgccagcccccgccgtaggaactgaactcgcaagcagagtaaccgtagctgtctgcaagcaacacatccaacgcattagtatatataataatggcggccacggtggggatggcgaaggtgctgctgctgctcgtcttcttgatccaaatcatcaacgtgctcaccatctcagcggctgcgaggccgctcaaggcgggagcggggatcgagatggtggtggacatgttcggcgacaagaagcagtcgggatccaatggctcctcgcactgctgcaattagtagtagcagcagctagccggctgcatggcgataacaggccttttttttttctctctgcaaactgaagctcaccagtcaccacaacaggttgcaagatcagggcgcgtagagcagtagttttgcctcttcttcacggatggaggggatcattatttactctttttctttcgaggtctggagcaagctaggtgtctaggccaaaagaaagatcaaagatgtatagttgtggtgcaggaacatgcaaggccatgctctgtgattggattcattatttttttttctttttgaaacaaggagtcatattattaaatata

SEQ ID NO: 98049 - DNA, 877 bp, Zea Mays
atgcatccgacaacacatccaaggccaagctctccgacaagaacctgaacgagagcaaacacgcgtccaacaacgcatcgccagcccagccctgtagtaggaactcgcaagcagtaacccaagaataatggcgtccatggggatgccgaaggtgctgctgctgctcgtcctcttcatccaaatcatcaacgtgctcaccatctctgcgtctgcgaggccgttcaaggcggaagccgggacgatgatccagatggtggtggacatgttcggcggcaagaagcagtcaaactccaatcgctcctcgcattgctgcaattagcagtagtagctatagccggttgcattgcatgaacgtatatatgatggcgataattaacaggctttttttctgcaataaactgaagctaagctaatcacagggttgcaagatcaggccagtagagtagtagtttgtctcttcgtcacggtcacggatggaggggatcgtcgtttttttcttcttttagacgacgtctggatcaagatgtctagatcaagaaaaggaagatgtatagttgtggtgcagggacatgcaaggccacgctgctctgtgattggatttatttttccccccctttttgaaacaaacaaggagtcatgttattacatatactattccatcatcaaagcgaatcattttaggtataaatatactgcgcataaactcatatttgcttaattaattgacctgcgtgcctaattattaaaatggaatccaatttaaaggatccaaacggtgttttaatggaatctaatttagaccttattcggttattttcgttcgatgtgaatgagaagagattaagatagagtttaatttacacacaatccacgtgga

SEQ ID NO: 98050 - DNA, 777 bp, Zea Mays
ttgcatgtgcgcagtgcgctgctactaccactactctccgacaccgatcgatccgtcgagcgatggagagagacctgcaggtgatgccgccgtgggggagggaggtagcggcgccgtgcggcggcggtgcaacggagagctcgccgtcgtcgcgcagcaccagcgggtgccagtccggctggacggtctacctggaccactccaacgggatgcgttaccatccctgcgacgaccccgccgccgccgccgcccagaggtgggtgtcggcgctgcaggcggcggacgacgacggcggcgacgtggaggactccatggcctccgacgcgtcctcgggctcccggccgcgcccgcgcgaccaagacggcgagcagacgcggcgagacttcgacttggagcagcagggcccgcgaggatacatccgccagcacagccactcgagcagtgttcactgttgcagtgccagtagtggctccgccggcggcggcgtcggcggattcggttcttcgacgtggtccagctcccgcggctcgcagggcagggccaagggccacgtcgccaggaggaggcgggtcgtcgtccacggcggcggtgcggagacgacgacgcaccagtaccgcggcgaaatcgtcgtcgtccacgaggaggacgaactcgacgacacggccagctcgtctgccgttttcagcagtcatcatcctatggccatggtgcacgttaattaatttctccggttgaaagcacctccacagctcgcacgagttgcgcaatatatagcta

SEQ ID NO: 98051 - DNA, 648 bp, Zea Mays
atgagttcagacgatgattatgaggacaagtctgaggaggaggaggaggaggaggaggaggggacaggtgataatgaggagaaggggaacaacaatgggggcaaggacaagaagaagaaatctggtgatgataaggatgaagaggacaaggacaagtctgaggaggaggaggggacagatgatgatgaggaatcatttgagggggagaaggggaacaacaatgggggcaaggataagaagaagaaatcaaagacaaagaaaaagaaaaccaatatcaaggactctttgaaagtttctgtaaggagtaaaatgacaaaaggctacaaaccctgcgatttcaagatagcagataattggacccagaatttgggtaataaagaactgcgacagcaactctcgagaaagatagttgacaataaagattataagagtgttcagttcatgagtcctaagagtgacactgctcgtagagacactgatacatggaacttaacgggaagcgatattgcaaaaagctttgtggataaaactctttgtgaagacacggtggtgacgttttatgtacagtgtctcatgtatgatgaaggtcaactaggagctgatgaaaaaactgtgttttccaggatcttctgtaaggatgatgtgtag

SEQ ID NO: 98052 - DNA, 333 bp, Zea Mays
ttgctcccataaatttttcgggagaaaattccacagagtatacttggtattggatatccggttgtcacagtaggaataccggcacgaatcatcattgatatagacaaaacgtttcattgtttcccaagatgtcactattgtgccattgcaagctttgaatcacatattcgttattagatccgatagccagataacttaaattagggttcggatgctcagtttttgcacagaatgacagggttaagggcaggcatacctgtggttgctcgtcgccagcaaagggcccgacgattcgacgaagatctgggcagttccgggtaatgcggtggcggt

SEQ ID NO: 98053 - DNA, 667 bp, Zea Mays
cccgatagcaacgctcatctacgtgtgggggggcatagcacctgcagccaccaccagcttgcattgcacatagcatttccaaggacgacgacgacacgcgcgcgggcagccatggacagcaaggtctgcgtctttcagctggcgctgctcggtgtcgcgctcgccgcactcgccggccctaacatcgccggcggcatcatggaggttgggctagccagtagtagggctaccggcgcggcgcacgcggcgcggcagatgatggctcaagcgacgacgacgatgtcggtgatggaattggaggtgcgccgccgcatcctcgacagcatcagctcctcgtcctcgctcaatcctgaccgcgctgcctgcctcggagcgtgtccaggtcgcggccggccgtacaccagccgtagttgccagcatgtgtaccagtgccctagctcctgaacacacccatgcatggacgtgcgtgcttcgttcctactccagtccggccggcggcagctcgtccagcagtgcatccgattttttttttgtctttgtttttaattaccatcgtaagagctagccaaacgcatgatgtgtgccgttgttgcagcaacaacgatataacctgtataccagcgcatcagcctagctactagtccaaaactgttggcattcgtctttt

SEQ ID NO: 98054 - DNA, 207 bp, Zea Mays
atggcgtggcggcctgaggcaaatggcggcatgaagaagaagctggagaaggagtcgttgctggactgggagcttttcaatcttaggagacggccatgtcagatgcctggccaacatcctgcttcttccaaggtcattggccagtataaggcactagacctatccagtgtaggatcctgtggcacatcggatacctcgagggcttaa

SEQ ID NO: 98055 - DNA, 1756 bp, Zea Mays
cctgcttgtcccacggggttttaggaagcacgcagccacacgccgccgcctcgctctctgctcccctctccatttttcatctcattcggcgccgcggcaccccctgctcgtcactcgcgatggcccggatcaaggtgcacgagctgcgcggaaagagcaagacggatctgcaagcgcagctcaaggagcttaaatcggagctctccctcctacgcgtcgccaaggtcaccggcggggctcccaacaagctctccaaaatgtgcctgcttgatggctttgccgcccttcttcctcgtttgtcatactggctttgcatcgagctgaaccgaatcgtggatccgtggtttcctctcttgcagcaagatcgtgcgcacctccatcgctcgcgtgctcaccgtcatctcgcagaagcagaagtcggcgctgcgtgaggcgtacaagaagaagaagcttctcccgctcgatctccgccccaagaagacccgcgccattcgcaggcgcctcaccaagtaccaggtatatacttatgttccttgcgtctacttcaatgcgttctctttcattgctgaagcgcttattttattgttctaccagtgctgtgaggctagctgggtttaagatttgttttgtactgtaacttttactcattactttgagttgtcgaattgatcctgtcgaggccaacgtgcttctgttaattaaaagtggttcagacgatttgtatgacatatcgagatattcacatgtagtcgcagtgtttgttacataggtggattgttgaagcagcattagatagtactagcagtgattatagtttcatcggtcggttgcctctactgtttactatttttacttgtgaatgaacaccatgaagttttactttggatagtgattctgtatttggtatcaacttggtgccgtgctaattgtgtattactttcacatttacttggtttgactaaagttatgtttctggaagaataaaacgacccagtgggtcagggtttgtgtagggtgcttgttagttgtcgtacttgtatgtcttgtgttccaattccatatacagatggtgtaattgactagtgaatagaatgaccaatgctatatgcagtagtataatgtgtactagtagttgaagtaatatatcaagctactcatcgttcttagatcttcttgtctgttgacttgtggtgtttgtgttcttcagctctccttgaagactgagagggaaaagaagcgtgagaagtattttcccatgcggaagtacgctatcaaggcctagattagtgaaagaacagcttttatcctatcaagttctgcccagaagtttcttgagtttgatgtaccgcacatctatcgtcattacaatggaatgatgaaaacgaatatgttttcggcttctactccacacagtctttgttggcgatgctacacgtcttattaatgaattcttgtccatgtgaaaaccttcgtcggtgaagtttcatgtctcataagtgaaccgatctcttcgttcgctttgacttcgcttcccactaaagttcgtcttatagctttgctcgacctctgacgaaaagagtattcgttagggaagcttcacttgtcttaagacctcggttgacctttagccaataggatgaaacaactttgcgccttattcttggtcttcgtgatatgacgtccttgaataccaataaagataatcagataacttcaacatttgcttggagattttgcattcaagccgagcaaagca

SEQ ID NO: 98056 - DNA, 965 bp, Zea Mays
cctgcttgtcccacggggttttaggaagcacgcagccacacgccgccgcctcgctctctgctcccctctccatttttcatctcattcggcgccgcggcaccccctgctcgtcactcgcgatggcccggatcaaggtgcacgagctgcgcggaaagagcaagacggatctgcaagcgcagctcaaggagcttaaatcggagctctccctcctacgcgtcgccaaggtcaccggcggggctcccaacaagctctccaaaatcaagatcgtgcgcacctccatcgctcgcgtgctcaccgtcatctcgcagaagcagaagtcggcgctgcgtgaggcgtacaagaagaagaagcttctcccgctcgatctccgccccaagaagacccgcgccattcgcaggcgcctcaccaagtaccagctctccttgaagactgagagggaaaagaagcgtgagaagtattttcccatgcggaagtacgctatcaaggcctagattagtgaaagaacagcttttatcctatcaagttctgcccagaagtttcttgagtttgatgtaccgcacatctatcgtcattacaatggaatgatgaaaacgaatatgttttcggcttctactccacacagtctttgttggcgatgctacacgtcttattaatgaattcttgtccatgtgaaaaccttcgtcggtgaagtttcatgtctcataagtgaaccgatctcttcgttcgctttgacttcgcttcccactaaagttcgtcttatagctttgctcgacctctgacgaaaagagtattcgttagggaagcttcacttgtcttaagacctcggttgacctttagccaataggatgaaacaactttgcgccttattcttggtcttcgtgatatgacgtccttgaataccaataaagataatcagataacttcaacatttgcttggagattttgcattcaagccgagcaaagca

SEQ ID NO: 98057 - DNA, 1965 bp, Zea Mays
atctgtttcctctcgccagctttgcgggaaaagactccagaaacaaaccccgccgcccctccgcttctctcccgagtcccgactcccgagtcccgtcttctgccccgttcgctccccctcatcgcaaaaaccctaacccctcgacctctcaagatggcgtcgccgccgccgcctcccgccgcagccgcagccccagccgccgcggcgtccggaccgccgccgccggcgcaagtggtgggcaacgccttcgtgcatcagtactacaacatccttcaccagtcgccggagctcgtctaccgcttctaccaggagtccagccgcctcgggcgtccctccggcaccggcgacgacggcatggagacggtcacctccatggacgcgattaacgacaagatcgtgtccatgggcatcgaccgggcggagatcaaggcggtggacgcgcaggaatcactctgtggcggcgtcacagtgctcgtcatgggccaccttacggggaggaacagcgtcagccgcgagttcgtgcagtccttcttccttgcgccgcaggagaagggctattttgttcttaacgacatattgcgctacgttggagaggagggaggggacgaggggggcgagcagcagccggcaacggaggtcgctgctgatgtggtcgctgctgatgtggaggccgccacccctgcttctatcctggccaacggcactgtcggaggggatacagtgactgtgcctcaggatgcttcgccgcagcccgagtgccaggtggcagagcctgcacttaatccgaaggaggaagttttgaacagggaggtggtttgtaacccaccaaatgacgtgaatcctattgttgaggaaacaccggttcctgaggtcataaatgaagtgccgaataatgtaggagtggctccaccaatttcatctccctccgcaccaccggaggaggcaccaaagaagtcatatgcttcaattgtaaaagttatgaaagaatatcgaccaccagcacctgcagttccttccaggcctgcacccccgaaaacagagaagcaatcctctcctgcccccgctctggtcgctgatgctccagctttcacccctaatccccagagcggcagctttcaagatccagaagttgatgcacatgccatatatgtgcgaagtctgccattaaatgccacaccacaacaactagaggaagagttcaagagatttggcgccattaaacatgatggcatccaagttagaagcaataagatccaagggttttgttatggctttgtagaatttgaggatgccagtgcagttcaaactgcaatagaggcttctcctgttactattggtgaacgacaatgttatgttgaagagaaaagaactaccggtggttctcgtggtggtagcaggggaggaaggtttccaccagttagaggtggtaacttccgaggtgaaggtattagaggccgtggtacatataatggaggcagagggtacggaaggggcgagttcaattatcgatctgattatggaggccgaggtggcggcaggggtggctcatcgcgtggtgatgtcggctaccagcgggtcgaccactctagtgcagccagcggtcgtggtgcccgggcaccatcagccgccactgctgtcgcaaagtgagttcttggtagggtatggattgtgttttatggccaccatcattgttgaccaaaagagtggtgggtgtggtggattcgagttcatgtgaggaccatcaacaaaagacgggtcataaatttatgcttccttgttttgtggctaggcaaagcagtggtgatatcggttactaactgtagaatatacgtctgttgagatgtcctagtatgactggcttcggcgggcagctgatttgtgttttgccttttgttacttattgccaaatttatagaggttgatttgaggtgccaacaatttatagtattctctgcgctgctaata

SEQ ID NO: 98058 - DNA, 1862 bp, Zea Mays
tctgtttcctctcgccagctttgcgggaaaagactccagaaacaaaccccgccgcccctccgcttctctcccgagtcccgactcccgagtcccgtcttctgccccgttcgctccccctcatcgcaaaaaccctaacccctcgacctctcaagatggcgtcgccgccgccgcctcccgccgcagccgcagccccagccgccgcggcgtccggaccgccgccgccggcgcaagtggtgggcaacgccttcgtgcatcagtactacaacatccttcaccagtcgccggagctcgtctaccgcttctaccaggagtccagccgcctcgggcgtccctccggcaccggcgacgacggcatggagacggtcacctccatggacgcgattaacgacaagatcgtgtccatgggcatcgaccgggcggagatcaaggcggtggacgcgcaggaatcactctgtggcggcgtcacagtgctcgtcatgggccaccttacggggaggaacagcgtcagccgcgagttcgtgcagtccttcttccttgcgccgcaggagaagggctattttgttcttaacgacatattgcgctacgttggagaggagggaggggacgaggggggcgagcagcagccggcaacggaggtcgctgctgatgtggtcgctgctgatgtggaggccgccacccctgcttctatcctggccaacggcactgtcggaggggatacagtgactgtgcctcaggatgcttcgccgcagcccgagtgccaggtggcagagcctgcacttaatccgaaggaggaagttttgaacagggaggtggtttgtaacccaccaaatgacgtgaatcctattgttgaggaaacaccggttcctgaggtcataaatgaagtgccgaataatgtaggagtggctccaccaatttcatctccctccgcaccaccggaggaggcaccaaagaagtcatatgcttcaattgtaaaagttatgaaagaatatcgaccaccagcacctgcagttccttccaggcctgcacccccgaaaacagagaagcaatcctctcctgcccccgctctggtcgctgatgctccagctttcacccctaatccccagagcggcagctttcaagatccagaagttgatgcacatgccatatatgtgcgaagtctgccattaaatgccacaccacaacaactagaggaagagttcaagagatttggcgccattaaacatgatggcatccaagttagaagcaataagatccaagggttttgttatggctttgtagaatttgaggatgccagtgcagttcaaactgcaatagaggcttctcctgttactattggtgaacgacaatgttatgttgaagagaaaagaactaccggtggttctcgtggtggtagcaggggaggaaggtttccaccagttagaggtggtaacttccgaggtgaaggtattagaggccgtggtacatataatggaggcagagggtacggaaggggcgagttcaattatcgatctgattatggaggccgaggtggcggcaggggtggctcatcgcgtggtgatgtcggctaccagcgggtcgaccactctagtgcagccagcggtcgtggtgcccgggcaccatcagccgccactgctgtcgcaaagtgagttcttggtagggtatggattgtgttttatggccaccatcattgttgaccaaaagagtggtgggtgtggtggattcgagttcatgtgaggaccatcaacaaaagacgggtcataaatttatgcttccttgttttgtggctaggcaaagcagtggtgatatcggttactaactgtagaatatacgtctgttgagatgtcctaaaaataagaaaagaa

SEQ ID NO: 98059 - DNA, 2400 bp, Zea Mays
gcggccgcggcgtcgtcttcctcctcgcgatcgcccgcacaaatccaaacgaattcactgcgaccagtctccgattcaccaacgccctcctcttgtactgccgccttcgtccccaggccggcagcccttcctgccacctcgctgagggctgcggaacaactgagcccccgtgccgcgtgccgtctgcaacggcgccgaggaggtgctaaagcaggcaagcagccgcccccgctgcgccgccaatggctcggatccagcctgtgttggatgaaagaatggacccatttcttggtagattggctagaccagtcaccattgaccaatcatggtttaccgcccagggtgatctgtccttgctcaacagaccggcttccagtgacactaagacttctgcagagcttaacaatggtttaatcgagttcaacgatgcaactgcgccatcgccaggattgtcgtgtcataattgctctagtgtcgcaagcaacttcaaaccatttgcaactgtagtgtcagggctgcatcaacacttcttggatgcaaatgtagaagttacttacgcagaatacttggatttgatgaaagtggaagtcgatcagcagcttaataagctcatcgaggatataagggtcctcaagagctataacgtggctcataaatgtgacctaaatgacccgtgctctacactaggccatgttgggaagctgactgagatagacgaggggttcaacagcttgaagttgctgctggttgtggtgttccgacaaattagagagatgctcacactggttaattcttcaattcatgattttcagtgggagcatgagttacagttagaaattactggctttattattggagactgtgtcagaggtcttaaggatgaactagagaggaagttgtatgagcaaagctccattgtgaacagtctaagaaaaaattcgcaagaaactgtggctcagtgtgcttccatccgtgaagacctgattgctatttctaatatgctattaccttcagaagaggaacaccatattcctctgtgtagacatgaaagtttgggtaattggagcgacagatggaagttcagctttttcagaaagataccacaaaaggatcactctctatcttcctctgaggaaaatcagaaatctgcaacacagaaatctataagtcccagtgaagttatttcagaaaaatctgacttccgacatctgaagggcatgactggacaagaaattcttaactatttcagatctgagatcagtaaattgaaaatgttgcatgagctggatttgcaggagaaaacagaagagctgttcaaattcaaacgagagaaatggtcactggctctcaagtacgatgtagaatttgagcctttgaggaagagattccctgaagtcatttcaagatttgaccaaattatgtccaatggaatggaagcacctacaatcagtactagtgatgcagttgatgaaaggagcagattgaatagtagaattgattcactatactgtgaaaaccagcatcttaggaatttgcttgcagagaagacaaagaatgttcaggaattatcctgccagatatctgatgccagcaagaaaatgtcatctcaatattatctagagaaagaacatttgagacaagtcaagaacattaaagaagagtatgaggatctatatgttgaaagtacaataagagatgaaatttaccaaactgttacaagcaaattggttgatagtcatagggacatcttggaggagactacccaaattttgcatgctaaagtttcctcacttgaagctgcacattcagaaaaggacatggcgctgtgtttatctaacgaagaaaataggaagctgaaggaaaagttgtcaatactagaaaaggtgcatttcatcaaagataatcagcatgatcaattgctaatgaaacaagagagtgaggaaatgatactccgtgatattgagatggagccccacgtgccgccacaaagatcatgtcagatttctgatcaggatatgcagtatgaagaactcatcaagctgaatcagacattagagatggcctcaaccaccttaaaagaagttgaaacaaaaaagttggattacagtgacatcactagtgaaagaaagcaagaaaaacagttagattccatcctgatatctatcatggatttgtcaaaagaatttgtggagatggaacataaaatgtcagaagaaataaaaggaaatgagaaaaagacggagaatctaaatgatcggtgcaaccatatggtgcagcaggccatcgtactgacaaagaagggcctgtggtacaagcaaatgcttgagataagacgttctgagcttcaaaaggctgaatctgaggttgacgttttaggaggcaaggtcaatgcactcttaa

SEQ ID NO: 98060 - DNA, 711 bp, Zea Mays
attgatgccgtgcatgcagctactggatgctttcttgaagacatgcaagcttgttgcaggtataagaagtagacaaaaagagaacttgcaagatacaacataagttggaatagctagttgagaatggcttaagagacactagagagctatcaatttcatgatggaggaacaacataccttttcaaggctatgaagtcgatccatggccaaattgactttgcaaatctgcagccacaatgaagttaggtctgttggactgacttttgaaacctacgatgtgaatttcaaggaaattgagctgaaatatatttcaaaattgtattaatgtgtctaaacatcattttgtgattgatgcagttgtattgtcactgctcactccgcagatgattgggtataatgtatatagaagtgaagataccttataatgtacaaattatgatagttcaaattctacaagatgcaatagcatttttgtcagcagcatatatagaaatgacattgttgttatgcaagcagcagtcatattgtaaacatagtgacttcaaggtagctttcactggatttagtcactctttgtcctcataatttttttttgaccaggaagttctcataaattttgtagttctggattgtactaatggtattgtaaatgtatagaggatattctcgtgtccaacatttgttcatttccaaggaagcaaacattttctg

SEQ ID NO: 98061 - DNA, 426 bp, Zea Mays
atgctggtggtcttcgaggcaagcaaatcggtgttgttgtcgacctcaaaaaccaccaccagcagatccctgtcccgcacatctgctcaccgcccagcgaacttggtgccgctcgtcgacgcgtccaactccaccgtggccgatgcactcacggtggagcacctgtttcgtcgtgctcggcgcgcacacctctggttccaccattcggattcggggggtaccggcgttggcgaggcacgcatggatggaggcggtctcatccccggcggcggtcaccatctatccagacacaaaaatggcgttggcgcggacatcctcgcggcgagcaggggtgttgtgtgtgcacgccagggggaggcatcgcgtggtgtctacgccggtgggggcgggtgcgggggcgggatgggcgggctggggagcgggtga

SEQ ID NO: 98062 - DNA, 283 bp, Zea Mays
aaaagatagtggtctactagagagggcacatgttcctaattggcctagagcatagcggctcattatccttccaccgctggtggtgggcggtactcgctgctctgtgaagccagcctcacgcaatgtccgccactttaggtgttgggatgcaaaggctttcgcaaaggcacctgaaacccactacacaacttggtatgggtggtccacagtttgtagcactagacccaggcacatgcaccaaaattaacatccacactaccttattgcccccgctcgggttaca

SEQ ID NO: 98063 - DNA, 1179 bp, Zea Mays
atggcgttgagggcgtcccccgtgtcgcatggcaccgcggcagcgccgctgccgcctttcgcgcggaggaggatggcccgtggggtggtggtggccatggcgtccaccatcaacagggtcaaaactgtcaaagaaccctatacccctccacgagaggtacatcgccaaattacccattcactaccacctcaaaagcgggagattttcgattcacttcaaccttgggccaaggataacctactgaacctactgaagccagttgaaaagtcatggcagccacaggacttcctaccagagccttcttctgatgggttttatgatgaagttaaagaactgagggagcgggcaaatgaaatacctgatgaatactttgtttgcttagttggtgatatggttactgaggaagccttacctacataccaaacaatgcttaacactcttgatggagtccgggatgaaactggtgcaagtccaaccacgtgggcggtttggacaagggcatggacagctgaagagaacagacatggtgacctccttaacaagtacatgtaccttactggacgggttgacatgaaacaaattgagaagaccatacaatatctgattggttccggaatggatcctggaactgagaacaacccctacttgggtttcctctacacatcattccaagaaagggcaacatttgtgtcgcatgggaatactgcaaggcatgccaaggagtatggtgatctcaagctggcccagatatgtggcacgatagcagccgatgagaagcgccacgaaacagcctacaccaagatagtcgagaagctcttcgagatggaccctgattacacagtgcttgcgtttgctgacatgatgaggaagaagatcacgatgccagcccatctcatgtacgacggtaaggacgacaacctgttcgagcacttcagcgcggtggcgcagaggctgggcgtctacaccgccaaagactacgccgacatcctcgagttcctggtccagaggtggaaagtcgcggagctcacagggctgtctggagaagggagaagcgcgcaggactttgtctgtaccttggcgccgaggatcaggcggctggatgatagagctcaagcgagggcgaagcaagcaccggttattcctttcagttgggtttatgaccgcaaggtgcagctttaa

SEQ ID NO: 98064 - DNA, 210 bp, Zea Mays
atgggagttgagcggggcgctcgggtgctggatccgagccagggcgtgacagagagctggcgcggtgggcttgaaggaaatggggaggaggagcaaggagcttgggcgccggcagagaggagagcagggagagacgcgcgcatcagggagcagaaaattcctgggcgtgggaaactggagataaagccgccgcgcagtggaaaaatctaa

SEQ ID NO: 98065 - DNA, 279 bp, Zea Mays
atgtggaatcgcatccacatgaagaagaggcttcaggtcatggagatattcctgctaagtagtgaatcgtctgagatatttaaagcactggaaagagcaaaactgatggttggcaataggaaagaatcatgctactcgaggtgtggaagaactgacaaaggagtttctgctactggacaggttgcaagctggggtgcttatctcttgaataggaacatcatcaccatgtcgtttgcgtcaagggatccacatgaggcacagcggctcaccgtgaagtaa

SEQ ID NO: 98066 - DNA, 1994 bp, Zea Mays
gttttgtttagatccattaactgataattattagctagctattagctattgtctgatttgatctaattaggtagataattagtatttactgctatagctaacaattagctattttattatctatacctgtttgaataaaaaaatataattatttgcaggagatctaaacagggacttagtaaaatttacggttctgtcaaggttgctacccatttttttgaaagtgttacacccatttgtacggttccatgaaaccatatggctggagttgcgaatgagccgccttggcacgctgggcttttggaaggccatcaattcttgcaccggctctggcgccacgcgcccaccaaacacacagggtggactgtcagagagacaggcaagccgagcgagcggagatttgagctgggcacgcggcgcgaaggccgaggggtcgtgcccaacggccttctcagtcagcccatctcgtgcccaccacccccttcgcatttcttcccttttctgtcccacccgtcttcatccctcggactacaaatgcggcgcaaccgtgggcgtatcagcacccgagcagtttgtagcaggatcctctcgctctcgccatcgcatcgcgcacagtagacactcaaaatccgattgccgagggggagaaggcggagaccgttgcaacggctagttgcggcggcccgatggacccgtcgtacgatggcagcgcccccgccgccggtggaagcgccgacgaccatggccaaactctctgggattggacagtagagcattgtgaacccaacgattcaagtcatgcagatgctactaaattcgtgtgggattgcctcaatcaagatgacgatgagctaatgggattgcttggaaatcaaaccccgttgagagactgccgtgatttctttgctgaccttggtgatttcacatgcaaggagaccttggacctggaggaatctcgggaatcaaagcggcggcgcacattagagtacccttcagagtctagtcagtcagaagttgggactcatgatgctgcttcaccttttgtcacatctgaggcagcagaaatttcattgctctgcactgataaaccacagagcttaaattgggatatgcaccacacttcaaataatttagatgaagcaccctaccggcaagaagatattctttctgaacattgctcttatggaactccagtgtacctcgagcctgatcaaacgccttgtagtcaggagagcattgcatgtataaatgatcaatctggtatttcaggaacaagtgagactggaccaatgacagaaagtttcataatgcaggaaactagaaagctttgtacactcaaagtgtccaaaggatcaagctcaacactagttaaggtgaaggaaaacttaactacctcagtagcatatccttttactcttatcaaaccatcttgggaggaaggcgatgttaccttgcaggatataaatcagcgaattcgtgctcctcctaagaaggcccccgagatccttggaacttcagcattctctggcaagccagtgattggcaagacaagaatcagaacagaaggggggaaaggaagcatcacaatactaagaacaaagggctgagaaccggaaaataccttcgatccttatttatctgctagtctctccatttatcagatgagaaaggggagaaggcagctccttggtggtcaattgtgcaagtctgagcacctgaaacttccattgattcacagttcaaggctgagcctgaggatgccattgattcttatttatctgccattctctcgattgcttttggcactttggtcaatgtgcagacctctgtagctttccatcatttttttgttttagttttgcaccgtgggtgtcttgtgaattaatgtagacgcaaaacaacaactttcggcattcttctggtgtatttatgacatgtggtcaatgatatatatacatcaaactgaagtcaatagaattaatgtgttatattcc

SEQ ID NO: 98067 - DNA, 1534 bp, Zea Mays
cccatctcgtgcccaccacccccttcgcatttcttcccttttctgtcccacccgtcttcatccctcggactacaaatgcggcgcaaccgtgggcgtatcagcacccgagcagtttgtagcaggatcctctcgctctcgccatcgcatcgcgcacagtagacactcaaaatccgattgccgagggggagaaggcggagaccgttgcaacggctagttgcggcggcccgatggacccgtcgtacgatggcagcgcccccgccgccggtggaagcgccgacgaccatggccaaactctctgggattggacagtagagcattgtgaacccaacgattcaagtcatgatgctactaaattcgtgtgggattgcctcaatcaagatgacgatgagctaatgggattgcttggaaatcaaaccccgttgagagactgccgtgatttctttgctgaccttggtgatttcacatgcaaggagaccttggacctggaggaatctcgggaatcaaagcggcggcgcacattagagtacccttcagagtctagtcagtcagaagttgggactcatgatgctgcttcaccttttgtcacatctgaggcagcagaaatttcattgctctgcactgataaaccacagagcttaaattgggatatgcaccacacttcaaataatttagatgaagcaccctaccggcaagaagatattctttctgaacattgctcttatggaactccagtgtacctcgagcctgatcaaacgccttgtagtcaggagagcattgcatgtataaatgatcaatctggtatttcaggaacaagtgagactggaccaatgacagaaagtttcataatgcaggaaactagaaagctttgtacactcaaagtgtccaaaggatcaagctcaacactagttaaggtgaaggaaaacttaactacctcagtagcatatccttttactcttatcaaaccatcttgggaggaaggcgatgttaccttgcaggatataaatcagcgaattcgtgctcctcctaagaaggcccccgagatccttggaacttcagcattctctggcaagccagtgattggcaagacaagaatcagaacagaaggggggaaaggaagcatcacaatactaagaacaaagggctgagaaccggaaaataccttcgatccttatttatctgctagtctctccatttatcagatgagaaaggggagaaggcagctccttggtggtcaattgtgcaagtctgagcacctgaaacttccattgattcacagttcaaggctgagcctgaggatgccattgattcttatttatctgccattctctcgattgcttttggcactttggtcaatgtgcagacctctgtagctttccatcatttttttgttttagttttgcaccgtgggtgtcttgtgaattaatgtagacgcaaaacaacaactttcggcattcttctggtgtatttatgacatgtggtcaatgatatatatacatcaaactgaagtcaatagaattaatgtgttatattccat

SEQ ID NO: 98068 - DNA, 814 bp, Zea Mays
aactgcacgtctcccgctttgtgctattcccgcagccagaaaaccctaacttcccggccgccgctttcctttccctcgatccacagctcgcgccgttcctgcaagtgcgcacccatcgtcccacctacgcactgccgcccaacgatctacgagctgccatggctaactcagcggcaccgggaggaatgaggtcgttcctgcaggccgtgtctacggtcaccgaggaggcgccgacgccactccgcgtcgtccagatggagggcctggctgtactgaagatcatcaagcactgtgaggagtttgcgccagctttagttacaggtcaattgcttggtttggatgttggtagtgttctggaagtgaccaactgttttccgttccctatcagggaagaggatgatgaagcagatgcagatggtgccaattatcagcttgagatgatgaggtgtttgagggaagttaatgttgacaacaatactattggatggtaagctaagctaatttcattcagttgatttagaaagtcagtggtggctcgagtttttttttacttgcacattgacacaaaatccatcaacttggttacttgtggattatatattcaatgatcttggacaagcaaatagtaactcttgagtatgtatgactgatatgttcacaattgaccttagttttcttggccttaagtgtcttttcatatcactttaattttactatgtttttatgttatttttattatgcagcggaacaatataggcatgtacgaagtagttttaaatgaaattgtgagatacattttctgttatgtggtaca

SEQ ID NO: 98069 - DNA, 1423 bp, Zea Mays
aactgcacgtctcccgctttgtgctattcccgcagccagaaaaccctaacttcccggccgccgctttcctttccctcgatccacagctcgcgccgttcctgcaagtgcgcacccatcgtcccacctacgcactgccgcccaacgatctacgagctgccatggctaactcggcaccgggaggaatgaggtcgttcctgcaggccgtgtctacggtcaccgaggaggcgccgacgccactccgcgtcgtccagatggagggcctggctgtactgaagatcatcaagcactgtgaggagtttgcgccagctttagttacaggtcaattgcttggtttggatgttggtagtgttctggaagtgaccaactgttttccgttccctggaagaggatgatgaagcagatgcagatggtgccaattatcagcttgagatgatgaggtgtttgagggaagttaatgttgacaacaatactattggatggtatcagtcttgcttgcttggatcttttcaaactgtggaactgattgaaacatttatgaactatcaggagagcatcaggagatgtgtgtgcattgtctatgacccatctagatctagtcaaggcgtgctagctctcaaagccttaaagcttacagactcgtttatggatctttaccgtaacaatggtttaactggggagaagttaagggagaagaaattgtcctgggttgatatttttgaggagataccaataaaagtttccaactcagcgcttgtcagtgcctttatgaaggagctggaacctgagtcacctgttacccagtgtgacctggaccgacttaaattgtcaaccgccccctttatggaaaggaacttggaatttctgattgggtgcatggatgatctttcatcagagcagaacaagttccaatattataaccgcaatctctcaagacaacagtcacagcagcaggcatggcttcaaaagagaaggcaggagaacatggcgaggaaagcagctggtgaggagccactaccagaagaagatccatccaatcctatatttaagcctattcctgagccctcacgattggagggctatctagtaactaatcagatctccagttactgcaaccatatcaacggggttgctggtcagaatttcgacaggctatacctgatgaaggccttgcatgaggattagaagactgggctgtgatgaatgctgttagaattagcttgtgatactgctcaaaatcgtaattttgtgatgtacctttacatggggcgtgcctgtcctctacttaatgtttccatggaccagatggttagctcgtgatacttaatgtacttgcatatgtatgcgttgccgtataaaccaattttctccattagtatttttgtgacgctcagtttgaagtccatagtgtagcttgttttcgttc

SEQ ID NO: 98070 - DNA, 1431 bp, Zea Mays
aactgcacgtctcccgctttgtgctattcccgcagccagaaaaccctaacttcccggccgccgctttcctttccctcgatccacagctcgcgccgttcctgcaagtgcgcacccatcgtcccacctacgcactgccgcccaacgatctacgagctgccatggctaactcagcggcaccgggaggaatgaggtcgttcctgcaggccgtgtctacggtcaccgaggaggcgccgacgccactccgcgtcgtccagatggagggcctggctgtactgaagatcatcaagcactgtgaggagtttgcgccagctttagttacaggtcaattgcttggtttggatgttggtagtgttctggaagtgaccaactgttttccgttccctatcagggaagaggatgatgaagcagatgcagatggtgccaattatcagcttgagatgatgaggtgtttgagggaagttaatgttgacaacaatactattggatggtatcagtcttgcttgcttggatcttttcaaactgtggaactgattgaaacatttatgaactatcaggagagcatcaggagatgtgtgtgcattgtctatgacccatctagatctagtcaaggcgtgctagctctcaaagccttaaagcttacagactcgtttatggatctttaccgtaacaatggtttaactggggagaagttaagggagaagaaattgtcctgggttgatatttttgaggagataccaataaaagtttccaactcagcgcttgtcagtgcctttatgaaggagctggaacctgagtcacctgttacccagtgtgacctggaccgacttaaattgtcaaccgccccctttatggaaaggaacttggaatttctgattgggtgcatggatgatctttcatcagagcagaacaagttccaatattataaccgcaatctctcaagacaacagtcacagcagcaggcatggcttcaaaagagaaggcaggagaacatggcgaggaaagcagctggtgaggagccactaccagaagaagatccatccaatcctatatttaagcctattcctgagccctcacgattggagggctatctagtaactaatcagatctccagttactgcaaccatatcaacggggttgctggtcagaatttcgacaggctatacctgatgaaggccttgcatgaggattagaagactgggctgtgatgaatgctgttagaattagcttgtgatactgctcaaaatcgtaattttgtgatgtacctttacatggggcgtgcctgtcctctacttaatgtttccatggaccagatggttagctcgtgatacttaatgtacttgcatatgtatgcgttgccgtataaaccaattttctccattagtatttttgtgacgctcagtttgaagtccatagtgtagcttgttttcgttc

SEQ ID NO: 98071 - DNA, 1532 bp, Zea Mays
aactgcacgtctcccgctttgtgctattcccgcagccagaaaaccctaacttcccggccgccgctttcctttccctcgatccacagctcgcgccgttcctgcaagtgcgcacccatcgtcccacctacgcactgccgcccaacgatctacgagctgccatggctaactgtaagggatttccagagcctttcctttgcctcgctctcgtcatctcgtacggttagcgtctcatctcgcgctaaccttgggtctggttggctggcctacagcagcggcaccgggaggaatgaggtcgttcctgcaggccgtgtctacggtcaccgaggaggcgccgacgccactccgcgtcgtccagatggagggcctggctgtactgaagatcatcaagcactgtgaggagtttgcgccagctttagttacaggtcaattgcttggtttggatgttggtagtgttctggaagtgaccaactgttttccgttccctatcagggaagaggatgatgaagcagatgcagatggtgccaattatcagcttgagatgatgaggtgtttgagggaagttaatgttgacaacaatactattggatggtatcagtcttgcttgcttggatcttttcaaactgtggaactgattgaaacatttatgaactatcaggagagcatcaggagatgtgtgtgcattgtctatgacccatctagatctagtcaaggcgtgctagctctcaaagccttaaagcttacagactcgtttatggatctttaccgtaacaatggtttaactggggagaagttaagggagaagaaattgtcctgggttgatatttttgaggagataccaataaaagtttccaactcagcgcttgtcagtgcctttatgaaggagctggaacctgagtcacctgttacccagtgtgacctggaccgacttaaattgtcaaccgccccctttatggaaaggaacttggaatttctgattgggtgcatggatgatctttcatcagagcagaacaagttccaatattataaccgcaatctctcaagacaacagtcacagcagcaggcatggcttcaaaagagaaggcaggagaacatggcgaggaaagcagctggtgaggagccactaccagaagaagatccatccaatcctatatttaagcctattcctgagccctcacgattggagggctatctagtaactaatcagatctccagttactgcaaccatatcaacggggttgctggtcagaatttcgacaggctatacctgatgaaggccttgcatgaggattagaagactgggctgtgatgaatgctgttagaattagcttgtgatactgctcaaaatcgtaattttgtgatgtacctttacatggggcgtgcctgtcctctacttaatgtttccatggaccagatggttagctcgtgatacttaatgtacttgcatatgtatgcgttgccgtataaaccaattttctccattagtatttttgtgacgctcagtttgaagtccatagtgtagcttgttttcgttc

SEQ ID NO: 98072 - DNA, 1605 bp, Zea Mays
gcaaatccaggcacagaacgcgtcggcacgcgcgttgccgaattcgtggagtgcggactccgcgtgaatccctatccggtttcaatataagagatttaaatcttttttaacgaaccgagcagatccgcgccccaccttatatatatcaactggactcgaacgtcctgctctctgctctccccgcagacaaaaaaccctagaattcccagccgccgctctcctttccctcgatccgttcctccaagcgcgcacgcatcctcacgccagcgcaccgccgcccaacgatctacgagctgccatggctaactcagcggcaccgggaggagtgaggtcgttcctgcaggccgtgtctacggtcaccgaggagacgcggacgccgctccgtgtcgtccagatggagggcctggctgtactgaagatcattaagcactgtgaggagtttgcgcctgctttagttacaggtcaattgcttggtttggatgtcggtagtgttctggaagtgaccaactgttttccattccctatgagggaagaggatgatgaagcagatgcagatggtgccaattatcagcttgagatgatgaggtgtttgagggaagttaatgttgacaacaatactattggatggtatcagtcttgcttgcttggatcttttcaaactgtggaactgattgaaacatttatgaactatcaggagagcataaggagatgtgtgtgcattgtctatgacccatctagatctagtcaaggcgtgctagctctcaaagccttaaagcttacagactcgtttatggatctttaccgtaacaatggtttaactggggagaagttaagagagaagaaattgtcctgggttgatatttttgaggagataccaataaaagtttccaactcagcgcttgtcagtgccttcatgaaggagctggaacctgaatcacctgttactcagtgtgacctggaccgacttaaattgtcaactgccccctttatggaaaggaacttggaatttctgattgggtgcatggatgatctttcatcagagcagaacaagttccaatattataaccgcaacctctcaagacaacagtcacagcagcaggcatggcttcaaaagagaaggcaggagaacatggcaagaaaagcagctggcgaggagccactgccagaagaagatccatccaatcctatatttaagcctattcctgagccatcacgattggaaggctatcttgtaaccaatcagatctccagttactgcaaccatatcaacggggttgctggtcagaatttcgacaggctatacctgatgaaggccttgcatgaggattagaagactgggttgtgactgaaggctgctagatttagctcgtgatactgcttaaaatcacaattttgcgatgtaccttacatgagcgcacctgtcttgtacttaatgtttccgattagatggttagcacacattttgacacacttcctaattataccagcattcttggtagtaattcaaaaatgatcactttgattacttattagttaatgtatgtgttgccgtataaaccaatgttctccattagtaattttgggacgcacagtttaaagtccata

SEQ ID NO: 98073 - DNA, 1576 bp, Zea Mays
aacgaaccgagcagatccgcgccccaccttatatatatcaactggactcgaacgtcctgctctctgctctccccgcagacaaaaaaccctagaattcccagccgccgctctcctttccctcgatccgttcctccaagcgcgcacgcatcctcacgccagcgcaccgccgcccaacgatctacgagctgccatggctaactcagcggcaccgggaggagtgaggtcgttcctgcaggccgtgtctacggtcaccgaggagacgcggacgccgctccgtgtcgtccagatggagggcctggctgtactgaagatcattaagcactgtgaggagtttgcgcctgctttagttacaggtcaattgcttggtttggatgtcggtagtgttctggaagtgaccaactgttttccattccctatgagggaagaggatgatgaagcagatgcagatggtgccaattatcagcttgagatgatgaggtgtttgagggaagttaatgttgacaacaatactattggatggtatcagtcttgcttgcttggatcttttcaaactgtggaactgattgaaacatttatgaactatcaggagagcataaggagatgtgtgtgcattgtctatgacccatctagatctagtcaaggcgtgctagctctcaaagccttaaagcttacagactcgtttatggatctttaccgtaacaatggtttaactggggagaagtatggcctcttttctgtagctcatcattgtactagtttgtacaaatagtttttatacaatgattttgtgctgctgcaggttaagagagaagaaattgtcctgggttgatatttttgaggagataccaataaaagtttccaactcagcgcttgtcagtgccttcatgaaggagctggaacctgaatcacctgttactcagtgtgacctggaccgacttaaattgtcaactgccccctttatggaaaggaacttggaatttctgattgggtgcatggatgatctttcatcagagcagaacaagttccaatattataaccgcaacctctcaagacaacagtcacagcagcaggcatggcttcaaaagagaaggcaggagaacatggcaagaaaagcagctggcgaggagccactgccagaagaagatccatccaatcctatatttaagcctattcctgagccatcacgattggaaggctatcttgtaaccaatcagatctccagttactgcaaccatatcaacggggttgctggtcagaatttcgacaggctatacctgatgaaggccttgcatgaggattagaagactgggttgtgactgaaggctgctagatttagctcgtgatactgcttaaaatcacaattttgcgatgtaccttacatgagcgcacctgtcttgtacttaatgtttccgattagatggttagcacacattttgacacacttcctaattataccagcattcttggtagtaattcaaaaatgatcactttgattacttattagttaatgtatgtgttgccgtataaaccaatgttctccattagtaattttgggacgcacagtttaaagtccata

SEQ ID NO: 98074 - DNA, 1486 bp, Zea Mays
cttttaggggataaatttccctgtagcaggaagcattctttgtatcttaattccacaagcactgtgttatttgttttcacaataatgctatttttgcaggctgtactgaagatcattaagcactgtgaggagtttgcgcctgctttagttacaggtcaattgcttggtttggatgtcggtagtgttctggaagtgaccaactgttttccattccctgtgagcccttgctccttaacattctaagcagctctgtactgattatgtatttttctgctaaggtcttccagggtagtagttgttctttcacattttataggctaatggctatcttactattttttactgaagatgagggaagaggatgatgaagcagatgcagatggtgccaattatcagcttgagatgatgaggtgtttgagggaagttaatgttgacaacaatactattggatggtatcagtcttgcttgcttggatcttttcaaactgtggaactgattgaaacatttatgaactatcaggagagcataaggagatgtgtgtgcattgtctatgacccatctagatctagtcaaggcgtgctagctctcaaagccttaaagcttacagactcgtttatggatctttaccgtaacaatggtttaactggggagaagttaagagagaagaaattgtcctgggttgatatttttgaggagataccaataaaagtttccaactcagcgcttgtcagtgccttcatgaaggagctggaacctgaatcacctgttactcagtgtgacctggaccgacttaaattgtcaactgccccctttatggaaaggaacttggaatttctgattgggtgcatggatgatctttcatcagagcagaacaagttccaatattataaccgcaacctctcaagacaacagtcacagcagcaggcatggcttcaaaagagaaggcaggagaacatggcaagaaaagcagctggcgaggagccactgccagaagaagatccatccaatcctatatttaagcctattcctgagccatcacgattggaaggctatcttgtaaccaatcagatctccagttactgcaaccatatcaacggggttgctggtcagaatttcgacaggctatacctgatgaaggccttgcatgaggattagaagactgggttgtgactgaaggctgctagatttagctcgtgatactgcttaaaatcacaattttgcgatgtaccttacatgagcgcacctgtcttgtacttaatgtttccgattagatggttagcacacattttgacacacttcctaattataccagcattcttggtagtaattcaaaaatgatcactttgattacttattagttaatgtatgtgttgccgtataaaccaatgttctccattaggtcccattcaggtttcacggaatggtcggctagaatcattcttagtcgtattgcttctctaatttatatataatggttcattttttg

SEQ ID NO: 98075 - DNA, 97 bp, Zea Mays
ttgtacttgtacccgtgcccacagtgtacccgccggatatcaggtacccagtggatatgttattgtagactaaataatatcatggaaaacgagtaag

SEQ ID NO: 98076 - DNA, 1994 bp, Zea Mays
cgaaagaaggcgcgcggttgctgtcgttgattcttgatggttggtggcttggtgccctgccagctagtgcttcttcatcctttctctaacgagtgagggacgatgatgcactcccagtcgcaggctcccactcccaccttgcggtgctgccgcactctagctgagctgccagctcggatctccatggcctctcttttcctcctcctcctcgtcgtcgtggcggcgctcctctggccgcctgccgtcgcggcgcccgaggagcacctcgtcaccggtctcccgggcttccatggcgccttcccctccaagcactactccgggtacgtgaccgtggacgagcgcagcgagcggagcctcttctactacctggtgctgtcggagcgcgacccggccggcgaccccgtcgtggtctggctcaacggaggtccgggatgctccagtttcgacggcttcgtctacgggaacggacccttcaatttcgagcctgggagctcgcctggaagcctgcccaagctgcagctcaacccctacagctggtcaaaggtctcgaacatcatgtacctagactctcctgccggtgtggggatgtcgtactcgctgaacagatcggattatgtaacaggtgacctgaaaaccgcagctgacgcccacaaattcctgtcgaagtggttcgagttgtaccccgagtttcagttgaacccgttctacatctcgggggagtcgtacgcaggggtctacatccccacgatcactgacgaagttgttaaaggcattgagagaggtgtgaagccaagaatcaatttcaagggctatctgattggcaatccgttaactgacgtggactacgatttcaattccttcgtgccatttgcgcatgggatgggcctcatctcaaccgacatgtatgaggatgtcaaagcgtcctgccgcggcacattcttcggcgccgtggatgatctgtgccaggagaagatcgacagagtgcgctgggaactgaaggacctgaacaagtacaacatccttgcgccttgctaccatcatcccgaaatccaagaggtagagttcagcaacagcagcttgccgcggagtttcagaaggctaggagagacggacaggccgtttccagtgaggaagcggatgtcggggcgttcttggccgctccgtcttgctctcaaggacggccacgtccccatgtggccaggccttagtggcagatcacttccctgcacgagtgatgaagtcgctacggcgtggctggacgacgaagatgttagagctgcgattcatgccaaaccagtaagatatatgtagtgtgtgtggtaggtaaaaaaaagacttaaccctcaaagttagcactgatcctctagtctatgtgcacatcatcagaaaagcttaattggatcatgggaactgtacactgcaaggatagacttcactcatgatacagggacgatggtgagctaccacaagaagtttacggctttgggatatcgcgtgctaatctacagcggagaccatgacctgtgtattccttaccctggtaccgaagcgtgggtgaaatcaataggctaccaagttactgatagatggcggccatggtacttcggagaccaagttgccggatatacagaaggatacggtcacaatattaccttcctcactataaagggagccggacatgctgtgcccgagtacaagcccaaggaggctctcgcgttctacagtcgctggctggcaggagagaagttctaagaagaccaggaccattacagatttcacaagccttcagttattcgtcgctcatcggacaattactgtgtgcatggactcagagtagatgtatgcagatcagatccgttcactcggctgtgtaagcctctgtatacagctgaagagatttttaacgtgggatcttcacctctactcaattaaccatgggtcagatccattggcaatattattctactattatataaagaataatttaaatatac

SEQ ID NO: 98077 - DNA, 1918 bp, Zea Mays
cgaaagaaggcgcgcggttgctgtcgttgattcttgatggttggtggcttggtgccctgccagctagtgcttcttcatcctttctctaacgagtgagggacgatgatgcactcccagtcgcaggctcccactcccaccttgcggtgctgccgcactctagctgagctgccagctcggatctccatggcctctcttttcctcctcctcctcgtcgtcgtggcggcgctcctctggccgcctgccgtcgcggcgcccgaggagcacctcgtcaccggtctcccgggcttccatggcgccttcccctccaagcactactccgggtacgtgaccgtggacgagcgcagcgagcggagcctcttctactacctggtgctgtcggagcgcgacccggccggcgaccccgtcgtggtctggctcaacggaggtccgggatgctccagtttcgacggcttcgtctacgggaacggacccttcaatttcgagcctgggagctcgcctggaagcctgcccaagctgcagctcaacccctacagctggtcaaaggtctcgaacatcatgtacctagactctcctgccggtgtggggatgtcgtactcgctgaacagatcggattatgtaacaggtgacctgaaaaccgcagctgacgcccacaaattcctgtcgaagtggttcgagttgtaccccgagtttcagttgaacccgttctacatctcgggggagtcgtacgcaggggtctacatccccacgatcactgacgaagttgttaaaggcattgagagaggtgtgaagccaagaatcaatttcaagggctatctgattggcaatccgttaactgacgtggactacgatttcaattccttcgtgccatttgcgcatgggatgggcctcatctcaaccgacatgtatgaggatgtcaaagcgtcctgccgcggcacattcttcggcgccgtggatgatctgtgccaggagaagatcgacagagtgcgctgggaactgaaggacctgaacaagtacaacatccttgcgccttgctaccatcatcccgaaatccaagaggtagagttcagcaacagcagcttgccgcggagtttcagaaggctaggagagacggacaggccgtttccagtgaggaagcggatgtcggggcgttcttggccgctccgtcttgctctcaaggacggccacgtccccatgtggccaggccttagtggcagatcacttccctgcacgagtgatgaagtcgctacggcgtggctggacgacgaagatgttagagctgcgattcatgccaaaccaaaaagcttaattggatcatgggaactgtacactgcaaggatagacttcactcatgatacagggacgatggtgagctaccacaagaagtttacggctttgggatatcgcgtgctaatctacagcggagaccatgacctgtgtattccttaccctggtaccgaagcgtgggtgaaatcaataggctaccaagttactgatagatggcggccatggtacttcggagaccaagttgccggatatacagaaggatacggtcacaatattaccttcctcactataaagggagccggacatgctgtgcccgagtacaagcccaaggaggctctcgcgttctacagtcgctggctggcaggagagaagttctaagaagaccaggaccattacagatttcacaagccttcagttattcgtcgctcatcggacaattactgtgtgcatggactcagagtagatgtatgcagatcagatccgttcactcggctgtgtaagcctctgtatacagctgaagagatttttaacgtgggatcttcacctctactcaattaaccatgggtcagatccattggcaatattattctactattatataaagaataatttaaatatacagaaataaatactc

SEQ ID NO: 98078 - DNA, 1656 bp, Zea Mays
acttgcgttgcgttcccccacccactcacaccggcagcatgagcgccagcgccaccctccgcctcgccattattgccatggccgtggcggtctcgcactcgctcgccgcgtcggctccagcgccgcgcgacgcccgagaccgagaggggccaccggcgtcgacgacggtgcgcgccggattctacctcgccgcggccgcccgtctccggccgctcgacaggctcgacgcctccctctacacgcacctctactactccgcgctcgccgtgcaccccaccacccacaagctcgtgctccccacggacccgaaccaggcgggcctcctcgccaccttctgcccgacgctcaagtccaagaaccgggcgctcaaaaccatgctctccgtcggcaccccgggcattgcagcaggtgcggattcccgggccgacccagcgttcgccgccatggccgcggacccagcgtcccgcgcggcgttcggtgccgcggccgtcgcgctcgccagcgacagcggcttcgacgggctcgacgtcgcgtggtggttcccggcgtccgccgtggagatggccaacttcgggttcctcgtctccgagtggcgcgccgccgcgccgccggggttcctgctcaccgccacggtctacttctccaaccacgtctttgacgcgccgcgcccgggcgtggactacccgtccgaggccgtggcgaggtgcctcgactgggtcaatgtggtggcgttcggactccacccgcttgccgcgggtgcggccaacgccacggccttcgacgcgccgctctatgacagggcgtcccacttctcggcgagctacggcgtcgtgtcttggatcgacgccggcgtgcccgcgagcaaggttgtcatgggcctcccgctctacgcccgctcgtggttcctacgcaacaaggccaacagcggcgtcggggcgccggtggtcgccgcggggccgaagcagcgcgggagcaacgccaccggagttatgtcctacgccgaggtccagaaaatcgccgctgccggcgggggcggccggcgcgcggtcaccacgacattcgacaacgcgtccgtagcgtcctacctatccattggtgacgtctgggtcgccttcgacggtgcggcggtcgtggccgagaagctcgccttcgcagcgcagcgtgggctcctcggctacttcctatggccggtgaactacgacgacgccaacctcgccgtctcaagaagtgcattggatgcctggatgaagaacgagatttcgtcgaatttgaagaacgataccggcctcaggcagacacaggggccggtccggttgccgccggctctccagtcccctgcaggaacgcctggaccggcgcccgcacccacatctgggtcgcgctcatggctgccttggacgaagcttgatgcgttcctgcgttttgggtgtgccaattcttgtgtgcttttagtcgtaacaagcttgatatggtcctgcatttgggattactaattctgagttctgtaatcgaagagaatcattattgcctaaattgtgcaatttgtattctaatttgcttcaggtgtagcttagcaaatagcaacattttcaatatctttattactactttttctctgaaagcgacaacaatatgcaccggcgtaatttgagtaaa

SEQ ID NO: 98079 - DNA, 1641 bp, Zea Mays
tcctcgaaaaaccgatttgaaatctactgaaagatggctgaagtagtagttcttgacaagctcgtcggcggcgactcgccggcagcgacaacattccgccctctgctcttgtgtctcctgaccatattcttcttcctgctgctgcgctacttgagtgcaggcgcaggtccgagcagggccaggctacctccctctccaccggggctgcctctgatcgggcacgcccacctcatcggcgcgctcccgcacgtctcactgcgcggcctcgcggcgcggaagggatgcgaggacctgatggtggttcgcctgggcgcggtcccgacgctggtggcgtcgtcggcgcgcgccgcgcaggcggtgctgcgcacgcacgaccagtcgttcgcgtcccgggcgcggtcccgtgtcggcgaggtgctcacgtgcgggtactcggacgtggtgttcgcgccctacggcgagcagtggcggcagtgcaagaagctggtgaccacgcacctgctcagcgccaagaaggtgcagtcctaccgcgccgcccgccacgaggaggtagggctggtgatcgacaggatccatggagcggcagctggactggaggcagtgaacatgagcgagatcctgagcaagttcgcgaacgacatggtgtgccgcgccgtggcagggaggtcgttcagagtggaggggcgggacaggatattccgggacctcatcgcccaagctttcgacatcctggggggcataaacctggagagcttctaccctggcctggccaacgcggctggtggcgtgctgctgtggccagctctccgcaaggccgagaaattaagggaccggtggagcgagctccttgacaagctgatcgagcaacactcgagcggcgaaggagccggtgaggatgagcaagagactgacttcatacacgtgttgctagctgtggaagaggagtatgggctcacgagagacaacatcaggggcatcttgtctaacatgttcgcagcaggcacggacaccacattccttctgctcgagttcgccatggccgagctcatgctgcaccaggatgtcatggccaagctacaggccgaggtgcggaagagcccaccgaacaagggacaaaccaccgtcgtcatcggcgaagacgacgctctcgtcggaacgacgacatacctgaaagccgtcataaaggagacgctgcgtctacacccgccggtgccgctcctcgtcccgcacctctcgcaggaggactgcgacgtcgacggctacacgatcccgtccggcatgccgctgctcgtcaacgcctgggcgatcggtcgggaccccaggctgtgggacgccgcggaggagttcgtgccggagaggttcgtccgcggcggcggcggcgttgacttcagagggatggacttcgagttcctgccgttcgggtctgggcgtaggatgtgcccaggggtaaattttgcgctggcctccacggagatcttgctggcaaaccttgtcttccactttgactgggagcttcctaggggtgtagatacggttgacatggccgaggtgtttaagttgaccgtgtctcggaaacatgaactccttctcagcccaagggcggcacgagtacctttgccgagtgccgaggccacatcactc

SEQ ID NO: 98080 - DNA, 1664 bp, Zea Mays
atggcacatgaagcagcaatagttattgatcagctcgctggtgattcaccgtcggtgaaagcagttttgttactactcctggtccctgtcctcctgctctgggtcctgctgcgctacttctcttctggggcaacgactaatagtacgaaaggaaagaagaaactgcctccgtcaccgccggcgctgccctgatcggacaccttcacctcgtcggcgcgcacccgcatgtctctatgcggggcctcgccgcccggcacggtggcgaggacctcatgctgctccgcctcggcacggtcccgacgcttgtggcgtcgtccccgcgcgccgcacaggcggtgttgcgcacgcacgaccagtcgctagcctcacggccccgctccatcttcggcgacatcctcgggtacgggccgtcggacgtcgggttcgcgccctacggcgaggggtggcggcaggccaagaagctggtcaccacgcacctgctcaacaccaagaaggtgcagtcctaccgcgccgcccgcgaggaggaggtgggagtggtgatcgacaagatccgccgcgcagccatgacaggcgcggcggtggacttgagcgaggtcctgagctcgttcacgaccgacatggtgtgccgagccgtggcggggcggtcgttcagggtggacggcctggacaaggtgttcaaggacgtgatggacgcgagcatggccgtccttgggggcttcaacctggagaacttctaccctggcctggccaaggtggccggcggcgtgctcatgtggccggggcggcgcaaggctgagaggctcagggaccggtgggatgaggtccttgataaggtgatcgaccagcacgcgagcgaggcggccgccggtggacccccggcgacacgccgccttgagagtgatttcacccatgtgttgctggccgcgcaagaggagtacgggctcaccagagacggcatcaagggaatcatggctgatatgttcgcagcgggcacagacacagcgtacttggtactagaattcaccatggccgagctgatgcagcaccaggacgtgatggcgaggctacaggcagaggtgagaagcagcatgccggcgaaggggcaccaccaaggacaaggagccatcacagaagagtacctcgccggaatgccatatctgaaagccgtcgtcaaagagacgctccgcctgcacccgccgtcgccgctcctcctcccgcaccagtcgctcgaggagtgcgccatcgacggctacgtggtccccgccggcaccaccgtgttcgtcaacgtctgggccatcggccgcgacccgaggctgtgggacgccgcagaggagttcatgccggagaggttcgtcgtcgacaagggggccacggcgacggcggcggagggcgtcgtcgatttcagggggaccgacttccagttcctgccgttcgggtccgggcgaaggatgtgtcctgggatgaacttcgccctggccaacgtcgagatcatgctggcgaatctcgtgtgccattttgactggagggtggagggaggagcgaatgacattgacatgacggaggtgttcggattaactgtgcaccgaaaagagaagctcgttctcgctccaaggttatggtcctgttcctgtgctgctgctcaaccaccaatggagggctaagtc

SEQ ID NO: 98081 - DNA, 1370 bp, Zea Mays
ttggtccccgtccccttcctcgcctcgtgcgctccgcccgtcgcgccgtcatcgcggagcttccaaagcccccgtcccccaatagactcctccccatccgtgctctgctccgtcacggctcaaatactccgcctgcatctccaaagcacactgctccctctggcttcccgcctcctcttcggctccttcgcgtcccgacgccccctcatggccaccgccgccgccaccgcagcagcagcagcagtctcctccccggctgcgcgtggagcagccggggccgccgccgcctcccgccgggggttcgtcacgtttggtggaggcgccgcccgcttctctcccacgctgcggtccggccgtgggttctctggtgtgcaaacccatgttgctgctgttgaacaagcagttgtaaaagatgctaccaagctggaagctccagttgttgttgttacaggtgcatctagagggattggtaaggcaactgctctagcccttggaaaagcaggatgcaaggttctggtaaactatgcccggtcctcgaaagaggctgaagaggtctccaaagagattgaagcatctggtggtgaggctatcaccttcggaggagatgtttcaaaagaagctgatgtagagtctatgatgaaagcagctctagataaatggggaacaatagatgtgctggtaaataatgcagggattacacgagacacattgttgatgaggatgaagaaatctcagtggcaagacgtaattgatctgaatcttactggcgtcttcctttgtacacaggctgcaacaaaagtaatgatgaaaaagagaaagggaaaaattatcaacattgcatctgtagttggtcttactggcaatgttggccaagctaattatagcgcagccaaggctggagtgattggtttcacaaaaacagttgccagggagtatgcaagcagaaatatcaatgtgaatgctattgcaccagggttcattgcatctgatatgactgccgaacttggagaagagcttgagaagaaaatcttgtcaaccattccgttagggagatatggccaaccagaggaagttgcagggttggtcgagttcctggcccttaaccccgcagctagctatatgactggacaggtgcttacaattgacggagggatggtaatgtaagatttgagttagcttgatgcacttctacttttgctgagcatttaatgttgaacacccttgttgtgcacgggcgattttggacaacaaattagtgttgtctctttctttgtaatactctctggtaataaatctagcatgtggaatggaagttgaaatctgggttttcgtgtatattctgtgccaacttgtcaatgctatttgactat

SEQ ID NO: 98082 - DNA, 1465 bp, Zea Mays
ttggtccccgtccccttcctcgcctcgtgcgctccgcccgtcgcgccgtcatcgcggagcttccaaagcccccgtcccccaatagactcctccccatccgtgctctgctccgtcacggctcaaatactccgcctgcatctccaaagcacactgctccctctggcttcccgcctcctcttcggctccttcgcgtcccgacgccccctcatggccaccgccgccgccaccgcagcagcagcagcagtctcctccccggctgcgcgtggagcagccggggccgccgccgcctcccgccgggggttcgtcacgtttggtggaggcgccgcccgcttctctcccacgctgcggtccggccgtgggttctctggtgtgcaaacccatgttgctgctgttgaacaagcagttgtaaaagatgctaccaagctggaagctccagttgttgttgttacaggtgcatctagagggattggtaaggcaactgctctagcccttggaaaagcaggatgcaaggttctggtaaactatgcccggtcctcgaaagaggctgaagaggtctccaaagagattgaagcatctggtggtgaggctatcaccttcggaggagatgtttcaaaagaagctgatgtagagtctatgatgaaagcagtgagtgtagtttgtttacaggaaggaaatgttccatttcttttacaccaacctttattaccatggctttatgattcatgtgttaattgaattaggctctagataaatggggaacaatagatgtgctggtaaataatgcagggattacacgagacacattgttgatgaggatgaagaaatctcagtggcaagacgtaattgatctgaatcttactggcgtcttcctttgtacacaggctgcaacaaaagtaatgatgaaaaagagaaagggaaaaattatcaacattgcatctgtagttggtcttactggcaatgttggccaagctaattatagcgcagccaaggctggagtgattggtttcacaaaaacagttgccagggagtatgcaagcagaaatatcaatgtgaatgctattgcaccagggttcattgcatctgatatgactgccgaacttggagaagagcttgagaagaaaatcttgtcaaccattccgttagggagatatggccaaccagaggaagttgcagggttggtcgagttcctggcccttaaccccgcagctagctatatgactggacaggtgcttacaattgacggagggatggtaatgtaagatttgagttagcttgatgcacttctacttttgctgagcatttaatgttgaacacccttgttgtgcacgggcgattttggacaacaaattagtgttgtctctttctttgtaatactctctggtaataaatctagcatgtggaatggaagttgaaatctgggttttcgtgtatattctgtgccaacttgtcaatgctatttgactat

SEQ ID NO: 98083 - DNA, 1803 bp, Zea Mays
ggctcgtccgccatgtaggctaccatgctaaaattcctcccccgagccgcgggtacagtggtacaccgcgccgtcccgcgggccgcggggacaccagcctctccactgcgctctgcgctccaggcccctctctggcctctgcgaaatgccgctcttcccctccaccgccgtggcgctgccccgcctcagcatcccattcccattccctctccaccacagccccatcccccttcccctcctgctccgccgccaccactcctcgccccacccgcgccttctccccttggcggcgtccctcccgcccccacctcccgaggagctgctccacagtcaggccacgggtctcgtcgctgcctcacaggccaacttcatgcgcgtcatcgtggacgccacggccccggggctggaccaccaccgcggctccgacctgctctgcgtcgtccgcgcgctgctcaagaagatccgccgccgcgtgctcgtcggtgaccgcgtcctcgtcggggcggtcgactggaccgatcgccgcgggatgatcgaggatgtcttcgagcggagatccgaggttgtcgacccgcctgtcgccaacgtcgaccgccttgtcgtgctcttctcgctcgaccagccgaagcccgagccggccacgctcacccggttcctcgtcgaggccgagtcttcaggaattccgtttgtgctcgtcttcaacaaggtcgagctcgtcgacgagcagacaatagcatactgggaagataggttgaggagttggggctatgatccactgtttctaagtgttgataagcaatcaggatttactgctcttgaagagatgttggaaggacaaacaactgtagttgttggtccaagcggcgttgggaagtccagcctgatcaatgcactgaggtgtaaccaggacatatcagaagaagatccaatacataaactagttgaacagaatagtaaatggtttggtgaacagcgtgttggaactgtgtccaagaaaagtggtaaaggaaagcacacaacgcgccatgtctcgttgcttcctatagctagcggaggcttccttgctgatactcctggatttaaccagcctagtttgatgaaagtgacaaaaaagagtcttgcagaaacatttcctgagataagaaaagcgctgaaagagaacgagcccaaaaaatgcttatttaatgattgtgttcacctgggtgagcatggatgtgctgtgaagggggactgggaaaggtatccatactatctccagatgcttgatgagatcaaaattagagaagaaatccagctacggacatttggaacaaaaagagaaggtgatgtcaggtacaaaacaggtgtcatgggggtgaagcaagcagagcctcgtcttgaactcaagaagcacaggagggtgtctagaaagaagattaaccaatcgattcttgacgaaatcgaagatgatgttgatgacctcgatgatgactaccagtttgacgtcaagcagcgttctaggaaatgataatcttttttcatctgatgatctaacggcatgaaggaacctttgggtgctgtacacagttggttttgtagtgccaccaccatgcccttgagcagtatgctgatcactgtaagtagaagcgtaatggccggaacccggggtgtcttgacgttgctccagacgtttttctttgcggtagaacgttaagggcatgtttggaaacataatttttttagtatcaagataataccgtgatggcaacgactgctatacaagcagtctttctatgcaagcgtgcaagcaaaccatctaatcta

SEQ ID NO: 98084 - DNA, 1101 bp, Zea Mays
atggacatggaggaacagttgctgcacctggagcacttcatgcccagcagcccgggcttctttgacgtcggcagtggccacgaccccgcccacttcccgaacggcgggttattcgtcgagcaggtcggcgccaccgacgacggcgggtgggtggaggaactcatgcagctgggcgaggagctgttcggcggtccgggcgatggcggcatcatgggcgacgccgacgaccactaccagcagtggcagtgcgacgacgacgtcgacggcggctccccagacggcggtccgccaccgagcgtgtccttggacggcgacgacgcgagcccaggggagcaaggcgccggggagctcgcctccgagccgcaccgcgaggacggcgacgacgtgtcgggcgcgacgcggaagcggagggaccggtccaagaccatcgtgtcggagcggaagcggagggtccggatgaaggagaagctctacgagctcaggtcgctcgtccccaacatcacaaaggtgaggctagctccggtctggacttcggagttcggacgactgttcgctggggagctcggtcattcgattcatgtcgtccccctgcatgcatgtgcgcgccatgtgcagatggacaaggcgtccatcatcgccgacgcggtggtgtacgtgaagaacctccaggcgcacgccaggaagctgaaggacgaggtcgccacgctggaggcccggccgagatcgcctacccgacaggaccagccgcagctgcagcacggccggagcgcggggcccggccgacgacgccagcagcagcagcaggtggagcgccgcgacgcggggagcgcgggcgccggcgcccgggtgacgcacgtgggcgcggcgcaggtcggcgacggcaggttcttcgtgaccgtggagtgcgagcggcgggacggcgtggcggcgccgctctgcgcggccgccgagtcgctgctgtgcttccgggtggagagctccagcatcggccggtcggggccggaccgcgtcgtgtccacgctcacgctcaaggtctggactggactggactggactggatccatggggtggcttgtaacagcgattgattgtttgatttga

SEQ ID NO: 98085 - DNA, 2541 bp, Zea Mays
caacaatctccttcagcatcgatccgcccgccaccagcagcagcaatccgtttttcaccgtgcctttccactcaccaccagccgccggcccccaggccacaggcccaagccaagccgcgcggcgtcactcccaaaccctagctcgcccgcagtcgccggtgatgtcgtccccttcgtcgtcccctgcgcggaggcgggaggtgggggagggcggcgagctccccgtccccgtccccgtgcccgcctccgttgtcggcgacgacaaggtcctggcggcggcgcagcacatcgtcaagtcgctcgccacgtccaagaacgccgccgacgacatgatccgcatcctctccggattcgaccaccgcctctcctccatcacctccgacctcttcccgtccccgtcccccgccgccgcctccgacgcggacccagccgagccccccggtgagcaggaaccctcctcctccacctcctcctcctcgctcgcagatttcgacgccgctgagcagctcatccacctctgggacaccaccccggaggcgctcgtgttcgaggcccccgaggacgacgccgcgcactacctcgccgccgtcgacgtcgccgtcgaccacctctccgcccccgccgtctccgcccgcgccggggtcgccgtgcagctcgccatgtcgcgcctcgaggacgagctccgccacctcatgctccgccactcggtgccgctcgacgccagcggcctctactgctcgctccgccgcctctccctcggctccatggacgacctcgacacctcctccgagttcgatcccgccaccccgcacagccaggacggcggcgccggcgccggcccggacaccgcccgcagcgccagcatcgcggggaacaaccccttcgaggaccaggtcttcgacctcgtgcgtccggacgccatcgatgagatacgcgccatcgctgaccggatgctgcacgcggggtatgacagtgagctcgcgcaggtatactgtgccatccggcgtgacctgctcgatgagtgcctcaccgtgctcggtgtggaacggctcagtatcgatgaggtgcagcgcatcgagtggaagcatctcaatgacaagatgaagaagtgggtgcatggggtcaagacagttgttcgctgcctgctcaccggtgagcgccggctctgtgaccaggtgcttgctgtgtccgacgagctccgggatgagtgctttgtggagtccaccaagtgctgcatcatgcagatccgtaactttggggatgctgtctctgtgtgcactcgctcgcccgagaagctttcccggatccttgacatgtatgaggcgcttgctgaggtgatccctgaactaaaggagctgttctttgggagttatgggggtgatgtcatccatgatctggagggggttcttgaaaggcttggtgacgcggtcaagggtacccttcttgagtttgggaaggtcctacagcaggagtcatcgcggcgacccatgatggctggtgagatccacccaatgacacgctatgtgatgaactatctcaggttgttggtcgtttactgtgacacacttgacatacttttggatgacagtggtgctggagctgtagatcataatattttacataatggcaccgatgaggatcaggagtatctgaagagtttgaccccatttggacgccgtttagtcaaactgatatcttacttggaggttaatctggatgaaaaatctaaactttatgaggatggggcactgcagtgcatattttccatgaataacacactctacattgtacaaaaggttaaggattccgagctcgggaggattttaggtgatcactggatacggagacgccgtggcaagattaggcaaaattcaaagagctaccttagggtttcatggaccaaagttttgtcttatttgaaggatgatggacatggcagcagtgggagcgggagtttcggcagcagcgggaactcaagctctaggatcaaagaaaaaattaagaatttcaacttggcctttgaggagctatacaggagccaaacagtttggaaggtgccagatcctcaactccgagaagaactcaagatttctatatctgaaaatgtgataccagcttaccgtgcctttactggaaggtatggcagtctagttgatagtggaaggaactctggaaaatacataaagtacactccagaggatttggagaatcacctgtctgatctatttgaagggtcactagggtctgccaaccattccaggagaagatgacgatttctcatgatgagatttggctacaggtatgcttttggtacgagggacaccatatcatcaaacagctatagtgaatgtgttgaactgccatatcgcaatgtaattcagaatacgaccccctttgttttgcaatcaatatatgtgtaatactaagtgatgtacatgttctttttttctcagtatattcttatatttgcttgttttattgtccgaggctccaggtccaagatatattgattttatattatcgaacatgttataaattttc

SEQ ID NO: 98086 - DNA, 837 bp, Zea Mays
atgccccggtactctctcctctcccgccacatcgaagccaccgtcgtaccgcggtacaacaccgaagagcgtggtcgcaaatcctccgtacggtccggagctcggtccagcagcagggttcgcgccgctgctcgcgaatggggctcttgctgggcggtggcagggaagaaggagcctgagaggcagatggcagtggcggggaagaaggagcctgagaatgaaccgacgggaggcgaggcggcaggggctcttgctgggcgggggggggacaaggagcttgtggactgctggtcgtggaagagcgcgatggagagggtttcatcagctctagaaatggatgaggctgcctcaactgatcaatcaagcagattaacaaaaagaagggctaaagtttgggattacgttgatacagaggtagtagatgggaaagagaaggcagtctgcaaatattgtaaggtccacttatcttctgctgtgggtaaaggtacaactcatctgaataggcacatttttgtgtattgccatgcaattccacaagaagagagacaaatgttcttagcgacccaaaaaacaaagcctggcgatgatcatgttttcgacccagtagtctttcatggtctaatagccaagtacttccttagcgcagagatttcatttcgaaagtgtgaagatccatcctggaaagaaatgataatttactatcaaccatcttttcgattagtcggtcgacagactgtccgttcagattgtgtgttgttgtatgaagaggagaagttgcagttaattgagcagtttacaaagttgaaatctcatgttagtttgactgctgatctttga

SEQ ID NO: 98087 - DNA, 630 bp, Zea Mays
atgaggaagaaggaaactgctttcgcagagaccgaggaacacagagctccaaggactcaaaaaaacccaatggatgggttatctatgcacaccgatgtgggcactgcccccacggacgtcggcaccagcgggcaagagcctcagagttggcaaagaaaaagcatggggaaccccaaaggaaaggaagaggcagaagaagaagaagcggccaagagctggctggcatgggagtgcagagtggcgtacccattgatgagctgcctggcgtgcctgtccgatctcggtcgatcagctgctgcgaatgccggctctggccggtgctgccatcatgaggctttggagcttctgctcaggagcatcgctatctcgcacgagtggggagatggacggacgggggacagggatgatggggcgggcgtgtgtcagtgcgcccccgccccgcgtactgttgttgtgtatcgtctacgtcgtgcgtgtatgtgtcgatccgctcgagtccagtgccgggcaggcagcgcgcgtgagctgtccctcctccttgccgagggtggtgcctcctatcttatgattggagcttgtcggaacggctggctgctggtggtggagcatggacggatggccgtgaggtga

SEQ ID NO: 98088 - DNA, 216 bp, Zea Mays
cacagtttttccaaactgcagtttttcaaatactaaaatatactttagtcatgacattactacagtttacaatgcttcagttttcgaatacaacagtatccaatacatcaaggtgtttgggaaaaactttggttgagaccaatcagccagagcgggacccagctggcgctctctttgcagagaaaaactttggctgagaccaaagtttccaaaact

SEQ ID NO: 98089 - DNA, 151 bp, Zea Mays
cttgcaaatttctcttttggagaaaatacaaaacaaaatatgtagctgcatccatccaaaagaactttttatctttcttgttgtagcatccataggcaccaccgcgatctgcttgctattgtcatcatggagtaaacaagtgacttactaa

SEQ ID NO: 98090 - DNA, 817 bp, Zea Mays
gcgcccagccggagttccgccgtcagcgcccctggtcccggtcctcggcgcgccgctccttcagctcggccgcctctccttggccgcggtttcctccccaagatccttcctgctcgccctccagcttccgtgcgcgcgcatctctggcctccgctcgaatcccgcccgtccgcgctctgtccagctccagctcgccatggtgttgtgcccctcaagcttgcgaagctcccttgtgtgcgcgcccagccaaggttcctctctgcgtgcgtgcgaactccgttgcgagcgtcgatctgtacccacaaagtctcgccggtgctcgactggctcggcctgaccgtcgccctgctgtttcatgccctagaccgttaaatcgccgttaatcttgtcgtgcacggtgccgtctcgaacctgccatgtccgttgccggtcgacgaccccgccctgctgcttatcccgtcgccaagctgtgtgccgctgttccgtgacctcgacggtgcgcaaggtcgctcgccccagaaccacatcgccgtcgtggcttttggagttcatcgtgacgcgctgctgatgatctgcatattacgggagatcttcacaagttcacgcagcttcgtggtaattaatttggatggtgatctgcattatttagtgctatgtttgtttcctttgtatgtttgcgtgtaggttccttccctacggggcatcatagtttgcgctaagcaagtttgattccatctagttcacttgcacgtaggtgttcaatgaatcgtctgaaccgggacttgttgtcgtttccacgacttccgagtccaattag

SEQ ID NO: 98091 - DNA, 3624 bp, Zea Mays
cgtttgaaatccgttgcagcgttttcatatttcgtttcagcgaaaactcgtcaaatagaaaaattggcatcaaaattttcgaaatctcacaattgggccttctccgataaggcgataaccgaaccgattccgtgaaccgcccccgaactttccatcgaccttttctcccctaaaaaaaaccgagcgattccaaatcagactgccttccggttccccatctcccctccctcagcgcagactcagccatggcttccgccgaaaccctagcccgctccccctcgcgcgagccttcctccgacccgccccgcgcaggctcttccgagccccaccacaacggcgccggtgactcgtctcgccgccgccgccgcagccgctgggagcagtctaacgacgactccgccaacaactccggcggcgagggcggggccgtgggccggaagcgcaaaacgcggtgggccgaggaggagccgcgcccagccatcgcgctgccggacttcatgaaggacttcgcggccgagatggaccccgaggtgcacgctctcaacgcgcgcctcctcgacatctcgcgcctgctgcagtcgggcctcccgctcgacgaccggcccgagggcgcgcgctctccgtcccccgagcccgtctacgacaacttcggcatccgcataaacacccgcgaataccgcgccagggagcgcctcaaccgcgagaggcaggatattatctcgcagctcatccgccgcaaccccgccttcaagcccccctccgactaccgcccacccaagctccagaagaaactctacatccccatgaaggaataccccggctacaactttatcggcctcatcattggccctcgtggcaacacgcagaagcgtatggagaaggagactggtgccaagattgtcattagggggaagggtagtgtcaaggaagggaagtttctgcagaagagggacctcaagccggatcccagtgagaacgaagatctccacgtgcttgttgaggcagagacgcaggaggcactcgatgcggctgctggtatggtggagaagctgctcaccccggtggatgaggtgctcaatgagcacaagcggcagcagctccgggagcttgccgctcttaatggaacaattagggacgacgagttttgtagaacatgtggtgaggctggtcacaggcagtatgcttgccctaacaagatgaacacgtttaagagtgatgtgcagtgcaagatctgtggggatggtgggcacccgactattgattgtccagtcaagggcacttctggtaagaagatggatgatgaataccagaacttcctggctgagcttggtggcggcagtgcacctgagtccatgaacaaatctggtggtccaatgttggctcttacaggaagtggtggtagcggtggtgcttctgctggaacggggagtaacccgccttggtcagccggtggtggtgctgctgtcattgggctcaatggtatcaagaaagactatgacgagacaaatctgtatatcggctacctgccacctacaatggatgatgatggattagtcagtctgttttcgcaatttggggatattgtcatggctaaggtgatcaaggatcgaaacaccggacagagcaaaggatatggatttgtcaagtattcagacgtgtcagaggccaatgcagcgattgctgcaatgaacggtcaccatcttgaaggtagagttattgcggttagagttgctggaaagccaccacagccggcaccagcagtgtcagcacccccatcgtatcctcctacggatcctacttcaggtggatattcctcccaatcctacatgggggtaccaccaccacctcctccagggagttacgctccagttccttggggacagccaccaccgtatgcttcatatcctccgccaccaccaggctctagcatctacaatcctgcaccccctgcacctggccatgctgccccacctccatatggggtgcagtatccaccacccccagcagctcccatccctccaccaggcactacatcaagtgatggagctcagaactacccccccggtgtaacaccaccaagttctggtacacccactcaccctgttgcaacatcagtatatgcatcatctggcgcaccaaatgcaccattgatgtaccctccaccaccttatagttattccccatactatcctcctccaccatttcagccaccacctccaccaccactggctagtgttgatccctctcagagtattgcaactgcaccttgggctacccacagtgcagtgcctccaccaccaccaccacctttgtcctccacaaccgaccagcctactgctccctatggtgccgatgcagaatatgacaagtttatggcagatatgaagtgatataagcgaagttgggtgattcttccaatgaagggcaaaaggcttgatctttcttggagcttataccaacctgatttatttcttgttggaagtttgggactcacatcttaaccttgctgtgtgctgttgtaaaccattgcagaggttgcatgcttaagaaggcatcaagtgttactggctcagctggcatcgaaatatttgcttatgtccttgaactattttaaagaaccttttactaatgcttttgttttgatatctattcttgttattatttgagattatcctgttatgtcactttaatgctctgttcttcgtgacagtgtgttaaccctcactattattcatattttgttcttcatcttgatttggtagtgctagcagtccttttgatctggaacagaaaagcttgctgcaccatgctggttggtataacaccaaaattaaaatgcatgtttggtatcttctgatgaatctgtcatgcttttctatcttatgacttcacctaagttgtttggcagttgttgtgacagcttggcacaggcaatagcacttgatgaatatcaggtatactgaggtgctaattattgtgtggacctaatgtttttcattttggtttctgcacaattttcaactgacagacagtaactagtttctcatttttggtagttgatgtttgtgcattagagtatctaagcatgcacgtaatgctgaaaaaaaatctttgatgaagagcttacaaatatattttatgttgctaatgctcttttgacatcattggaatttttgtttgcggttcaagtaggacatgctggcatgcagatctagtctggagtcctgtgcgcaagacacttgtcacaatgatatttgtgagatggtctgaaggtttggaggttggcttcgattatgtttttctaagtaggatatcaccataagcttattctagtcaaagaatgcgatagtcagtccacaaccagcattaggaaccttcatcatgttgcagatataccagcttcctagggttgtctcatagatttctaggtgttaactgtcctactttttgtctattttttgaagttactttcttatccagtgtgctgtgtagatgggaaaaaatatgtgatgtaatgattaagggtacaagtctttttcccttgtcatttgtttcctttctcccttgctttcttcctttctcccttaatgtaagcctagttagttttgcgatggatgttttttc

SEQ ID NO: 98092 - DNA, 100 bp, Zea Mays
agcacgattactctactggtcatattgcccgagatcctcaaagccaacataatttattctgcatgcaaatcttcggctaaaatcgaacgctttagccaac

SEQ ID NO: 98093 - DNA, 1046 bp, Zea Mays
aaaagaaaaggaaaaattaacggctcgtcggtcctccacgaaaagtcgaaaaccaagtccagcagacggacgcgaactgagaaaaatctcacgtgacgacgacggacgcggcggcgatggcgtgccgcgcacttgccctccgcttcctgctcctcccggacccgctacaccgcctcccggccacgccgccatctgttgggagggcatccggctcccgcggtggtcgccgtccgcacctccgctgcagctccggcggcgggggtggggagcccgggcagccgccgcaagaagctgtgctcgaggccatatccaagatagcaaggtctaaaggaagggttgcactcacaacaaatgtggtcatgggtggtactgtgatggacgatgcaagtgatgaatggcttgctctggatcagaaggtaaattcctaccccacagatagaggttttacagcaattggcattggaggtgatgattttgtccagtcgatggtagttgctgttgaatctgttcttcaagaatccattcccaagggccgagtatctcagaaactatcttcaggaggaaaatatgtttctgtaaaaattgggccaattcgtgttgtttcaagtgagcaggtccaagctgtatatcgtgccatgagaagagataacagaatgaaatacttcttatgaagtgcaattgcatgtcctgcacgttccctggtccattccatcatgtaaacaaaaggagtccaacagtacattttcgccacattttgctggactggactggactggacccccgatgaattgcaaaaggaaaatgggaagacttttatgtgccattcatgccctgatggaagcttctcaaataacctgctacaggcaatttggtgggatcggttatgttatgtagtgcttgtgtagtacagtgggcgtatatagctactatatatgctaaagttgtattttagtgtctcatattagatgcattttaatattttataaaccatatgaaactagcggtataagtgttcctaatttatcatgtttgtttgcttgcaggat

SEQ ID NO: 98094 - DNA, 822 bp, Zea Mays
atcacacacactcagcagcagctgctccccgaccttcaattcccctgcctgttgccgtacgtgcctaagctagcttcgtcgtctcgttgcacgtacgtagtagctagacagccgaatcggctctctagctagctcctcccttccgatcgatatcatcgccatgtcggggatctcgctggcggtggcgccaaggtccgacccggaccacgggtcggagcggcagccgacggcgatgctgggcggcgtgatgggctcgctccgcgtcatcgagctgcagctggtggccttcatcatggtgttctcggcgtcgggcctcgtcccgctcatcgacctcgtgttccccgtcgccaccaccatctacctcctcgccatctcccgcctcgccttcccgccgctgcacgccaataagtcgaccaagcctgatgacgccgctggctcgcccgccgcctcctcccagtcgtccccggagatcttccgcggcagcaagtaatcaacaatccattcaccacttgctttccttcgttcattccttccgctagctagcttaaaacttggagtctggctgccgcaggctgttccaggtgtacgtggtggtgggcacgacggtgggcctgttcctgccgctggcgcacgtgctgggcgggttcgcgcggggcgacgacgcggcggtgcggtcggcgacgccgcacctgttcctgctgtcgtgccagatcctgacggagaacgtggtggggtcgctgggcgccttctcgccgcccgtcagggcgctggtgccgctgctctacaccgtgcgccgcgtcttcgtcatcctcgactgggcct

SEQ ID NO: 98095 - DNA, 1160 bp, Zea Mays
acacacactcagcagcagctgctccccgaccttcaattcccctgcctgttgccgtacgtgcctaagctagcttcgtcgtctcgttgcacgtacgtagtagctagacagccgaatcggctctctagctagctcctcccttccgatcgatatcatcgccatgtcggggatctcgctggcggtggcgccaaggtccgacccggaccacgggtcggagcggcagccgacggcgatgctgggcggcgtgatgggctcgctccgcgtcatcgagctgcagctggtggccttcatcatggtgttctcggcgtcgggcctcgtcccgctcatcgacctcgtgttccccgtcgccaccaccatctacctcctcgccatctcccgcctcgccttcccgccgctgcacgccaataagtcgaccaagcctgatgacgccgctggctcgcccgccgcctcctcccagtcgtccccggagatcttccgcggcagcaagctgttccaggtgtacgtggtggtgggcacgacggtgggcctgttcctgccgctggcgcacgtgctgggcgggttcgcgcggggcgacgacgcggcggtgcggtcggcgacgccgcacctgttcctgctgtcgtgccagatcctgacggagaacgtggtggggtcgctgggcgccttctcgccgcccgtcagggcgctggtgccgctgctctacaccgtgcgccgcgtcttcgtcatcctcgactgggcctacgacgcgtgggcctccaccgcgcaggacgccgcctgggtgtggttcggcaggtgtctcgccgccgccaacctgctctacttctccgccaacctcttcgtcttcctcatcccgaggttcctgccccgcgccttcgaaaagtacttccgcatgcgcgacgagctgtgcgccaagacggccgaggacaagcacgcgcgcgagggtgtcgtcggtgcggccaagtcggaggtgtcgtccaagaaggcggactgagagctatcggctctcgcagtcgcagcacggggtgtaaattcggtagcctgtggtgggcctgctgtaatttctcctgcgttatgtttaattgtcatcggtttgaccaatagtcgttagtcggcaggaccgcaggagacctaatcgacatcagttttcgggtctcgcagtggctccg

SEQ ID NO: 98096 - DNA, 850 bp, Zea Mays
ttcaaggaatatgtgttgttgaattttggtagaagacaagtaacatgaattacttcaacgttgagctggttgttcacatgtggtgtgatacctttcaaatatacgtccatgataattttgacagaattttcctatttgcatcatgctgtatttttctttttcttgtgttgactcaatttctttaacttagcgtactggttgtgggatttgatggtaacataagcagtatcagagttgcttgggaattagatgattctggagaatcagcttccaaatgttaatgacaacggaaaagtcaatgtaggggcttcccctacagtatttctcaaaaaagaaaaaaaaggaaactcaatgcctctattgggacttggcagtaccaataatggaactaagtgatttccttttgtttttttgtatatctgtaggtttgcctgcccaggtgagggcctccccactgacattgtccaggatatgttcagcaattcccaatggtcaacccaagaaggcgtaggactaagcacatgcaggaaaatcctcaaattgatgggcggcgaggtccaatacatcagggagtcagagcggagtttcttcctcatcgtccttgagctgccccaacctcgtctagcagctggtagagaaaatcagctgatatgttaagatctgcgctgacaccacctacttctagatcgattgtaacttaggtggtgtttgtttgggattataatctgcctaaactatataatcagtgttagttgattagttcaaaataaggtagattatataatctggtcagattataatcctaaacaaacagacccttagctccctgataagagggtgcctaatctgt

SEQ ID NO: 98097 - DNA, 1971 bp, Zea Mays
gttccaacactcagttttttaaaatattggttccatatctcgcatctgggcaaccgaacacgaccgccgtctctactcccagtcccagctgccaaggtcttcgtcgcctcgtcgggctcgggtcctttgccggcgacgagcgcgtgcacaccagaagaatacagtggaagtggtatgcggttgtaaaacgatttcgattattccaagcggccggcgatggctcggagcccctgcgacctccgcctcctcctcctcgctgcagctgcagctttcatctacatccaagtgcgcctctttgctactcagtcccattatgcggaccgtcttgcggaagcagaaagatctgaaaatcaatgcaccagtcaattaaagtccttgatcgatcaagtcagcatgcagcaggagaagattgtagcattggaagagataaaggtacggcaagatgaagaacgtgcacatctgaggattttgataaaggatcttgaaaaaaggagtgtgcagaagctactagacaagaatgtggttcccgttgctgctgttgtcataatggcttgcaatcgaccagactatttagagagaacagttgaatctatcctgaagtatcagacatcagttgcttcgaagtttccgctttttatatctcaggatggagcaaatggagctgtgaagaataaagctttggaatataaacaaataacatacatgcagcatgtggatcttgaacctgtgcaaactgaaaggccaggagaattgacagcatattacaagattgctaaacattataagtgggccttggacaacctattcattaaacataattttgctcgagtgatcattctagaagatgacatggagattgccccggattttttcgactacttcgaggctgcagctaaattacttgataatgacaagacgattatggctgtttcttcttggaatgacaatgggcagaagcagtttgttaacgacccaaaagctctttaccgctcagatttctttcctgggcttggatggatgttaacaaagtccacttggattgaactgtcaccaaagtggcctaaagcttattgggatgattgggtgaggctaaaggaggtacatggacatcggcaattcatacgcccggaaatttgtagaacatacaattttggcaagcatggatcaagcttgggacagttcttcgagcaatacttggagcccattaagttaaacgatgttcatattgattggaattctgaggatctgagctaccttggggaggataagttttcaaccaaatttggaaaagaggtggctagtgccactcctctccgtggatcagatgctgtgttgaaagcccacaatatggctgaggatgtaaggatccaatacgacgaccaagaaggtttcgagcagatagctcgtcaatttggaatattcgaagaatggaaggatggcatcccaagaacggcttacaaaggagtggtggtcttccggtacaacagtagtcaaaggcgaatatttctcgtcagcccagattctcttcgtcagctgggggtgtagcatgttgagaaggtagattttttacccttggaatggcaaatatcatggaattgcttaactggtttctgtgagcatggaggaaccgggatgcatggtgaagaaattatttttgagaagtgattgtgttgacccaaaggtactggagtagtagaagcatgggcttggtttataggacatttgcaagatataatacatcgttgttatatctttctccgcatcaggaaatgtttagtcagtatgggacttgttatccttgagtgtatttagggtttacacgatgcagttgtatgcgctcaaaagagtgtagcaggagctcactagctgacctgacgctcgatcctttttggtagaagaaaggtgtatctttatgaccaaatttttcttattgggcatcttggaatattaagatggaaggaaatcttgtgc

SEQ ID NO: 98098 - DNA, 2072 bp, Zea Mays
gttccaacactcagttttttaaaatattggttccatatctcgcatctgggcaaccgaacacgaccgccgtctctactcccagtcccagctgccaaggtcttcgtcgcctcgtcgggctcgggtcctttgccggcgacgagcgcgtgcacaccagaatacagtggaagtggtatgcggttgtaaaacgatttcgattattccaagcggccggcgatggctcggagcccctgcgacctccgcctcctcctcctcgctgcagctgcagctttcatctacatccaagtgcgcctctttgctactcagtcccattatgcggaccgtcttgcggaagcagaaagatctgaaaatcaatgcaccagtcaattaaagtccttgatcgatcaagtcagcatgcagcaggagaagattgtagcattggaagagataaaggtacggcaagatgaagaacgtgcacatctgaggattttgataaaggatcttgaaaaaaggagtgtgcagaagctactagacaagaatgtggttcccgttgctgctgttgtcataatggcttgcaatcgaccagactatttagagagaacagttgaatctatcctgaagtatcagacatcagttgcttcgaagtttccgctttttatatctcaggatggagcaaatggagctgtgaagaataaagctttggaatataaacaaataacatacatgcagcatgtggatcttgaacctgtgcaaactgaaaggccaggagaattgacagcatattacaagattgctaaacattataagtgggccttggacaacctattcattaaacataattttgctcgagtgatcattctagaagatgacatggagattgccccggattttttcgactacttcgaggctgcagctaaattacttgataatgacaagacgattatggctgtttcttcttggaatgacaatgggcagaagcagtttgttaacgacccaaaagctctttaccgctcagatttctttcctgggcttggatggatgttaacaaagtccacttggattgaactgtcaccaaagtggcctaaagcttattgggatgattgggtgaggctaaaggaggtacatggacatcggcaattcatacgcccggaaatttgtagaacatacaattttggcaagcatggatcaagcttgggacagttcttcgagcaatacttggagcccattaagttaaacgatgttcatattgattggaattctgaggatctgagctaccttggggaggataagttttcaaccaaatttggaaaagaggtggctagtgccactcctctccgtggatcagatgctgtgttgaaagcccacaatatggctgaggatgtaaggatccaatacgacgaccaagaaggtttcgagcagatagctcgtcaatttggaatattcgaagaatggaaggatggcatcccaagaacggcttacaaaggagtggtggtcttccggtacaacagtagtcaaaggcgaatatttctcgtcagcccagattctcttcgtcagctgggggtgtagcatgttgagaaggtagattttttacccttggaatggcaaatatcatggaattgcttaactggtttctgtgagcatggaggaaccgggatgcatggtgaagaaattatttttgagaagtgattgtgttgacccaaaggtactggagtagtagaagcatgggcttggtttataggacatttgcaagatataatacatcgttgttatatctttctccgcatcaggaaatgtttagtcagtatgggacttgttatccttgagtgtatttagggtttacacgatgcagttgtatgcgctcaaaagagtgtagcaggagctcactagctgacctgacgctcgatcctttttggtagaagaaaggtgtatctttatgaccaaatttttcttattgggcatcttggaatattaagatggaaggaaatcttgtgcattcgtttgttgtactgttttgtggtgacttcgcagatgtgcgacaagatgggagcgtaagcatccaatcaattccatcgagtttgttgaggtgtcttgttctg

SEQ ID NO: 98099 - DNA, 1228 bp, Zea Mays
gacacagacgaacctttccggtatcgcggcgggaaaaggaggtagttttcccgccaaggcgctcccaaactctcctctcccgccgcccctcctctccaacaatttcatcccggcaacaagcgcctcccgcccgcgcgacctgtgggctgtggtctccgacgacgcccgcgcaccaccgtcaacaggcgccgaccgctacccccggccggacgaggatccgcttactgcgcagcctccgacgccgcatggagatcgtgcgctcccaccggcaggttgccgccgcagccgccggtggcggcgcgggggccctgccgacctacaaagcggcgccgcagctcgaggtgcggctggaggagttcgagctcttcgccatcgaccgcctccgagttctcaaggggatttcggatggactctcacgggggaagaggccggaggaggtggagaaactggtcaatgaattgtggaagacacacatggggcaccaggatccagcagagactttgaataaggatataatatcacactttgtgctccgtcttgtctactgcagaacggaagaattgcggaagtggtttctctccatggagactacactttttcggtatcgctttcggcttgagaaccctgaatcacagaggatgcttatgactgagtttcaactgccatacaaagcattgccacactcagaattcgaggctgtgaaagacaagttgagccaagttgcacgttccatcggtcaatctgcaaatgttgatcatgtgttcttcaaggtaccttttgaacaagttcctgatcttgttgccagccgccgggtatttctttcaaaaggctatgcttatgtggcgatgaatcaggtggtttcgctagtggttactcaattccgctgcaatatttcaaaggcacttgctttaacaaacagaaaatggtcagcaaccattaaagaacaagaaaaggacaggttgactcctattgtcgaagcattaagcaatgcttattttggacccgattactcccagccaaaggatgccgttgacatatctctaaaggatattgaccaactggctaaaagttctttccctctttgtatgcggcatatgcttgataagttgagagaaaaccatcatctgaagcatgggggtagattgcagtttggtctttttcttaagggtgctggactaaagttggaagatgctcttgcattttggagggcggaattttctcagaaggt

SEQ ID NO: 98100 - DNA, 2598 bp, Zea Mays
atggggtttaatagaatattaactaacggtgcacctatcggcttattctttggtggttccctattcctttacaatcgtcgtgtcaatcgttatttccggagagatggtcacacatggcggcggaagaaggatggaagaactgttggagaggctcatgaacgactgaagttttttgtgcatgtttttttacaaacatggtcaaagcatagtcataggaaacagggtcgatgccgcattccatggcccagggtcatcgtcccaaattgtgggtcagggtcaccatgggtcatcgtcccgaacgctagggagtcactcctgcagcacagccatgatgctcggacttgcgtctcagtgggacaagttgagtttcatggctgcttcaggctgtcacagatgaatgcatattatggtgctctaggagcttttggtcaggttggaaatgttgatgctttgagctgctattacgctcacggggagcaaaatccaagtttccagagacggtgtttctggatgctggaacctgcatacgaacacattgtgctggtacaatatagagaggttgatgtggttagaaattattcatcacaactgtcaaatggcctcccagaacctctttcatccttgggatatccaaatgccatctgtggaaaccaataccacagctcctcttctggcgctagcgagtgtagtgagtcccatcagagctattctaatttgagttctgtaactgaagtaagttcctattccggtaacaaagagtacaccaaaaatgatggcggtttactgagcataccggaggttggacacacttgtctgcaacaaaatcggactgataatggtaactcgaaaaataaatctgggcttaatattgctttaaagaagatagctgagcagttaagtttgggtgaagatgatgatgactatattttctcaaatcaagctcattctgtgggaggcgacaaccaagtaaaacatattcaacaagaaggaacacagaaaggtttaagtaggaatatagcgccatcatgggaagatgtactgcagtccagttcaggtttaccaatttcatccatataccagcaatcggatgtcgagtatcagaaaaattcagaataccatccaccagaacgcctggacagcagtgatttacgcatacaacttgctgctgctaaaaagtttcttttaggaccagaagccaccgttgactcaccatctttgaactctgtgctgagaaatagagcgaactgtgtaactgatactatttcagcttatgacagtagatttggaagctctctgaacccagattggcaaacaaaaacagcattaacatttcaaagcaattctcagggctctgaaataacggagttgtttgaccatggtcattttgaacactactccagagaagatacaacattttctttaggacagacaaacaagtttaatattcgtgagatctctccagaatgggcattttcatatgagatcaccaaggtcatcattactggagattttctatgtaatccatcgaatttgggttgggctgtgatgtttggtgatagtgaggtacctgctaaagtagtccagccaggtgttcttctctgccacacgccactgcactgcagtggaaatctcagaatctgcattacttcgggaaacagagaagtttgcagtgaattcaaagactttgagttccgctcaaaaccctcttctagtttcacagacatcgcaccatcttctagacatctgaaatccagtgaagagttactaattcttgcaaaatttgctagaatgcttttgtctgggaatggaaaccctgaagttccagatggtgatccccaatctggacagtgtccaaaacttaagatggatgaagggctctgggataggttgattgaagaactcaaagtagggtgtgaaagtccattaagctcggttgattggattttggaggaactgctgaaaagtaaattacaaaagtggttatctgtgaagctcagaggattcaatggaacggattctatatccaagcatgaccagggtattatacacttaatctctgccctaggctatgagtgggcattgtcttcagttctcagtgttggtgttggtctaaattttcgtgattcaaatggatggactgctcttcattgggctgcttattttggaagctgttcattcagaagaaatacaaaggttgcaaaggtcgcaacatttctcaacatgagaagaaatgcagttaaaatacaggctcatgtaagaggccatcaagtgagaaagaaatacagaacaattgtaagcactgtcagtgtgctagagaaagtaatacttaggtggcgccgtaaaggtcatggcctccgtggcttccgagctgagcagcaatcaatggtcgaagcaatagaggaagatgatgaggaggatgatgacttcgatgatgacgaagcagtcaagatctttcgccggcagaaggtcgatcaagctgtaaaggaggctgtgtcaagagtgttgtccatggtagactctacagaagcgaggatgcaataccggcgaatgcttgaggaatttcgccaggcaactaattggaaggatcaaatgaagtaa

SEQ ID NO: 98101 - DNA, 321 bp, Zea Mays
atgtgcattgcatgtgagaatccaaatatcattctagattgtttttctcaaggaaacacaagaaaacattacaggactttcgtcacagcgaaaatccacacgtttcaaaaagatacgtgtatctacagtcgtgtccaaaataacattcatgtccaacatattacatccctatctgcattggacagcttcattttcttttcccgtgcagcccagtcatattccatctattgctcccttccaagtggtcagttaaccaacatgcacagtatgcctataccagacgtccaggctacggtctctaacttcgacacttcacactga

SEQ ID NO: 98102 - DNA, 2543 bp, Zea Mays
cttgtcgttgcacaccttccttttgcgtggaaatcggttctggccttcaagcctgtaaagctcccccctttctgatccacaccatcgctgctgcgcctgcgcggcctgtttgcatttcatagccagaacccactcttttccttccttgttttgcgctaaagcagtccaattagcatcgctcgctcataagtctgttggaggcagcattgagctatttctgcaaccaagtgtgtattccttgcttcccgcaatccaaagctgcctccttttctcggatccaaatcccgcaacgttttcgtccatttggcaatctcgctggtgcttgtcaagctctaagcctgacacccccccccccccccaaccccaattccagcaccaaaatcccatctttttgcttgctggtgctggtgattccgtggccagtccgatgggggcgcttggggacaggctgcgggccttctccacgaaccggtggctggtgttcgtcgccgcaatgtggctgcagtccatggccggcatcgggtacctcttcggcgccatctcgccggtcatcaaggccgcgctgggctacaaccaacgccaggtggccgcgctcggcgtcgccaaggacctcggcgactgcgtcggcttcctcgccggctcgctctcggccgtgctgccgtcatgggcgatgctgctcatcggctccgctcagaacttcctcggctacggctggctctggctcatcgtcaccaggcaggcgccggcgctgcccctctggatgatgtgtgttcttatctatgttgggaccaacggtgagacattcttcaacacaaccgcacttgttacatgcatacagaacttccccaagagcagaggtcagacagtgggtattatgaaaggatttgcgggccttagcagtgcaatcttgacgcagctgtatgcagtaatgcacacaccagaccatgcaacacttgtcttcatggttgcagttggtccatcgttggttgctcttggcctgatgtttattattaggcctgttggaggtcaccgccaggtgcgtccatctgacaagaacagcttcttgttcatctacactatctgtttgctcctcgcctcatatcttgtcggcgtcatgctagtccaagatttcatgcaactgagcgacaatgtggttggtattctcactgtgcttcttctcatacttcttgttttaccaatcatgatccctgtgaccttgacattatcatccaaaacacaacatccaattgaagaggctctcctttttgaatcatcaaaaggagagacaagcacttcacaagagaaagaggatcagccagaggtcattttgagtgaggtggaagaggagaagcctaaggacattgattcattacctccatctgaaaggagaaagaggatcgcagagttgcagaccaagttagtgcaagctgcagcaaggggtggggttagaatccggaggaaaccacaccgaggggaaaacttcaccctgatgcaggcattggtgaaggctgatttttggcttatttggtgttcgctcctacttggatcaggatcaggtctgacagtgatcgacaatctgggtcagatgagccaggctgttgggttcaaagatgtacatatttttgtgtcattgacgagcatatggaatttccttggtcgtgttggaggtggctacttctctgagattattatcagggaacacgcatacccaaggcacatagcgctggtaattgctcagatcctgatggctgttggtcatttcctctttgcaatggcttggcctcgaactatgtacatcggaaccttcctggttggactcggatatggagctcattgggctattgtgccagctgctgtctctgaactttttggcgtaaaacactttggtgcaatgtacaacttcctcacagtagcaaaccccacagggtcactcatcttctcaggccttattgctagtaatttgtatgactatgaagctgagaaacaagcacaaggccatcagataacagcattgacatctccaagattgcttcataacatgggttttcttgcagatggaccactgaagtgtgaaggagctgtctgcttttttgttagctcattgattatgtcagcgttctgtgttgttggagctggcttaagcctcatggttgtttacagaaccaaacgggtctatactcaactctatcgttcaaaccgcacatgaaacttccatggataggatatgccatttcctcatgttgttccatgtaccataatttttgcatatatgtgtcgtatacacacaaaattaaagtttgcatgtatattctctaatcatttcagaggctttactgcacgaactgctgtccccaaatagaaatttgcacgcctcatttgtcggatagacaggctgtagctgaagcctgaagcttggaccatgaattctgtaatgaaggctttgtactaagacacacatgtccattcagctccggctctactgtaattttcttttatgtgcatgatagaatcttctatgattctgccaaatctaagagctctag

SEQ ID NO: 98103 - DNA, 1311 bp, Zea Mays
acaccttccttttgcgtggaaatcggttctggccttcaagcctgtaaagctcccccctttctgatccacaccatcgctgctgcgcctgcgcggcctgtttgcatttcatagccagaacccactcttttccttccttgttttgcgctaaagcagtccaattagcatcgctcgctcataagtctgttggaggcagcattgagctatttctgcaaccaagtgtgtattccttgcttcccgcaatccaaagctgcctccttttctcggatccaaatcccgcaacgttttcgtccatttggcaatctcgctggtgcttgtcaagctctaagcctgacacccccccccccccccaaccccaattccagcaccaaaatcccatctttttgcttgctggtgctggtgattccgtggccagtccgatgggggcgcttggggacaggctgcgggccttctccacgaaccggtggctggtgttcgtcgccgcaatgtggctgcagtccatggccggcatcgggtacctcttcggcgccatctcgccggtcatcaaggccgcgctgggctacaaccaacgccaggtggccgcgctcggcgtcgccaaggacctcggcgactgcgtcggcttcctcgccggctcgctctcggccgtgctgccgtcatgggcgatgctgctcatcggctccgctcagaacttcctcggctacggctggctctggctcatcgtcaccaggcaggcgccggcgctgcccctctggatggagagctgttcggtttagaccttttgtttaggagggattgttcaagatattaatgctgccttcactgatcttggtcaagaaatctgaagattagaggagttcctactaaattacagcaaaagcagtcaacttgttgcctgtcgaactgttctgttccccagtgacaaaactcatctgtttctgccctgctcatttttttatggaattgccaagtaggtgggcctaagatgtgacctgatgaataaatataaacagctggactgaaccaaccgaggaacgattgcgtggacgctggatcgtagatcagatcaattgcagtgaacacttctctaatcacgtttaatttacttctgaattgaccaatcaaatcacatgagtgtactgctgagggtatattcgcttttagtgtccatattgttttttagagaaaagggttcccctgcttttagtgttcatatagttaggttgtcattgtcactaattttggaccatgtgtataattttaacagttgtgtaaccattatgaattatatacagtaactggttgctaccttttctg

SEQ ID NO: 98104 - DNA, 3098 bp, Zea Mays
cacattgctattgtgtattgcaaaattttggaggctttgactaaaaaagcttcgttttttcgagcttgctcctcccccgaaaaaaaaatcggggcccaaaaagttcgcaattctgggggctcccgtggccgcaggtccgcccgaattagcgcgcctctcggagatgatcctgcgccggcaaaggcaatgaagatctctaatctggatgcacacttaatcttgtccagctcttgatcagttgatcttgtgctttgctgctcctgctcaagttaatttgttggccaatcaagttcagaggcgcagatgagtgaggagtacaatatggatgatgccctaaaagccaaaaatgttgctgagaccaagttccatgcccgtgacatcaggggtgctcggaagtacgcactcaaggcccagaatctctgcccgacacttgaaggcatattgcagatggtctcaacgcttgaagttcatcttgcagctgagtccaagattgatggagagagtgactggtatcggatattgtctctaggcgcctttgcagatgaagaggaggtgaagaagcaatacaggaagctagctctgctgctgcaccctgacaagaacaaatcagttggtgctgaggaggccttcaaactgatctctgaggcgtggagtgtgttgtcagatactagcaggaaggtggtttatgatgagaagagaagaaatcattctgttgtcaatgtaaccaatggtatctatacttatgataagaaggcaaacaagagggctcgaaagaatgccgctgctgcagctgctgccgccgccgctgctgcagccgcagctgagactaccactcatcctgttggggttgatacattctggacatcttgcaaccgctgccggatgcagtatgagtacctaagaatttatcttaatcataacctgctgtgcccaaattgccataatgcattcttggcagtggagactgggttcccatgcaacggaagcagttcatcattctcctggtcaaccaagcagcagccacagcagaaccacaattcaaccaagcattcatatggctcaacaagcaggacttctagcatccctgggacagggcatggggggtaccagcaagataatgcttatgattcctacaacaatcaaggcttccagtggaatcagtactccaagacaacacctgcagctggtaccaatgcttatggtacacatgccttggagaaacagagaaagaagcatgatgagagctacagctacaactattctgaaagcggcaacttatatgtccatgagaaagctgcttcaaggcgtggtcgcttctcaaagcggagaaggcataattacgatacttacactactgtggattttggtggcgataacaaagaaacagttgccgcaagcacagaaccaactgctgttttcactgatgtgggacgggtcaacggtacttcagcggaaaggtttagatctgcagtgagtggaagaagagcaaatgttcttggtgagattacccagattgatacacgaagtctacttcttgagaaagccaaggcaactgtccgcaaaaaattgcaggagttaaacattacatcatcttcacgatttgcagagagaagaggatctgaaggaaagctaaatccttgtggcaacaacataaaggtcaatggtgtcctctctgacaaacctggcaagggagtcaagctatgtagctcaagaagcatagaaatccaagtgcctgatactgatgacaagaatccagagcagcgccgtgtacctgtgtcaattgacgtcccagaccccgacttccatgatttcgataaagatcgaacagagaaggcatttgacagtgatcaagtgtgggctacatatgacagcgaagatggcatgcctcgcctatatgtaatggttcagaaagttctttcgatgaggcctttccggatccgcatgagctttctcaactcaaagtcaaatatcgaactggcacctataagctgggttgcctccggtttccagaagacatgtggcgatttcagggttgggagatatcaggtcagcgaaacggtcaacatattttcacacagagtgagctggactaaaggtccccgaggcgtcatcaggattgttccccagaaaggggatacatgggccttgtaccgcaactggtctcctgattggaatgagcttacacccgatgatgtgatatacaagtatgagatagtagaagtcgttgatgatttcaccgaggagcaagggctgaccgtcatcccgttgctgaaggttgccggattcaaagctgtcttccacagacacatggatcccaaggaggtcaggaggataccgaaggaagggctgttccagttctcacatcgagttccttctcgtcttctgaccggtgaagaaggcaacaacgccccgaaaggttgccatgagctggaccccgccgcaactccagtggaccttcttaaggttatcacggagctcaaggaagatgcggtgggcgcagactgctaaataggagaagggggcaactctgaacactgaagataggtagctggatgtctggacgatcagatcccacttggttaatgacacggtgcaagcacatgatggtatctaaagctctactacgtcatcttatttttggctgatgacttggacaatactgccagggcaagcagcctgcgtgacggagttctgacccttttaattcttaggcatttctaacatttgatttcatctctacacgaactgattaaatggccattgggaggagactgcacacggcatcatcggtgaggaggttagtcgacgggaggttgtttacttgtttgtgttgccgctctgtaatgtactgtaggaggcaagtctgagtcgagggacaagagctgcaaggcttggcttgcccgtgtaccccgcatttgtgtaccctgtttttttacttgtgatgttgtatttccttcggttttatagtaattcatcgccatgatgttgaacctgataaattgtagactctgaactctggtaaccatgtcggaaaatctagcggctttatctagtggatgcttctgtctttcaccctgcactgtttggttgggtgccat

SEQ ID NO: 98105 - DNA, 3453 bp, Zea Mays
catctccggatctatcgccctcgccatcggcaatcggcatcgccaccggtagtgggagggagcaagggggggacccaggccaacgccgcgcacctttgccctcttatcatcatcaacatcaccacgggcgggggagacggccctcgaagcgtacccgtccccatcctccttttccgaaccaccggagcgcggcggcgcggcgcgagacccttcccggcttctactcctccgatcctccgcaccggctgacgagtagcccactcactgggggacgtgggatcgatcggcggctgatgggaggctagattccgcaatcccacagactagacacatccccttcgcggttgactttggcgaatcgaccttgatctgaaaatggggctgttccgggcggcgtccggcctggcccgtttggctctgcgaaggaacctcttgcgcgccgcggcaagcccctttgccgccggcggtggcgccgtcccaggtgccgcgccggcgcgctacttccactccacctgcccgcgccggttcgctgcgcccacgccccgtgctgtgccgctctcgcgcctcaccgacagcttccttgatgggaccagcagcgtctacctcgaggagctgcagcgggcctgggaggccgaccccagctctgtcgatgagtcctgggacaactttttccgcaacttcgtcggccaggctgccaccacctcacccggcctctctgggcagaccatccaggagagcatgaggctgctgctgctcgtcagggcataccaggtgagcggccacctgaaagccaagctcgacccgctcgggcttgaggagcgtccggtcccggatgtgttggacccggcgttctatgggttctctgaggcggacttagaccgcgagttctttcttggggtgtggatgatggctgggttcttgtctgaaaaccggccagtgcagacgctgcgctcggtgctggagcggctcgagcaggcctattgcggtaccattgggtatgagtacatgcacatacctgacagggagaagtgcaactggctcagggataggattgagacagttaacccaatggattacacttatgaccgtcgtcaggtcatgcttgataggcttatctggagcacacagtttgagagtttcttggcgaccaagtggacaactgcaaaacggttcggtcttgaaggtgctgagactctgatccctggcatgaaggagatgtttgacagggcagctcatcttggtgtagagagtattgtcattgggatgccacacagaggcaggttaaatgtcttgggaaatgttgtgaggaagcccttgcgacagatatttagcgagttcagtggtggcaccaagcctgtcaatgaaggcgaggggttgtatacagggactggtgatgtcaagtaccatcttggaacttcatatgataggcctaccaggggtgggaaacatatccatctgtcactggttgcaaacccgagtcatttggaagcagttgatcctgttgttgctgggaaaacaagagcgaagcagtactattctaatgaccgtgacaggaccaagaatttgggagtgttgctgcatggtgatggtagtttctcagggcagggcgttgtgtatgagacgctgcatctcagtgcccttgaaaactacaccactggtgggacaatacatatcgtggtcaataatcaggttgctttcactactgatccaaggtcagggagatcctcacaatattgcacagatgtagcaaaagcattggatgctcctattttccatgttaacggtgatgatttggaggctgttgttcatgtctgtgagctcgccgcagaatggcgtcagacatttcattcagatgtagtggtggacattgtatgctaccggcgatttggccataatgaaattgatgagccgtccttcacccaacctaagatgtacaaggtgattaggaaccatccaagtgcgctagagatttatcaaaggaagttgttagagtctgggaagatctcaaaggaagatattgataggttaaacaaaaaggtcagcactatacttaatgaggaatttcagaacagcaaagactatgttcccaacaagagggactggctttcagcttactggactgggttcaagtcaccagagcagatttcgcgtatccgaaacaccggtgtcaagccagagattctaaaacgtgttggagaagccatgactactctgccagaaaatttcaagcctcacagggctgtgaagaagatttttgatctacggcgtcagatgatcgagactggagaaggcattgattgggcagttggtgaagcacttgcttttgctactcttataattgaggggaaccatgtcaggttaagtggtcaggatgttgagaggggtacatttagccatcgacactctgtcatccatgaccaagaaactggagagcagtactgcccgctggatcatcttgttatgaaccaagatgcggagctttttactgtgagcaacagttccctgtcagaatttgctgttttgggctttgaattgggttactccatggagaacccaaactcattggtcttatgggaagctcagtttggtgatttttcaaatggagctcaagtgatatttgatcagttcctgagtagtggggagtcaaaatggctccgccagactggccttgtcgtttgccttcctcatggatatgatggtcaggggcctgaacattctagtgcaagattggaacgctttcttcagatgagtgatgacaacccttatgttatacccgagatggatccaacactgcggaagcaaatccagcagtgcaattggcaggtcgttaatgtaacaactcctgcaaattatttccatgttctgcgtcgccagatacaccgggacttcaggaagcctttgattgtgatgtccccaaagaacctccttcgccacaaggactgcaagtcgaacctatctgaatttgatgatcttgcgggccaccctggattcgacaaacaggggacacgcttcaagcgtctcattaaggaccagaataatcacaaggacctcgaggagggaatcaaccgcctagttctttgctctggaaaggtgtactatgaactggatgaagaaagaaggaagtcggagcgcactgatgttgctatatgtagagttgagcagctctgcccgttcccctatgacctcatccagcgcgagttgaagagatatccaaatgccgagatcgtgtggtgccaagaggagccgatgaacatgggagcatacagctacatcaacccgcggttgctgacggcgatgaaggttctgggccggggtggcatcgaggacatcaagtacgtcggcagggccccgtcggctgctaccgcgacgggcttctactcggtgcacgtgcaggagcagacggagctggtgcagaaggcgctgcagcgcgaccccctcaactaccctttctga

SEQ ID NO: 98106 - DNA, 3124 bp, Zea Mays
ctccggatctatcgccctcgccatcggcaatcggcatcgccaccggtagtgggagggagcaagggggggacccaggccaacgccgcgcacctttgccctcttatcatcatcaacatcaccacgggcgggggagacggccctcgaagcgtacccgtccccatcctccttttccgaaccaccggagcgcggcggcgcggcgcgagacccttcccgaacctaaccaatctcctgttcttgtgcagggggacgtgggatcgatcggcggctgatgggaggctagattccgcaatcccacagactagacacatccccttcgcggttgactttggcgaatcgaccttgatctgaaaatggggctgttccgggcggcgtccggcctggcccgtttggctctgcgaaggaacctcttgcgcgccgcggcaagcccctttgccgccggcggtggcgccgtcccaggtgccgcgccggcgcgctacttccactccacctgcccgcgccggttcgctgcgcccacgccccgtgctgtgccgctctcgcgcctcaccgacagcttccttgatgggaccagcagcgtctacctcgaggagctgcagcgggcctgggaggccgaccccagctctgtcgatgagtcctgggacaactttttccgcaacttcgtcggccaggctgccaccacctcacccggcctctctgggcagaccatccaggagagcatgaggctgctgctgctcgtcagggcataccaggtgagcggccacctgaaagccaagctcgacccgctcgggcttgaggagcgtccggtcccggatgtgttggacccggcgttctatgggttctctgaggcggacttagaccgcgagttctttcttggggtgtggatgatggctgggttcttgtctgaaaaccggccagtgcagacgctgcgctcggtgctggagcggctcgagcaggcctattgcggtaccattgggtatgagtacatgcacatacctgacagggagaagtgcaactggctcagggataggattgagacagttaacccaatggattacacttatgaccgtcgtcaggtcatgcttgataggcttatctggagcacacagtttgagagtttcttggcgaccaagtggacaactgcaaaacggttcggtcttgaaggtgctgagactctgatccctggcatgaaggagatgtttgacagggcagctcatcttggtgtagagagtattgtcattgggatgccacacagaggcaggttaaatgtcttgggaaatgttgtgaggaagcccttgcgacagatatttagcgagttcagtggtggcaccaagcctgtcaatgaaggcgaggggttgtatacagggactggtgatgtcaagtaccatcttggaacttcatatgataggcctaccaggggtgggaaacatatccatctgtcactggttgcaaacccgagtcatttggaagcagttgatcctgttgttgctgggaaaacaagagcgaagcagtactattctaatgaccgtgacaggaccaagaatttgggagtgttgctgcatggtgatggtagtttctcagggcagggcgttgtgtatgagacgctgcatctcagtgcccttgaaaactacaccactggtgggacaatacatatcgtggtcaataatcaggttgctttcactactgatccaaggtcagggagatcctcacaatattgcacagatgtagcaaaagcattggatgctcctattttccatgttaacggtgatgatttggaggctgttgttcatgtctgtgagctcgccgcagaatggcgtcagacatttcattcagatgtagtggtggacattgtatgctaccggcgatttggccataatgaaattgatgagccgtccttcacccaacctaagatgtacaaggtgattaggaaccatccaagtgcgctagagatttatcaaaggaagttgttagagtctgggaagatctcaaaggaagatattgataggttaaacaaaaaggtcagcactatacttaatgaggaatttcagaacagcaaagactatgttcccaacaagagggactggctttcagcttactggactgggttcaagtcaccagagcagatttcgcgtatccgaaacaccggtgtcaagccagagattctaaaacgtgttggagaagccatgactactctgccagaaaatttcaagcctcacagggctgtgaagaagatttttgatctacggcgtcagatgatcgagactggagaaggcattgattgggcagttggtgaagcacttgcttttgctactcttataattgaggggaaccatgtcaggttaagtggtcaggatgttgagaggggtacatttagccatcgacactctgtcatccatgaccaagaaactggagagcagtactgcccgctggatcatcttgttatgaaccaagatgcggagctttttactgtgagcaacaggtatgaactaagatatactaactacttgttcctgttagtgatgtgcatgggttagcagcttaagttcactcacttttttaggaaacatgcaacattacaataaccagatagattcaaaacaggaaccggtacttttgtcagctgcactagttgattcttgtttccacataatgagcaccaataaaataaataaaaaggcattgcatatccatatgtcaaacaacgtcaggtaaaataatgttgttgtactatcagtagtctgtattattgttgtactgcctacttactattgatgcgtgggtattgtggtatctttaattattcaaacttctgagataatgctacatggtttgtactggtgaattgagaagcacgtttaaggcgcagcagaaagccagaaacacatgccaggaataggattcctgactaatgatccagattccagactgaccacttggatgtagataataacaaactgttaaacaagcataaagggtattgatattgactagtaatcagattaaaacagcctagatacaggactgaaggataaaaaattttcagtggtcgttggattttatggctgatatccacatgctcttatatcatctttaactgtatgaatcttcatatgcaaaatataagaaaaaa

SEQ ID NO: 98107 - DNA, 3817 bp, Zea Mays
ctccggatctatcgccctcgccatcggcaatcggcatcgccaccggtagtgggagggagcaagggggggacccaggccaacgccgcgcacctttgccctcttatcatcatcaacatcaccacgggcgggggagacggccctcgaagcgtacccgtccccatcctccttttccgaaccaccggagcgcggcggcgcggcgcgagacccttcccgaacctaaccaatctcctgttcttgtgcagggggacgtgggatcgatcggcggctgatgggaggctagattccgcaatcccacagactagacacatccccttcgcggttgactttggcgaatcgaccttgatctgaaaatggggctgttccgggcggcgtccggcctggcccgtttggctctgcgaaggaacctcttgcgcgccgcggcaagcccctttgccgccggcggtggcgccgtcccaggtgccgcgccggcgcgctacttccactccacctgcccgcgccggttcgctgcgcccacgccccgtgctgtgccgctctcgcgcctcaccgacagcttccttgatgggaccagcagcgtctacctcgaggagctgcagcgggcctgggaggccgaccccagctctgtcgatgagtcctgggacaactttttccgcaacttcgtcggccaggctgccaccacctcacccggcctctctgggcagaccatccaggagagcatgaggctgctgctgctcgtcagggcataccaggtgagcggccacctgaaagccaagctcgacccgctcgggcttgaggagcgtccggtcccggatgtgttggacccggcgttctatgggttctctgaggcggacttagaccgcgagttctttcttggggtgtggatgatggctgggttcttgtctgaaaaccggccagtgcagacgctgcgctcggtgctggagcggctcgagcaggcctattgcggtaccattgggtatgagtacatgcacatacctgacagggagaagtgcaactggctcagggataggattgagacagttaacccaatggattacacttatgaccgtcgtcaggtcatgcttgataggcttatctggagcacacagtttgagagtttcttggcgaccaagtggacaactgcaaaacggttcggtcttgaaggtgctgagactctgatccctggcatgaaggagatgtttgacagggcagctcatcttggtgtagagagtattgtcattgggatgccacacagaggcaggttaaatgtcttgggaaatgttgtgaggaagcccttgcgacagatatttagcgagttcagtggtggcaccaagcctgtcaatgaaggcgaggggttgtatacagggactggtgatgtcaagtaccatcttggaacttcatatgataggcctaccaggggtgggaaacatatccatctgtcactggttgcaaacccgagtcatttggaagcagttgatcctgttgttgctgggaaaacaagagcgaagcagtactattctaatgaccgtgacaggaccaagaatttgggagtgttgctgcatggtgatggtagtttctcagggcagggcgttgtgtatgagacgctgcatctcagtgcccttgaaaactacaccactggtgggacaatacatatcgtggtcaataatcaggttgctttcactactgatccaaggtcagggagatcctcacaatattgcacagatgtagcaaaagcattggatgctcctattttccatgttaacggtgatgatttggaggctgttgttcatgtctgtgagctcgccgcagaatggcgtcagacatttcattcagatgtagtggtggacattgtatgctaccggcgatttggccataatgaaattgatgagccgtccttcacccaacctaagatgtacaaggtgattaggaaccatccaagtgcgctagagatttatcaaaggaagttgttagagtctgggaagatctcaaaggaagatattgataggttaaacaaaaaggtcagcactatacttaatgaggaatttcagaacagcaaagactatgttcccaacaagagggactggctttcagcttactggactgggttcaagtcaccagagcagatttcgcgtatccgaaacaccggtgtcaagccagagattctaaaacgtgttggagaagccatgactactctgccagaaaatttcaagcctcacagggctgtgaagaagatttttgatctacggcgtcagatgatcgagactggagaaggcattgattgggcagttggtgaagcacttgcttttgctactcttataattgaggggaaccatgtcaggttaagtggtcaggatgttgagaggggtacatttagccatcgacactctgtcatccatgaccaagaaactggagagcagtactgcccgctggatcatcttgttatgaaccaagatgcggagctttttactgtgagcaacagttccctgtcagaatttgctgttttgggctttgaattgggttactccatggagaacccaaactcattggtcttatgggaagctcagtttggtgatttttcaaatggagctcaagtgatatttgatcagttcctgagtagtggggagtcaaaatggctccgccagactggccttgtcgtttgccttcctcatggatatgatggtcaggggcctgaacattctagtgcaagattggaacgctttcttcagatgagtgatgacaacccttatgttatacccgagatggatccaacactgcggaagcaaatccagcagtgcaattggcaggtcgttaatgtaacaactcctgcaaattatttccatgttctgcgtcgccaggtgaagatctctgcaaaaaattccccttcctagtgtaaaaccatctgatgtgctgcactgaattagctgccctttatttctagatacaccgggacttcaggaagcctttgattgtgatgtccccaaagaacctccttcgccacaaggactgcaagtcgaacctatctgaatttgatgatcttgcgggccaccctggattcgacaaacaggggacacgcttcaagcgtctcattaaggaccagaataatcacaaggacctcgaggagggaatcaaccgcctagttctttgctctggaaaggtgtactatgaactggatgaagaaagaaggaagtcggagcgcactgatgttgctatatgtagagttgagcagctctgcccgttcccctatgacctcatccagcgcgagttgaagagatatccaaatgccgagatcgtgtggtgccaagaggagccgatgaacatgggagcatacagctacatcaacccgcggttgctgacggcgatgaaggttctgggccggggtggcatcgaggacatcaagtacgtcggcagggccccgtcggctgctaccgcgacgggcttctactcggtgcacgtgcaggagcagacggagctggtgcagaaggcgctgcagcgcgaccccctcaactaccctttctgaaagaaacgaggcccctgtagattcttggaattggggaccttttgaatttgatataataccaatatagagagaacatgccttaaattttatctgtgcagccatttggtgaaataattgtttcgactctgcagtaccgcatgaaacaaaccgttgtaagtttggaaaaactccatctcgcagcgttgattttgtgttcctaaatgctggaaagtttgtatggctgaaagcctgaaacaccgcctgccgcaattttcttgcgttgaattgcaaagtctataaaagcaatgaactgatatgtcattcatc

SEQ ID NO: 98108 - DNA, 3751 bp, Zea Mays
ctccggatctatcgccctcgccatcggcaatcggcatcgccaccggtagtgggagggagcaagggggggacccaggccaacgccgcgcacctttgccctcttatcatcatcaacatcaccacgggcgggggagacggccctcgaagcgtacccgtccccatcctccttttccgaaccaccggagcgcggcggcgcggcgcgagacccttcccgaacctaaccaatctcctgttcttgtgcagggggacgtgggatcgatcggcggctgatgggaggctagattccgcaatcccacagactagacacatccccttcgcggttgactttggcgaatcgaccttgatctgaaaatggggctgttccgggcggcgtccggcctggcccgtttggctctgcgaaggaacctcttgcgcgccgcggcaagcccctttgccgccggcggtggcgccgtcccaggtgccgcgccggcgcgctacttccactccacctgcccgcgccggttcgctgcgcccacgccccgtgctgtgccgctctcgcgcctcaccgacagcttccttgatgggaccagcagcgtctacctcgaggagctgcagcgggcctgggaggccgaccccagctctgtcgatgagtcctgggacaactttttccgcaacttcgtcggccaggctgccaccacctcacccggcctctctgggcagaccatccaggagagcatgaggctgctgctgctcgtcagggcataccaggtgagcggccacctgaaagccaagctcgacccgctcgggcttgaggagcgtccggtcccggatgtgttggacccggcgttctatgggttctctgaggcggacttagaccgcgagttctttcttggggtgtggatgatggctgggttcttgtctgaaaaccggccagtgcagacgctgcgctcggtgctggagcggctcgagcaggcctattgcggtaccattgggtatgagtacatgcacatacctgacagggagaagtgcaactggctcagggataggattgagacagttaacccaatggattacacttatgaccgtcgtcaggtcatgcttgataggcttatctggagcacacagtttgagagtttcttggcgaccaagtggacaactgcaaaacggttcggtcttgaaggtgctgagactctgatccctggcatgaaggagatgtttgacagggcagctcatcttggtgtagagagtattgtcattgggatgccacacagaggcaggttaaatgtcttgggaaatgttgtgaggaagcccttgcgacagatatttagcgagttcagtggtggcaccaagcctgtcaatgaaggcgaggggttgtatacagggactggtgatgtcaagtaccatcttggaacttcatatgataggcctaccaggggtgggaaacatatccatctgtcactggttgcaaacccgagtcatttggaagcagttgatcctgttgttgctgggaaaacaagagcgaagcagtactattctaatgaccgtgacaggaccaagaatttgggagtgttgctgcatggtgatggtagtttctcagggcagggcgttgtgtatgagacgctgcatctcagtgcccttgaaaactacaccactggtgggacaatacatatcgtggtcaataatcaggttgctttcactactgatccaaggtcagggagatcctcacaatattgcacagatgtagcaaaagcattggatgctcctattttccatgttaacggtgatgatttggaggctgttgttcatgtctgtgagctcgccgcagaatggcgtcagacatttcattcagatgtagtggtggacattgtatgctaccggcgatttggccataatgaaattgatgagccgtccttcacccaacctaagatgtacaaggtgattaggaaccatccaagtgcgctagagatttatcaaaggaagttgttagagtctgggaagatctcaaaggaagatattgataggttaaacaaaaaggtcagcactatacttaatgaggaatttcagaacagcaaagactatgttcccaacaagagggactggctttcagcttactggactgggttcaagtcaccagagcagatttcgcgtatccgaaacaccggtgtcaagccagagattctaaaacgtgttggagaagccatgactactctgccagaaaatttcaagcctcacagggctgtgaagaagatttttgatctacggcgtcagatgatcgagactggagaaggcattgattgggcagttggtgaagcacttgcttttgctactcttataattgaggggaaccatgtcaggttaagtggtcaggatgttgagaggggtacatttagccatcgacactctgtcatccatgaccaagaaactggagagcagtactgcccgctggatcatcttgttatgaaccaagatgcggagctttttactgtgagcaacagttccctgtcagaatttgctgttttgggctttgaattgggttactccatggagaacccaaactcattggtcttatgggaagctcagtttggtgatttttcaaatggagctcaagtgatatttgatcagttcctgagtagtggggagtcaaaatggctccgccagactggccttgtcgtttgccttcctcatggatatgatggtcaggggcctgaacattctagtgcaagattggaacgctttcttcagatgagtgatgacaacccttatgttatacccgagatggatccaacactgcggaagcaaatccagcagtgcaattggcaggtcgttaatgtaacaactcctgcaaattatttccatgttctgcgtcgccagctgccctttatttctagatacaccgggacttcaggaagcctttgattgtgatgtccccaaagaacctccttcgccacaaggactgcaagtcgaacctatctgaatttgatgatcttgcgggccaccctggattcgacaaacaggggacacgcttcaagcgtctcattaaggaccagaataatcacaaggacctcgaggagggaatcaaccgcctagttctttgctctggaaaggtgtactatgaactggatgaagaaagaaggaagtcggagcgcactgatgttgctatatgtagagttgagcagctctgcccgttcccctatgacctcatccagcgcgagttgaagagatatccaaatgccgagatcgtgtggtgccaagaggagccgatgaacatgggagcatacagctacatcaacccgcggttgctgacggcgatgaaggttctgggccggggtggcatcgaggacatcaagtacgtcggcagggccccgtcggctgctaccgcgacgggcttctactcggtgcacgtgcaggagcagacggagctggtgcagaaggcgctgcagcgcgaccccctcaactaccctttctgaaagaaacgaggcccctgtagattcttggaattggggaccttttgaatttgatataataccaatatagagagaacatgccttaaattttatctgtgcagccatttggtgaaataattgtttcgactctgcagtaccgcatgaaacaaaccgttgtaagtttggaaaaactccatctcgcagcgttgattttgtgttcctaaatgctggaaagtttgtatggctgaaagcctgaaacaccgcctgccgcaattttcttgcgttgaattgcaaagtctataaaagcaatgaactgatatgtcattcatc

SEQ ID NO: 98109 - DNA, 476 bp, Zea Mays
gccccctcaatccctcatagtcagtcatagagcgagaggaagaggcgcgcgtgggtgcagtgcagacgtgcggggcagagcacaacagcagcggatccggggagggagggaagccatgggcgaggaggcggccaagaaggaggaggtggagaagcccaaggaggccgcggcggcagaggagaagaagaaggacgacaagcccaaggaagtaggcggcggcggcggcggcgagaagcccaaggacggggaggaggaggagaagaagaaggaggacgcgcccccgcctccgccaccggaggaggtcgagatgcgggtctacatgcactgcgaggggtgcgcccgcaaggtcaagaagatcctcaggcgcttcgacggtaatgctgatgctgtcctgtcctctgctgcccctacccctctgctgtcctactactatctctacgtgtccatcggttttcttctttgttgttgtagtatta

SEQ ID NO: 98110 - DNA, 1016 bp, Zea Mays
gccccctcaatccctcatagtcagtcatagagcgagaggaagaggcgcgcgtgggtgcagtgcagacgtgcggggcagagcacaacagcagcggatccggggagggagggaagccatgggcgaggaggcggccaagaaggaggaggtggagaagcccaaggaggccgcggcggcagaggagaagaagaaggacgacaagcccaaggaagtaggcggcggcggcggcggcgagaagcccaaggacggggaggaggaggagaagaagaaggaggacgcgcccccgcctccgccaccggaggaggtcgagatgcgggtctacatgcactgcgaggggtgcgcccgcaaggtcaagaagatcctcaggcgcttcgacggagtggaggatgtgatcgccgactccaaggcgcacaaggtgctggtgaaggggaagaaggcggccgccgaccccatgaaggtggtggagcgcgtgcagaagaagaccggccgcaaggtcgagctgctgtcgccgatgccgcccccgccggaggtggaggagaagaaggaagatgaggcggagaagaagaaggacgatgagaagaaggcagagcccgagccgccgaagccggaggagaagaaggaggtgagatcgaaaatcacagcctggtggtctgcatttggccccccgaaactgcatcggttccatgctccatggaacagaggctgatgtgaggatttttcgtttttttttctcttttttcttgttgaagccgccggtgatcgctgtggtgctgaaggtgcacatgcactgcgaggcgtgcgccgaggggatcaagaagaggatcctcaagatgaaaggtgggtgctctgctctccaacataactcctccacccacctgcttgaccaagaattaactagtagtccctgctctgaaccacaaatgtacgtatgtatgtatgggtatggctgtgcatgcaggcgtgcagtccgtagaaccggacctcaaggcgtcggaggtgacggtgaagggcgtgttcga

SEQ ID NO: 98111 - DNA, 1578 bp, Zea Mays
gccccctcaatccctcatagtcagtcatagagcgagaggaagaggcgcgcgtgggtgcagtgcagacgtgcggggcagagcacaacagcagcggatccggggagggagggaagccatgggcgaggaggcggccaagaaggaggaggtggagaagcccaaggaggccgcggcggcagaggagaagaagaaggacgacaagcccaaggaagtaggcggcggcggcggcggcgagaagcccaaggacggggaggaggaggagaagaagaaggaggacgcgcccccgcctccgccaccggaggaggtcgagatgcgggtctacatgcactgcgaggggtgcgcccgcaaggtcaagaagatcctcaggcgcttcgacggagtggaggatgtgatcgccgactccaaggcgcacaaggtgctggtgaaggggaagaaggcggccgccgaccccatgaaggtggtggagcgcgtgcagaagaagaccggccgcaaggtcgagctgctgtcgccgatgccgcccccgccggaggtggaggagaagaaggaagatgaggcggagaagaagaaggacgatgagaagaaggcagagcccgagccgccgaagccggaggagaagaaggagccgccggtgatcgctgtggtgctgaaggtgcacatgcactgcgaggcgtgcgccgaggggatcaagaagaggatcctcaagatgaaaggcgtgcagtccgtagaaccggacctcaaggcgtcggaggtgacggtgaagggcgtgttcgaggagtccaagctggcggagtacgtgtacaagcgcacgggcaagcacgcggccgtcgtcaagtccgagccggccccggcgccggagggcggcggcggcgacaaggcggccaaggaggaggaggagaataagaaggatgcaggcggtgccggaggcgaggagaagaaggacggcaaggaggaggaagagaagaaggatggcggcgagaagaacgaggagaagaaggacggcggcgacggagacggcgacaagaaggacgaggccggcgacaaggacaaggacccggccgccagcctgtacatgcactacccgcggttcccgttcgctggagggtactaccagccgccggcctacccgccacctccggggtacccgtacgcctaccagccggcctacccgccgccgttctacgcgccgccgcaccacctgcaccagcagcagcccatggcgccgcagatcttcagcgacgagaaccccaacgcctgctccgtcatgtagttgtcactcaaatgtcatgtaaaaaaaaagaaccgtaggaccctgtgtttgcgcgggggtcctgcccctgccagagcgagggaccctgtctttgccagaaatgcccctggggcaaccaagctaatggcgactttgtttgaacaaaaagtagcagacttttttgcggggttcgatttctctctctctctctttttcttttgtaattgtaacccttttttcacctttctggactggtataaaagtaagcctggactcgtcagtttatgggtgcatatggaggagtatctttgtgtagaatattctggctggtactg

SEQ ID NO: 98112 - DNA, 595 bp, Zea Mays
gcaagcgaaggtggcgatcgagcaccgccatggggcaaccaagaacagagctcctcgccctcgcattccttctcgtcgccctcgccgccgccgtggccgccgcggcgacagaggtggtagacgcggcgccggcaccagcgaggacgaggacgacgacggcggggtgccggcgcggcgacctggtggtgcggcagcgcgcgacggggcgcgtggtggaggggaagcccgagtacgcggtggaggtgcggaacgcgtgccggtgcgcgcagtcccgcgtgctgctgcgctgctacgggctcagcagcgtggaggccgtggacccgcgcgccatccgcgccgtcgacggcgagcgctgcctgctccgcggcggccgggcgctggcgccgcgcgggggcgccgtgcgcttcacctacgcctggatgacgccgcaggacttcccgctcctcagctcgcgcccgcactgctagccgttccagtaccttactttagctctggcctgggctgttcctgtattacaattgttgttggtacgcactgattcattcagcaaggaagatgatgattggcctgggtctttcgattcagttcctgatta

SEQ ID NO: 98113 - DNA, 1950 bp, Zea Mays
ggctttatcgtcatcatcaccagtggttgccccgtgcaggttcctgtgcccccgcgccactaccgcctctcgcgacatcctctccttcgcgaccacagcaacaaggaggcggctgctcctctccaccgccaccaccaccattgccgccgccatggccgcttcttcctcctgcaaggtcatcgactcccacctgcacgtctgggccacgccacagcaggccaaggaggagtacccgtacttcccaggccaggaacccacgctgcgtggcgacgccgacttcttactcgaggtcagtcagagaacttcagaaatgccgcattcatgtgcacttgaggttgccctggagcccattcgtttcagagtttctgaccatcggcggccgaatgagttgtgcccgtgctcttgatagatggattggtgggcgcatttttcgtacgtctgatgtgaaatcgcacacactgcagcggtcaacctactctaccccaaacctgaaatccttccactaactacatgttacgattcaaccaggtagtagtagcagagttcgtagtagcggagtacagcagggagggaattgggaagaacggagtaggagacgtgaggaacaagaagaagaggaatattctgcttactacatctcatgccatctctcctccccccatttctagcttatatactccaggtcttcacgcccgccaatccgacccgtggaagcggggatggattttcctctggcgacggcgagttcaggataagtgttacgcttatataagccgaaatagcttatatactccttgcataagtgttttccgttaactaaacccttgagcattaagctgcacagacacagttcaggacagaccttcttagcctcagtgtcccacctaaattgtttacaaacataggcaccgacttaaacaactctaccccagcaccagagtaattaaaatccgaaaatgctctgaattacaccaggtctcttatctccacggcaagaatggccgacagagtcatggcacgttctccgtgaggctggtcccttttcacatctaacctactcctgtttcaagtcaaacgatagggaaatcagagggtcggagaccaagaagagaccaatctatactcctggacttctcttgttgctaaatccattctcctggacgttgcaaaaagagaaaaaaagaaagaatatcacgttcctcctttcacgagggaagggagtattagcgaggtccgtccatgtcagcggcatactgggccagaatacatgcagcaaccacgacccccttcgtgggctttcttcccccgcagaaaaggcccaacccagactgacgagcagtttcgcagcgatcagttggccaaaagtatatacgaaacaaacgaagagacgcctgtccaacccgccgactccgatgcaacgcgaacctgtccaacccgccgaccctcggacgcctcacgcacaagcccacacccaccaccggcaaacggcaaaacgcgcgcgcgcggcacatcacatatgcagagcagaatgcagatgcaccacgttgtagcagaccgccggcggcattacgtggaagcggtcccacgaggccttctcgtggtgctgcccgcgacagcgacagcggcagcagcgaccatggcgaatggccacggccacggccggcgcagggcgctcgtggccacccttggcggcccccggaggcgtggcagcgcatgcggttgcgagactcgcttctgcgttcctctgctactggctttgcgccattgtgggcgtgtttgtatcacatgccaatactgctctgtgaggccagaacagagcgaacggtgtaagacgacctcatcatgtgaatagtggatccgacatgtgtggtgtactgtggcattctgcaatgtatgagactcgacttgattcacgaaaaagtaatgtcatacggctgtgttgattcctca

SEQ ID NO: 98114 - DNA, 1241 bp, Zea Mays
ggctttatcgtcatcatcaccagtggttgccccgtgcaggttcctgtgcccccgcgccactaccgcctctcgcgacatcctctccttcgcgaccacagcaacaaggaggcggctgctcctctccaccgccaccaccaccattgccgccgccatggccgcttcttcctcctgcaaggtcatcgactcccacctgcacgtctgggccacgccacagcaggccaaggaggagtacccgtacttcccaggccaggaacccacgctgcgtggcgacgccgacttcttactcgagtgtatgagtgaagctggagtggacggggctgttattgttcaacctattaatcatatgtttgatcattcgttggtaactagtgtgttgaagaaatacccatccaagttcgttggttgctgtcttgcgaatcctgcagacgatgggactgggattaaacagcttgaacatctgattgtacaagaaaaataccgtgctgtgaggttcaacccaaacttatggccatctggtcaaaagatgaccaatgaggttggaaggtcattattttcgaaggcaggagaacttggagtaccacttggaataatgacgatgaagggagttggtccatatattcaagaaatagaggaactgtgtagggattatcctgcaactaccgttattcttgaccatatggctttctgcaagccaccaacgaacgatgaagaagagaaggcattctcttcatttctaagcttatccagattcccacaggtttatgtcaaatacagtgctcttttccgcataacaagagaagcatatccatatgaagacactgctcagcttctttccagtgtgatatctcattatggagccagtcgagtaatgtggggaagtgacttcccctatgttgttcctgaatgtggttacaaaggaggaagggaggcgatttctcatgtcgccagcaagataccagtttcccagtcagatttggaatggatcttgggaaaaacagtgagccaattattccaaggtgcatgggttactccatgatcactgtagctggtaggacaatgtattccagagcaactatatcaacgggaatatatgtccttttttccagtgtttacatgtattctctctgtttcaaataatgtctttatctagatacatatatctaggtgtgtagcaaaatctttaacttcagttcttgattatgcgacctacaccataacctcaatatcgaataatctttgac

SEQ ID NO: 98115 - DNA, 1036 bp, Zea Mays
tttagcttgttgaaattcaaaagacttaatacatggggagctgctcattagtgtactgttttgagaattttctcttcttttcagtgtatgagtgaagctggagtggacggggctgttattgttcaacctattaatcatatgtttgatcattcgttggtaactagtgtgttgaagaaatacccatccaagttcgttggttgctgtcttgcgaatcctgcagacgatgggactgggattaaacagcttgaacatctgattgtacaagaaaaataccgtgctgtgaggttcaacccaaacttatggccatctggtcaaaagatgaccaatgaggttggaaggtcattattttcgaaggcaggagaacttggagtaccacttggaataatgacgatgaagggagttggtccatatattcaagaaatagaggaactgtgtagggattatcctgcaactaccgttattcttgaccatatggctttctgcaagccaccaacgaacgatgaagaagagaaggcattctcttcatttctaagcttatccagattcccacaggtttatgtcaaatacagtgctcttttccgcataacaagagaagcatatccatatgaagacactgctcagcttctttccagtgtgatatctcattatggagccagtcgagtaatgtggggaagtgacttcccctatgttgttcctgaatgtggttacaaaggaggaagggaggcgatttctcatgtcgccagcaagataccagtttcccagtcagatttggaatggatcttgggaaaaacagtgagccaattattccaaggtgcatgggttactccatgatcactgtagctggtaggacaatgtattccagagcaactatatcaacgggaatatatgtccttttttccagtgtttacatgtattctctctgtttcaaataatgtctttatctagatacatatatctaggtgtgtagcaaaatctttaacttcagttcttgattatgcgacctacaccataacctcaatatcgaataatctttgac

SEQ ID NO: 98116 - DNA, 1446 bp, Zea Mays
agcgtcactgactattgggagaccaagccctactacagcagccgcaacaaccgcgaccccgacctcgacccgccatgcagccgcagccgcagggcttcctcgtcgctgctggaatgccgccgtcgcagggatccgggtgtcccgtctcggcggaggtggcgcggacgcgcgctgcggaacagatggcatttgaagacgcgtggaaggccctaaacccggacttcaggacgcccttcgcctccgtcgaggacgccgtcagcaggctgctgccctaccacgtattcgcagagtatgaagagaacgacgacgtagacgagcccatcagtggcggcaccagcagcatctccaccacaacagacaagtcaagcgcccagaattgggaggatggcatgggaactcagctggaaggctttttcgagcacttcgagaagcaggtgctgaccttcaacgtcatgactcagcaacatgcggcaggactcaaccgcgccgaggaacagctcattcttgggatgtctatggtggaagacgagcggcggcagttggagcgcctccgcgcggccgtttcgcagcaccagcagcaggaggccgcgcgcgcgcgtcttgcgttggtgcaggcgcaagcacaggcgcaggcgcaggcgcaggccgcgggcgggtggcatgcgttcgtggctgtgggacgcggcgaaggtgcctcccgcgggcaggccgtggcgatgcagcagcaggagacgatgatgaccccgggcgcctggcaggcgctcaccgcagcggcgtcgcgcggcgagggtggttccaatgagcaggctctgatacaggccgtgatggtgcagaacatgcagcggcagaggcagcaggagatgatggcagcggcgccacgcggagtgggtgcaacctgcgggcaggcgctgccaccggccatggtaacacagctaatgcagcaacataaccagcaggaggaggacatgatgacggcggcgtttcgcggcgacgtgcgccccggcgagcaggcgctagcgtcggccgtgatgatgcggcagctgcatctgctgcagcaacaacagcaccagcaggaggtgatggcggccgacgggtggcaactgggcgggcggcagacatacgcagcgcctcgcggtgacggcagctcgagctctcacgcggcgttgcctcctgcgatgctgcagctgcagcagccaggcccaggacaggggcaggccagcgtcgctgggagtgggatggcgctgccgtggcatgggatcgccgagggaagggaacagtagtgttgatggggctttgcctgattggtccgagaaaaccagttctgcggtcgtgccgcttgcgtctatgggaacattgggatcaacaatacctaaagaccgtagtgtcgtaatgctcatgtgaattaaagcttaactataatcaaagcgtaactatttttcgttataa

SEQ ID NO: 98117 - DNA, 2730 bp, Zea Mays
cccgacggacacgccgtgtgtcgggcggtccggttccaacagccgcagcctcgtccaagctcatcgccgggaccgcgtgcgcgacgtcggcggtctggcacgacgcctgcttcctccggtactcggtccgcgacaccggccggttccgcgaggacgaacacacggagaccgtgttcaacgcgagccgcgcgctgtcgtcgttgccgccgcatgtcggcgccaacaaagcggcggtgaggcgcctactcgccgccgtcgtcgcggacagcacgaggagcggccacatgtgcagcgacatcggtgtaggcactggtgggacgactgcggcaggcggcggccggatctacgggctcacgcggtgcctcggcggtgcctcggccggatctacggatctacgggctcacgcggtgcctcgccgccgggatctcgtgcgccgactgccgccgctgcctcggcggcgctctcgcggtggtagagcgggagtacaacggcagcgcggggatgcaggtcctgcggctcagctgcatggccaggtacgagagctaccccttctacaacaccaagtccttggcccggcgatcgctggcgtcggcgatgatcgattacttccccttaaatgtatcatcatcctttcctgcgagtgtggggggtgtacaacccacaccagcgcctcctggcggtcgtaacccatcgccttcaccgcctgcacaagcacgagcatcacctgcaccagcagcaccgttgaacatctccgggcctgcaactgcgactccgagagctgcacaacccaccccagcgccccctggcggtcgtactcgtaccccacagcatgcagctgccgcaacgaatgatcaaacggcctccggatcatcagagaacaaaaggaaggaaacttcgaatagaaccaaatggctgatcgcttctattgcaactgggttggtggctgccttcaccagcctcgcactcaccatgtccatatggtaccggcggcgaaaacagcaactgtatcagagaggacatgtcataggtttattattttgaatcgtcaaccagatgccgtgcccgaggatactatgcgtgacctagagaagaatcatttggactccgaagaagaagaagacgaggacggaggaagaacgagctaccagctctacaactacctggttcttgaggctgctacatgtcgcttctcaagtagaaacaagctagggagcggtggatttggaacggtatacaagggcacgcttgagaatgggaaggaagtagcagtgaaaaggctcagggactccaagaggacgatacaagaactagagagggagatctccattgtggctagcttgcgccataagaacatcgtgaggtttttaggctactgcttccaagaggaagggaggttcttcatctacgagtacgtgcctaataacagccttgataagttttggtacaaaggtaagttcatttctccccactatattgattacatttaaggggacaacacacccaaaaagttggcttgcaattgcagcatcttctcaatggcaccagaggctagagtgggctacatggttcaacgtcatcttaggggttgctcgcggccttaagtttctccatgacaaggggattattcaccgggacctcaagccacacaatgtacttctcgaccataacttcaacccaaagatcgccgattttgatctcttgaggatgtatgatcaacagaaaactcatgagagcaccgagaaggccgctggaacattcgggtatatggcaccagagtgcacatccggacgaaaattgctgctttcaatcaagtccgacgtgtacagctacggggtgttggtgctggagatcatcaccggccacaagatctacactttcgaaggccaaaactctgaaggcctcgtcgaatacgtgtggcagcactggacggagaagagagcgagcgacgtcgtggattgcgacttgggcatggaagggcaggagcacgggccatggcaggcgctgcggtgcgtgcacgtcgcgcttctctgtgtgcagtcggatcggtcgaggcggccaactatggggcaggtcatcgccatgcttagcagtggcgatgacgggacggaggagctaccggagccatcccggcctgcctgggtacgtcgtccatccaacgacggtgtcaagttttcagctgtgcttcgggtgcaggtagcaccgcttgatgacgtccctccatcaacaaaatggatgggattcttgcatggcttagatttgatcgattatgaactaaacatatttatatttatgatattaatttaaaattatcagattagctatgaaacatatttttataatagaatgatttagagttatactagtacaatactcacgcattgggacgacacataaattattcgataaaacacaatagttacctaaaaacgaacaacacatatattaccatcgatcttaatatctcacaatttttttttgccaacaaccaatacattgttattgttactctctaattttacatcaactatttagactccatctactaagctaggggcacattgcatttggcacaagcaagtctcaaatggcacatagatccatgtcaagaaaaatcttgtatttatgataactttacatctctatggtatgtttttatagtacttgatgtatacatgatcaaacaatgtttaaactaataatgaggtcaatataatatcttttgtatacaca

SEQ ID NO: 98118 - DNA, 333 bp, Zea Mays
aatagatgggttccacaggctgcaagttatggaatgccatagtggggatatagtaatgcagtggtcaatcctctaggaaatacaaacatgccaaatggaaatactcaggattatcaagctggccattcttctattcatgggccactgcctcatttttgccagaatcctttgcatagtatgcaagcacctcaaatacaagtgccccatcaagagttcatcaataacaatgtggtgcatggtttaaatccttctgccacaggacttcctttacatccaagaatgctggctctcccattcaacgctgaacacacttttgggcatccaatgcaccca

SEQ ID NO: 98119 - DNA, 103 bp, Zea Mays
tatttctttgttttctaacaaatatttgcacctggtattatgaaatatctataataataattaaatcctttgatttccatctaaattttagctctatcattat

SEQ ID NO: 98120 - DNA, 189 bp, Zea Mays
gtgagaaattccgcccaacgcgcttcctcgccgaccgggattcttccgcacatccatcccgtaggcaccgcgggaagttgttcgtcaacacgcagcaggcccctacctggcgcgccaactgtcggcgtttcgacccggggggggtccctggaccgacgagtaaaattgtcgctgcgtgtcccagtccag

SEQ ID NO: 98121 - DNA, 2255 bp, Zea Mays
atgtcggtctccttcgtttcaggactagctacttcagcctcgacaacatgcttcggctcagtgcataaaccgaatcttcctccgcttctcttctcacctgtgttgacacccttcgggcaacgagctcagacacgaacaactgtcagaattaacggaaccaaggaagctgctgcgtgtcacagtgcactgcagtgcagtgcagtggaacgcggtgcgaggcccgaggggttggcacactggtgggtgtgggagactgggagggatcagcaccggaccggagaacgcgaagcgaccagagggcgcccgtggcccgcgggccgcccccattccattccttccagttccagatcccataattgcacgcgacactacaccgcccccttccgcaagtcagagggacattgcattggggaactacagaaaagggtccgaatcgaatccgtggtgcactgccccttcctcccccacaagccgccgccgccgccgtgaggactccggcgaatggcgtcccgcgtcgcctcgggcctcctccgccgccgcgccggcgccacactaggcctcctaaggagttatgcacatgtcagaagctacaacagtcaactttcagctttggtttctgctacatctgaatgctcaaatctgccgagaagatgctattacttacctaatccctctccataccaagtttggagtaggtcatttgcttcagacaacggagacaagtttgaggctgttgtgcccttcatgggtgaatctgtaactgatggaactcttgctaacttcttaaagaaacctggagacagagtcgaggctgatgaacctatagcgcagattgaaactgataaggtcactatagatgtcgcaagtcctgaggctggtgttattgaaaagctcattgctagtgaaggcgacacagttactccaggcactaaagttgcaatcatatccaagtctgctcaacctgctgaaacacatgttgctccatcagaggaagcaacttcaaaagaatcatctccaccaaaagttgaagataaaccaaaggtagaggaaaaagccccaaaagtagatcctcccaagatgcaagcaccaaagccaactgcaccatcaaaaacatccccttcagaaccacagctccctccaaaagaacgagagcggcgggtgccaatgccaaggctcaggaagcgtattgcaaaccgtcttaaggattctcagaacacctttgcaatgctgagtacatttaatgaagttgacatgaccaatttgatgaagcttcgttctgattataaagatgaatttgtcacaaagcatggtgtaaaattgggtcttatgtcttgctttgtcaaggctgctgtttctgcacttcaaaaccagccaattgtcaatgctgtcattgatggtgatgacatcatatacagagactacgtagacatcagtgttgctgttggcacttccaagggccttgtggttcctgttatccgagatgctgataccatgaactttgctgacattgagaaagggataaacaaccttgcaaagaaagcaactgagggggcgctctcaattgatgacatggcaggtggaacattcaccatctccaacggtggtgtctatggaagcctcctcagcacacctatcatcaaccctccacagtcgtctattctggggatgcattccattgtgcaacgccctgtggttgtgaatggtgacatccttgcgaggccaatgatgtaccttgcgctgacttacgaccacaggttgatcgatggcagagaggctgtcttcttcctgcggcgcatcaaggatgttgtcgaggaccccaggaggttgctgcttgacatataaattcatgcaccagcgctgcgctgccctgccggactgttttgtgcaattgtgcttatctggaaataatgccatggaaatttttgactgatgaaaaagaattacttcctcagaaagacgaaatctgagctgaggataccgaggtttttctctatataatcgtagaagagcaaactcaactcaacatgaggtcatgtttaattttcggatctgagatgttccattacgggatgcagttcccacaaacagtcattttatttaatatgcaagagcaatagagctgctgcatttttgtttgttggttcacaatttcgcctccagctggccagcctgcaactcgaggaatctggattgtataatgtgacgttggagcggtgctgcaatcgcacgctctgttgaatggtctcgactttaaa

SEQ ID NO: 98122 - DNA, 1915 bp, Zea Mays
cttccagttccagatcccataattgcacgcgacactacaccgcccccttccgcaagtcagagggacattgcattggggaactacagaaaagggtccgaatcgaatccgtggtgcactgccccttcctcccccacaagccgccgccgccgccgtgaggactccggcgaatggcgtcccgcgtcgcctcgggcctcctccgccgccgcgccggcgccacactaggcctcctaaggagttatgcacatgtcagaagctacaacagtcaactttcagctttggtttctgctacatctgaatgctcaaatctgccgagatgctattacttacctaatccctctccataccaagtttggagtaggtcatttgcttcagacaacggagacaagtttgaggctgttgtgcccttcatgggtgaatctgtaactgatggaactcttgctaacttcttaaagaaacctggagacagagtcgaggctgatgaacctatagcgcagattgaaactgataaggtcactatagatgtcgcaagtcctgaggctggtgttattgaaaagctcattgctagtgaaggcgacacagttactccaggcactaaagttgcaatcatatccaagtctgctcaacctgctgaaacacatgttgctccatcagaggaagcaacttcaaaagaatcatctccaccaaaagttgaagataaaccaaaggtagaggaaaaagccccaaaagtagatcctcccaagatgcaagcaccaaagccaactgcaccatcaaaaacatccccttcagaaccacagctccctccaaaagaacgagagcggcgggtgccaatgccaaggctcaggaagcgtattgcaaaccgtcttaaggattctcagaacacctttgcaatgctgagtacatttaatgaagttgacatgaccaatttgatgaagcttcgttctgattataaagatgaatttgtcacaaagcatggtgtaaaattgggtcttatgtcttgctttgtcaaggctgctgtttctgcacttcaaaaccagccaattgtcaatgctgtcattgatggtgatgacatcatatacagagactacgtagacatcagtgttgctgttggcacttccaagggccttgtggttcctgttatccgagatgctgataccatgaactttgctgacattgagaaagggataaacaaccttgcaaagaaagcaactgagggggcgctctcaattgatgacatggcaggtggaacattcaccatctccaacggtggtgtctatggaagcctcctcagcacacctatcatcaaccctccacagtcgtctattctggggatgcattccattgtgcaacgccctgtggttgtgaatggtgacatccttgcgaggccaatgatgtaccttgcgctgacttacgaccacaggttgatcgatggcagagaggctgtcttcttcctgcggcgcatcaaggatgttgtcgaggaccccaggaggttgctgcttgacatataaattcatgcaccagcgctgcgctgccctgccggactgttttgtgcaattgtgcttatctggaaataatgccatggaaatttttgactgatgaaaaagaattacttcctcagaaagacgaaatctgagctgaggataccgaggtttttctctatataatcgtagaagagcaaactcaactcaacatgaggtcatgtttaattttcggatctgagatgttccattacgggatgcagttcccacaaacagtcattttatttaatatgcaagagcaatagagctgctgcatttttgtttgttggttcacaatttcgcctccagctggccagcctgcaactcgaggaatctggattgtataatgtgacgttggagcggtgctgcaatcgcacgctctgttgaatggtctcgacttt

SEQ ID NO: 98123 - DNA, 1998 bp, Zea Mays
cttccagttccagatcccataattgcacgcgacactacaccgcccccttccgcaagtcagagggacattgcattggggaactacagaaaagggtccgaatcgaatccgtggtgcactgccccttcctcccccacaagccgccgccgccgccgtgaggactccggcgaatggcgtcccgcgtcgcctcgggcctcctccgccgccgcgccggcgccacactaggcctcctaaggagttatgcacatgtcagaagctacaacagtcaactttcaggttgttactttgactagccctgtttttagtattttatttcaactattgactataatacatgtgttcttctcagctttggtttctgctacatctgaatgctcaaatctgccgagatgctattacttacctaatccctctccataccaagtttggagtaggtcatttgcttcagacaacggagacaagtttgaggctgttgtgcccttcatgggtgaatctgtaactgatggaactcttgctaacttcttaaagaaacctggagacagagtcgaggctgatgaacctatagcgcagattgaaactgataaggtcactatagatgtcgcaagtcctgaggctggtgttattgaaaagctcattgctagtgaaggcgacacagttactccaggcactaaagttgcaatcatatccaagtctgctcaacctgctgaaacacatgttgctccatcagaggaagcaacttcaaaagaatcatctccaccaaaagttgaagataaaccaaaggtagaggaaaaagccccaaaagtagatcctcccaagatgcaagcaccaaagccaactgcaccatcaaaaacatccccttcagaaccacagctccctccaaaagaacgagagcggcgggtgccaatgccaaggctcaggaagcgtattgcaaaccgtcttaaggattctcagaacacctttgcaatgctgagtacatttaatgaagttgacatgaccaatttgatgaagcttcgttctgattataaagatgaatttgtcacaaagcatggtgtaaaattgggtcttatgtcttgctttgtcaaggctgctgtttctgcacttcaaaaccagccaattgtcaatgctgtcattgatggtgatgacatcatatacagagactacgtagacatcagtgttgctgttggcacttccaagggccttgtggttcctgttatccgagatgctgataccatgaactttgctgacattgagaaagggataaacaaccttgcaaagaaagcaactgagggggcgctctcaattgatgacatggcaggtggaacattcaccatctccaacggtggtgtctatggaagcctcctcagcacacctatcatcaaccctccacagtcgtctattctggggatgcattccattgtgcaacgccctgtggttgtgaatggtgacatccttgcgaggccaatgatgtaccttgcgctgacttacgaccacaggttgatcgatggcagagaggctgtcttcttcctgcggcgcatcaaggatgttgtcgaggaccccaggaggttgctgcttgacatataaattcatgcaccagcgctgcgctgccctgccggactgttttgtgcaattgtgcttatctggaaataatgccatggaaatttttgactgatgaaaaagaattacttcctcagaaagacgaaatctgagctgaggataccgaggtttttctctatataatcgtagaagagcaaactcaactcaacatgaggtcatgtttaattttcggatctgagatgttccattacgggatgcagttcccacaaacagtcattttatttaatatgcaagagcaatagagctgctgcatttttgtttgttggttcacaatttcgcctccagctggccagcctgcaactcgaggaatctggattgtataatgtgacgttggagcggtgctgcaatcgcacgctctgttgaatggtctcgactttaaactcgtcc

SEQ ID NO: 98124 - DNA, 218 bp, Zea Mays
acacatgatgtatgcctaggagtttgcaatacaagaattaaatggttaccaaacatccatgtgtcaccctccataagagtgatgttgatgatggtattctatcgttatccttctcaaaaacaataaactaaaatgtatatgatcatcagaagactaaattatacacaccaaccttcatctatatataattaacattaagtgtttcaggtaggaggagc

SEQ ID NO: 98125 - DNA, 481 bp, Zea Mays
gaagtatcaacaagcttagatttgcatttgtatttttatagaatcatacaaagaaaagaaacaagctaacaagtgtttgtgcaatacaataacaggatgaatgggaaaaaataaaaagccaaaaagaaccaaaagatttggcatgtagggttgaggaatatgagaaacttcataagagttcaaggctgtcccaaaatgagagatgttagtgaagatgaatttcagcctgaacaagagccaaccaatgaggaaaacatttactttgagtctgaccaggagaatgctgccctaatttaaccaatgaggaaaacattgactttgagtataccggccccattactgcacatgcatggttgcttattttattttgctttcgcttatgacttagaactaatttatctttgtgcctctactgccagccagtttgtaacttttgtgtgtgggtagtcccatgagtagtcgacctcacttgtggctgttt

SEQ ID NO: 98126 - DNA, 289 bp, Zea Mays
tcatctctgtgtttccgccttgtccagattcacttgctttggatccgagtcactcgcagcaagagctggagcagcaggaccatcgcttcctcctgatgtaggagcgtcctcactcggagtagtgaatgccagaccttgctgttgcgacgatgcaggttgttgcgggttccaagctgcagcagctgatgcagcaatttgttcttcagttactttcacaagttcatcgctggtgtaaggtgcaggtgcaggcttgatatctgaatgatggatagtaataagccactgacat

SEQ ID NO: 98127 - DNA, 2380 bp, Zea Mays
cttcctctctactctctatatctgctatttctcgctagaagcatctgtgacgctaacatttagtatcagaggaggatttcatggaggaggtgatgcagggtattctcgacacgctggcgcgcacggaggcacgcttgaccgaggcgctggctggtcgctgcggcgagcagtccgcacgcgagcgcaattcctccttcgacggatccgcgcctccttcttccgtcatcaacgcacagtaccgcgacgagcagactgccacagtgctcgcgttcctagggtccgacgagatgtcttcgtcgaccacgctcctcgccggctcggtatccgaccgctacatcccgccgctctacgacgacgaccgctacaccacgccacagccgtttgtcgatactctcgccaaccccgacgacgacctcctccaggagctcgacgtgttggacgaggacgccgcgagcgccgacgtggctgacgacgattcagacgctatacccgtccatgcgccgctcgaccccgacgcgacgatcgagtcaaacgccgacagcagcggatcaccgcactacccgtgcctcccaagggcgcggtgttgttccgtcgggacccagacgagaaggtccacgacgggctcatcggcgggacggagttgcccggcgaagtccgccgtctccgtttctccttgccgtcaccagacctggcgatgaacctcgcgctcgtccccaacaccgacgcagaggaggaggaggttctcaccattacgcccaccaagtgttcgagaatgggcctcaacaacagcacctactccatccccaaccttcccgtggtctgcatcatgggtgggcccaactcagacgactacgactccaactatgccctgcaccacaccatcggccttccagacttttcccaggagctctggtgcttccagatggtcacctgctaccaggccttcatccacaacctggacgacgcacatgagcggattggcacgtccatcgcgacgatgttgagggttcgtgggatgagagttgctgacacgcgcacgcgtgctgggttgggccgccgtgcgcgtctcgcctccgccgcggcggtgctcaacgcatgcgatcctgacgaagctgccatagaggccgggcttcagtccgcccttcccgagcctccctccgagcaggacgccgtcatcgtgctcaacatggctatcgccaccaggccagagattgtcgtgctcgctcgccgctggttcctaggaaacgccgaggtccagaagaaggtcatcctctacaacgtcgagctcaagctgctgcgcaagaaacagcactggtgcgagaccgaggcgccatgggccaagatgctgcggcacggcatgcagcccgacaacaccatcttctcgaccatcaacagctgcgcgtgcgcctacggcctcctgagcaaggttgtcaagtggttcgacaagatgtcggggtttgggtgctcgccggactggctcacatactctgcggtgatcgacacgtacgaccacactgggaacttcgaggcggccctccggcgcgctcgcgcagagaagtggcagctcgaccctgtgctctgttgtactgtgaacgaggtccactcaaccagcggcaacttcaaccgtgcactcaacttattcaaggaaatgaaggcaaccggtgtgaacccaaacctggtcatgtgcaatacaaggttgtatgtcatgggccacgcattgcaaccttgggtggtgaagagcatccacagggagatgattgacaagcaggtgcagcacaacaaggtgacctactgttgtctcctgcatgcatacaccagggcacactacgatgaggatgccatggctgtgtaccggctgatgaaggatgaagcaatggacgtgatgctctacaacatgcttctatccaggtacgtcgacattggctatgtggacgaggctgaggagatcttcagagacatgaaggcgtccatggatgatcgttctaagcctgataagtggagctactcatcgatgctgaggcagtattcatcaactgccaacgtccttggtgtagagggcatactgaatgaaatggtggaagaactgggcaaggtgatcagctgcgttgagacggacaatcaccagcttggttccatagtaaagcccctggttcatgacttagcagacttagcaggacttgctcacagtggaggattcaagcaaccgtggcctccacctatggagtttgagtgcttagactgtgcatggtctccggcaacttggcgatcatgctataaaacaatctctaccgatcaggcgatttttgtatttcttgtttacatggacagttggacacacacaggcaagatgcatggaataaatttgccagcagtccactga

SEQ ID NO: 98128 - DNA, 325 bp, Zea Mays
gctgtacgtcattacgacggtcggatccggatcagacggctgaggttgtaccaatcagctgtgctaacagcagcaccctgcgcttgctctaccggagtagcgcaactccgcaagcaaaacctatctccaagcctccaatctgtgaacggtgaaaaccccaatcgaatgacgccgacggcgagcctcctcctcccggctcccccattcgtctctatctccgatgtgcgccgcctccagctccccccgcgcagcggccaccggcctcgccctgctggaagggcttggagtgcggctccgtacagacgcggatgggatccatgtttaa

SEQ ID NO: 98129 - DNA, 300 bp, Zea Mays
ggctgcttttattcataaattctctatagtagtagaaggtgattcttctagcaatttaaaagtagatgctttgttcggtgtaaatggacctttttctgtactgtcaaaaaattaaaaagcaactccatcagcattatatagattttctatgtttgtgtttagacttgagtataagtgccaaaaaatggtactaaatgattgcaatacgaagaacatggtgataaaaaatattatatctttctaagatactaattcgtatgtaatgcaagtaaaatataagtgcaaaaaggtagaatagat

SEQ ID NO: 98130 - DNA, 744 bp, Zea Mays
atggcaaaggcaatcagcattaagtctgtctctttctctggtttaaggaaggataatgtagccttccgcttgcagccagtgccacaaagattcgcagtctgctgtcctgctaaaaaggagactgtggatcgggtttgtgatattgtcaagaagcagcttgcacttcctgagggcactgaggtctgtggctcctctaagtttcaagacctcggtgctgattcgttggacactgttgagattgttatgggccttgaggaggctttcaagatcactgtggaggagtcgagcgcgcagtcaatcgcaactgtggaagatgctgctaatctcataagcgacaaccagttggtaccttgggagcgggaagggctggtgcttcttactacccagtgcctcttcttgatagactcgaccacctcatcctcttcatcgtcgttcgccaggcaaccgcgccggaccaccagtgcccccatctgtgccggcctgcgcgtttcgaggcggcgacgtctgagggggcagattcgggctcccgacggcggcacaagcaccgcatcggtgtttgacgggggaggagaccacgccgacaacatgacatcgtctggagatggcgtcatctgggcgtctagaagcatcgttggtgaggggtggcgccttggagctccatcgcgcagcgaagagggcactggcagccggagcccgaagggtctggaagcatcgcgtagcgaagatggtacacatgatatatga

SEQ ID NO: 98131 - DNA, 1318 bp, Zea Mays
aaacaccacttcttaccgattagtagaaaaaaaaactcctcggccccagcattttcgtgcaaggggcgagccgccagctactgctggccttttccctcacacaagtcacacgcacacccgctagcccccgtcccccgtcccgcccgtaccttcctccgccgcctccgtcctcgttccaaccgtgggcagcaggcaggcccaagtatctgcagtagattggtggagaggaagaagacggcaggcacccacgcagatcaaacgtgctccgccacccttggtttcggcgaatcggcgccgtacgccgtaaatcgagccgtctccgagcagatcgacgcgctgcatagcaattcgacccgtctccggccaaatcgacgtccagagctgcaaattgacccatctccgcgctgacctccgcttgtgcctgccgaggagcgccgaagttacgcccttctcgtgaagacatccttgataaacctgatggctatcgcggagagctgtgttgatgcggtggtcatggagatggtggctgtctactgcggtggcctctatgccgccaagccagagcttgctgcccgccgcattgaggccatcggctttcaggttgggcaccagctctctgagagatataccatggagcgtccacgatttagtgatcatcttgaagcaatcaaatttatctgcaaagacttctggtcagagctgttcaagaaacagattgacaatctgaaaacaaatcataggggtacctttgtccttcaagataaccgttttcggtggcttactcgtgtttctctagatccatatacagagaacagagattcaactgaaaatgattctgcagcattgggtgatacagcagcccaaacaactaccatgcttctgtatttcccatgtggattgataagaggtgccttgactaacttaggaattccgtgttctgtctctgctgacatgtcaaaccttccagcatgttcgtttgtggtgcgcataaagacatgaactgtgagaaacgatacaagtacagcatgaagatctgacagtacctgcttctggttcaagcgggttgaacattgaagacagcagtatttgggcatgcattagatgtatcgtggtactgcatttagccccgtttgttttttgttttcttttcctccaggaattacttgttttcactatctcaaaatgactttcccgcaacctcctcatgagagcatgtacaaccccatttaagggctaagtgaaaaaatacaaaatacgggctcttcgcgaagaatccgtcttatcatgactttctatacacgtcttttagctgtattta

SEQ ID NO: 98132 - DNA, 1717 bp, Zea Mays
aaccgaaaccgatcacagctgactcccgaatccgtgaaatccccatcgccgtctccgtcttctcctattgccctctcctcgcccgcacagccgcactgtttcccaatcccaaaccctccgaccccacctggaacccaacacgcgcacccacagagggaaccgagcctagccgaaccttcgagaagtttccggaaagccgtgtcgtcgatggcggccgagggcggcggcggccaagagacgttcgaggcgcgggtgaagcgcctgttcgggtcccgcctcttcgacgccgtcccggactcctccttcccgacggcctcctggtccgtggccgcgggcgacgtcgagcgccaacgctgggcgaagccgtcagaggcccgcgacgcggaggaagaggcagcgggtgaggccggccgcggggacacgccctgcgcctcctcgttctacgactccaacggttgcctccgcagccggaggcgcaggtccaggcaggaggagttcgagggggacctggacgacctagatgaagacgaggaggaggatggggagagagggagggcgacggagcaggacgaggacgagggggttagggttaacatcggcctcgaccccactctggatcgggaggaagaggaggacaagtatgacagagaggcctttggtagagaggaggctgctgaccgcgtgtacatgcacgatataatggatgacggtataaacatgagcatcaacagtatagtccctgacctccttgatgattccattgaaggggtgtaccgttttaagaaggatcctcgggcagatatgagggcagcatctgcaagactcagagaagacgatgggtctgctaaagatggtgactctcactatgccactgaagcgaaggacttcctgaatgtgggaattcagacaaagaaagctgtggaggaagtaaatgtaaaacctatactgaagaggaaggaggagcaagcggatttgaaaccaaggaaacgtgtccggtttgatgctaatgttaaggatcgcgagtcggatatgtttgaacgtgatgaagattctccaatggttcctcaatccatggaagtagtcacagggaaggagagcacgcctactttgtctgtgtctcctggtgtccctgactatgtaaggaacccttcaaagtacacccgttacaccctggatgtaccagagtctaatgatgactcgaacaggacggctcttgctgacctgcatgatctgttagggagatcagaccaaaacaggatacattctgagactgctgttgagattcctagctcagtcacattcatccctcgcaaaaagtcagtggatgccatggcagtggatgacggtcccagagctattgattccaactcatctgtaattggattggtagcaggtgcctctgatgaacctgatcaatgcgagatggatgaagatgacagtaatttatcgtcaacgccacagatgcatacaaactcgaaggcaaactctcggcgttacaggtcaagtagaactgatgatgatgagtaaaattgagggccccagggtacctagtctgatgtttgtttaagaagtttttaagtttcggaatacttatgtaaatcaggatatatgtgtgctcttgtgctttgatcttgtgatctgagctaaccaactatgtttaagtacgtttcccccatatgctttgttctataatttcttatattgggatttgagcgcc

SEQ ID NO: 98133 - DNA, 3960 bp, Zea Mays
gtttccgatttcgccaaatatttataatactagtgctattatagtattccgtgctttctttgaaaactgttttttgcgcttcgtaatcgtctctgcttcgcttctccgctccgcctgtcgccaccaccaccaccaactcgccggagaactgtcccgacgactgcgcgcgcggagagctgtgggggcgcgggagagggaggtagtactgggaatggaggaggagtcgaggcttagcggcgctttctcgctccatctctagggtttggttgctagtctgccccggctgggggcgtgcgcgccggcctggagctggactggaggtagcagccagcgtccggctccccgttgcaagcattaagctgcgcggctggagtgccccccccctttggccccgcctccgcgtctttcaactctggtgaaggtgctgctgttgtggcctgcgccatggaaccgtttccccagcttgcggctgcgtccacaggttgcgtgcacgcgtcgggctccggactgtgacgccgacgaggggatctcaggcgcccaactggtccggggtgaggcgcagcgcccgcaggatgccaaccgagcagaggcgctacatgcccccggcccattttcttccggcggagtcggaatcgtcctccttccctgacgagcttcgcttgcgtcctgagaggcaagttggacttttgaagcagggttgctttcctgagcatgctggcagatttgcttgttctcccctgcaaaagctcaagtgtattggcgcaacagtagtggatcagctagatattatgcagccacacaagctaatggaccagaaagtgccatttagccttgatgacaagttgttggatgttaagctgccaccatcttcctggagagaggatcaggatccagcaaaccaactcgattcttttcccaagccattggtttcacctctagaaggtagaaggggaagtgtaaatgggacccaatatgaaagtggacttttctctagctcccttccagaattttttgacaagaaaataagattaactccaaagaacagagttgttggtcatctggttggaaaagttaaccatgctgatgatgaaccatttgagttgacaaaggaaatcgaggcccaaataattgggcaacctgctccctgatgacgacgacttattgtcaagtgtttgtggtgatattgggtataataccaatgcgaataatcaggatgagattgatgatgatattttttgtactggaggtggaatggaattggaagcagatggaaatagcaaattgttaaactttaatggtggagccagtcagactaggtcaattgtccaactcaatggtgagcgatcctcgagaatcctttttgtcggaaacattgatagcaacgtcgaggattctgaattgaaattcatgtttgagcaatatggagacatgcagacacttaatgcttcttgcaaacatcatggttttgtgatggtatcttactatgatataagatcggcagaaaatgctatgagggcccttcaaagcaagccactcagatgtaggaaacttgacatacgttactcgagtccaaaggactatcctttggataaagatatcaacctgtccatggtaatagttaatcttgaagcttcgataactaatgatgacctgcaccagatatttggtgtctttggtgaaatcaaggagattcaccctacttcagataatgaccattacaaatcgatagaattttttgatgtcagagcagctgaagctgcacaatatgccttaaacaggagtgaaatttcaggaaataaaaacaaattggagcctagctgtctgggtggtactgaacgtttgatgcagcagatgtctcgtgcattggaacatgaacagtttggtgcatgtaaactcggaagcccaaacagtccttcaacatgctttggttctgtcaatatggcacccatcagatccactagcacagaaagtggaactgttcaggttttatgttctagagttcagacaccgataaaccaattccgagagggaaggaattttctggatcttccctcaactaccataagtagatcctctcctgttggaattacacctgcaggattacaaagcggccaccacgctcttgatgagcacatccattcacttggaaagatgaatgtacagaacaagggacgaatggattgtggatttcaagagagtactgctttccatcctcattctctccctgacttcaatgacagactaagaaatggtatctcctataactgctcaatacctcccatcggtgttaagagcaatgctagagctgctgaagcaatggatgtcaggcacatttacaaaggaggttgtgggcatctcagcaatcaatcttctgctcatactgaagcacttgggttttcaagaactggtagctgccctctctatggtcaccaactagcatggagtaattctaataacctacaccagcagccttcttctcccatgatatggcctagcatgggcccatttaccaataatatgccatctcgccagttgatgcaagtgcatggaatttcaagagcaccattgcgcatgcttgaaaataatatccctatgaatcaccaacatgtgggatctgccccagctgtcaatccatcaatttgggatagacgacatggatatgcaggggagatgatggaaacaccaggattccacccagggagtgctggaagcatgggtttccctggcagcacacatctgcatcagttggagaccaatggtatgtttcctcacaatggagggactttcatggacccagctatgtctcctgtgcacatgagtgctcgctctcctcagcagagggggcatattttccatcgaaggagcaatgtggctcctattccatcctctttcgattctgctggtgaacggatgcggagccgaagaaatgactcgaatgtaaatcaatctgacaacaaaaggctgtttgagcttgacattgagcgtatagtccggggcgaggactcccggactacactgatgataaagaatatcccaaacaagtacacatcaaagatgcttctggcagctattgatgaaagtcaccggggaacttatgattttatctacctgccaattgactttaagaataagtgcaatgttggttatgcattcatcaacatgatcaatcctgacaatattgttccattttataagacatttcatgggaaaaggtgggagaaattcaacagtgagaaagtggcctcacttgcttatgctagaatccaaggaaaatcagctctagttgctcatttccagaactcaagtttgatgaatgaggataaacgctgccgccctatactcttccactctgatggtccgaatgcaggagatcaagaaccattccctgtgggatcaaatgtccgttccaggcctggaaggtccaggattttgagttgggaacaaaaccaccaggacattgtgtctgatcataccaaaggtggaactccgagcagggctggtggcactccaggttacatcgccacggatactgatcatacggctgttgattgacgaacttgcgacaacacccgacattctgacaattgcaatccagttttttttttttttgaaattgcatcctctcctacctcttttttccttttgttatgttgtatctatatctacttccgcgtgatattttggcaccggaggctctagacggctgcagatttggtcgctgacaagtagcgaggagatggatgttgtgccgtcagtttctccttactttggcacagacccctcagcgggattttgttggacagtttgaccccctttcaccaggaaagatatccatatttgggggagtttccctattgctgtttggcagtgctgtcatgaacattttcctaatgctgtggatgtgaaatttcagaatgatcaaatcgaatgacggatgaatgagagccaataatatttttt

SEQ ID NO: 98134 - DNA, 1937 bp, Zea Mays
atcagatccactagcacagaaagtggaactgttcaggttttatgttctagagttcagacaccgataaaccaattccgagagggaaggaattttctggatcttccctcaactaccataagtagatcctctcctgttggaattacacctgcaggattacaaagcggccaccacgctcttgatgagcacatccattcacttggaaagatgaatgtacagaacaagggacgaatggattgtggatttcaagagagtactgctttccatcctcattctctccctgacttcaatgacagactaagaaatggcacatttacaaaggaggttgtgggcatctcagcaatcaatcttctgctcatactgaagcacttgggttttcaagaactggtagctgccctctctatggtcaccaactagcatggagtaattctaataacctacaccagcagccttcttctcccatgatatggcctagcatgggcccatttaccaataatatgccatctcgccagttgatgcaagtgcatggaatttcaagagcaccattgcgcatgcttgaaaataatatccctatgaatcaccaacatgtgggatctgccccagctgtcaatccatcaatttgggatagacgacatggatatgcaggggagatgatggaaacaccaggattccacccagggagtgctggaagcatgggtttccctggcagcacacatctgcatcagttggagaccaatggtatgtttcctcacaatggagggactttcatggacccagctatgtctcctgtgcacatgagtgctcgctctcctcagcagagggggcatattttccatcgaaggagcaatgtggctcctattccatcctctttcgattctgctggtgaacggatgcggagccgaagaaatgactcgaatgtaaatcaatctgacaacaaaaggctgtttgagcttgacattgagcgtatagtccggggcgaggactcccggactacactgatgataaagaatatcccaaacaagtacacatcaaagatgcttctggcagctattgatgaaagtcaccggggaacttatgattttatctacctgccaattgactttaagaataagtgcaatgttggttatgcattcatcaacatgatcaatcctgacaatattgttccattttataagacatttcatgggaaaaggtgggagaaattcaacagtgagaaagtggcctcacttgcttatgctagaatccaaggaaaatcagctctagttgctcatttccagaactcaagtttgatgaatgaggataaacgctgccgccctatactcttccactctgatggtccgaatgcaggagatcaagaaccattccctgtgggatcaaatgtccgttccaggcctggaaggtccaggattttgagttgggaacaaaaccaccaggacattgtgtctgatcataccaaaggtggaactccgagcagggctggtggcactccaggttacatcgccacggatactgatcatacggctgttgattgacgaacttgcgacaacacccgacattctgacaattgcaatccagttttttttttttttgaaattgcatcctctcctacctcttttttccttttgttatgttgtatctatatctacttccgcgtgatattttggcaccggaggctctagacggctgcagatttggtcgctgacaagtagcgaggagatggatgttgtgccgtcagtttctccttactttggcacagacccctcagcgggattttgttggacagtttgaccccctttcaccaggaaagatatccatatttgggggagtttccctattgctgtttggcagtgctgtcatgaacattttcctaatgctgtggatgtgaaatttcagaatgatcaaatcgaatgacggatgaatgagagccaataatatttttt

SEQ ID NO: 98135 - DNA, 420 bp, Zea Mays
gtcaggtgcggagacgaggcttttgctacacaccttgaaacagagtgcttcaaaaaatatgagaaggcgggcaagacgttctacaactcacagatagctgccacagttcggtggttgtcatctgcaacacccagtcagatgtgtgactgcctcgacgctcttatcgaccgaaccaaagatgatggtgcgtcaggttgccccgacattgtcccagagtcacctccagcatctcctgaaatcgtcgtcggcgcaaggtcaggagaaaccagtaacgacaaaccgcagcatatttgtgagttgaagagttcagatgagtctgcaaagggtgctgcagcatcgactgggaacatggtgctccccgccgtaccgacgttcaaagaattcttgagccaaaaaggaagggatcgggtgttggggact

SEQ ID NO: 98136 - DNA, 1269 bp, Zea Mays
atggagcgcgtgaagtattgtgattgtactgtgtgcagtgtgcagcggtcattgtgttctacccgccggaggaggaggaggaggaggcagatcgaccggcagctgactaaggtggatccacggaggaggcatggcaagaggcccctacccgccgccgaggtggaagaggaggaggaggaggaggcgctgcccccgggcccgccgcccgcaaagcacgagcagctggaggagcctcaccacgccgccgtctcgcagctgcaaggagccacctttagcggcggcggagggtcgtcgtcgtcttccgtgatcggtggcccgtcgccgccgcaggcgtacgcgcagtactactactcggcgcgcgccgacaacgacgcctccgccgtggcctccgcgcttgcccacgtcatccgggcctcgcctgaccagcttccgccgcagcaggcgccggccttgtacggcgccggcgtcccgggcagccttcggctgggagaccacccgcaagcgtctgcgcaccactatcccggtcccggcggccacgtcgccgccgccgaggaggagcaaggtcggaggcggcactaccggggggtgaggcagcggccgtggggcaagtgggcggcagagatccgggaccccaagaaggcggcgcgggtgtggctcggcaccttcgacacggcggaggacgccgccatcgcctacgacgaggcggcgctgcggttcaagggcaccaaggccaagctcaacttcccggagcgcgtgcagggccgaaccgacctcggcttcctcgtcacccgcggcatcccggaccaccggcacccgtcggcggcggtgaccctggcagcaatgccgccgccgcaccaccagcacggccaccagaccgtcgtgccgtaccccgacctcatgcagtacgcgcagctgctgcagggcggccggggcggcggcggccacgccgaggcggcggtccagcaggcgcaccgtcagcagcagcagcagcagctcatgacgatgatgggcggtcggccgggagtcaacctgccctccacgttctcgccgtcgtcgtccgcatcggcgccgcagatactggacttctccacgcagcagctcatccggcccggcccgccgtcgccgtcgccgccgcgggccgcggcaatgccgtcctcgtcggccgctgcggcgccgtccacgccgtcgtccacgaccacagcgtcgtcgcccagcggcggtgcatggccgtacggcggggagcgccacaggaataaaaaagacgcgtga

SEQ ID NO: 98137 - DNA, 1308 bp, Zea Mays
actgctccaccgagctgagcctgagcgcgagcctccgtccgaagtccaaataatcttcagctctcctcgacgcatgcccggatcgatcggtccagttctacccgccggaggaggaggaggaggaggcagatcgaccggcagctgactaaggtggatccacggaggaggcatggcaagaggcccctacccgccgccgaggtggaagaggaggaggaggaggaggcgctgcccccgggcccgccgcccgcaaagcacgagcagctggaggagcctcaccacgccgccgtctcgcagctgcaaggagccacctttagcggcggcggagggtcgtcgtcgtcttccgtgatcggtggcccgtcgccgccgcaggcgtacgcgcagtactactactcggcgcgcgccgacaacgacgcctccgccgtggcctccgcgcttgcccacgtcatccgggcctcgcctgaccagcttccgccgcagcaggcgccggccttgtacggcgccggcgtcccgggcagccttcggctgggagaccacccgcaagcgtctgcgcaccactatcccggtcccggcggccacgtcgccgccgccgaggaggagcaaggtcggaggcggcactaccggggggtgaggcagcggccgtggggcaagtgggcggcagagatccgggaccccaagaaggcggcgcgggtgtggctcggcaccttcgacacggcggaggacgccgccatcgcctacgacgaggcggcgctgcggttcaagggcaccaaggccaagctcaacttcccggagcgcgtgcagggccgaaccgacctcggcttcctcgtcacccgcggcatcccggaccaccggcacccgtcggcggcggtgaccctggcagcaatgccgccgccgcaccaccagcacggccaccagaccgtcgtgccgtaccccgacctcatgcagtacgcgcagctgctgcagggcggccggggcggcggcggccacgccgaggcggcggtccagcaggcgcaccgtcagcagcagcagcagcagctcatgacgatgatgggcggtcggccgggagtcaacctgccctccacgttctcgccgtcgtcgtccgcatcggcgccgcagatactggacttctccacgcagcagctcatccggcccggcccgccgtcgccgtcgccgccgcgggccgcggcaatgccgtcctcgtcggccgctgcggcgccgtccacgccgtcgtccacgaccacagcgtcgtcgcccagcggcggtgcatggccgtacggcggggagcgccacaggaataaaaaagacgcgtga

SEQ ID NO: 98138 - DNA, 1564 bp, Zea Mays
atgttttctcaacctcttgtttccaccaccaccagtctctacctccgtgcgtcgtgcgccaaggcgcgaaccctagccgagatcagatcggaggcgagcgccaccaccggccggaggaagaggacgacacgatgctgcgggttgcggggagaaggctctcgtcttccctctcctggcgccccgccgcggcggtagccaggggtcccctcgccggcgctggcgtccccgaccgggacgacgactcggctcgcggacggagccatccgcggttctccatcgactcccccttctttgtcgcttccaggggtttctcttctactgaaacagttgtcccaaggaaccaagatgcgggcctagctgacctcccagcaactgtggctgctgtgaagaatcctaaccctaaggtggtttatgatgagtacaaccatgaaagatatcctcctggagatcccagcaagcgtgcctttgcatactttgtcctgagtggtgggaggttcatatatgcatcactgctgcgtcttctcgtactgaagtttgtcctgagcatgtcagcaagcaaggatgtgcttgcccttgcttcacttgaggtggacctctccagcatcgagccagggaccacagtgaccgtgaagtggcgtggaaagccagtcttcatcaggcgtcggacagaggatgacatcaagcttgccaacagtgtggatgtggcatccctgcgccacccagagcaggatgcagagcgtgtgaagaaccctgagtggctggtggtcattggcgtgtgcacgcacctcggctgcatcccactacctaatgccggagactttggcggctggttctgcccatgccatggttcccactatgacatttccgggaggatccgcaagggccctgcgccgttcaacctcgaggtccctacctacagtttcttggaggagaacaaactgctcgtaggctaagagctcgaaagctacctgtctgtttatctacttcactcaggtgaatccctgctgtgctgttatattgtttcttcctatgacagtttggctagtgttttttttttgctccacgaggatcattgcaattcctttatggtcgactgttatatgccaaagtgcgtttttcaagtacaaaataatgtgctactttgctgctactaaaatgtaagttgggagtcatttggaacttcagttttctgagataccgtaggaaggatattaattacttcctccgaatttaattttaagtcattctaactttgttagaatcagagcatcttaaatttaaccagatttgtatactaataatagtatttatgataaggacctgtcagtagattcttcgttaattatatttttatattaatacccatttgatgtcataacctttgtaattctctctatagtatttgatcaaattctctaacgggctgtttagatcccttcatttgaaataatttggaacggagaaatggagagaatatatctttcggtacatgtgggcctgtggcggaaagtataattaagctgaaaactttcattatcaatatgaatgcaaaacatattattat

SEQ ID NO: 98139 - DNA, 1069 bp, Zea Mays
ttataattcgtcaatagtaatactaacaatattattgtctagacattttaaaatactaaatttaacctacgcgtcaccgaaatactatattctacaaaatagaactagttcgaatatattcggcaactaaactcctcgaagcatacctcgccttactagtattgctaacttaatcgtatacgcatacgtagcgtcttattttacgatcataaaatcgatagtaaaaatagtgaatcggctcaccacatcacaactcgatttggtagttgcctgaacgacgacgaccttcagctgaagtccttgatcaaacatctggcgagcgtgactgacgagctagggctgaggcgaagcttgatgacgagatcgtgttagaagcgagctggtgaggtagggtttgagcagaggatgatgggttccacgactcgacggtaaacgcgagcacgcgcgaaactcgatggatgaagagcgaacgcacggatgggtcgggctgggaccagaggacgacgaatatgcagagcttcaaaatcacgcgtgcaagatgaaaagacgcgcggccagagacctaagcatccgcggtggtaatttagacgaaagcgaactagtgacgacaactctcggccagacagcgacaactctcggccaggcaacgatgcaccgacacgagtgtcgtggaatgtcagcaccacaacagcaggcgagctgcgaagcggaattaacggcggacaagagcagccaatcggcgagagctaaataccgcgcgatgggcattagggacaagcgcgtgcggcagcgactatggtcgactagctaagcgaggtcgacggtgaacgacgtgacgacgaatgagatcgacgacgtgattgggaattaaagccgagcgaaccgagaggacacgctggcgagcagaaaataggacacgactgcgtgcagaggagaactcggcacgacaaggaagtagaaaactacgacaagggagctcagcgcgcagcgagctgaggaacgatgtcgatgtcatgaccgagccgagaggacgtgcagaacgccgagcagagcgacgacagtgaccagg

SEQ ID NO: 98140 - DNA, 1957 bp, Zea Mays
gataaaatgaaaaaagttgggaaagaaacccagaaccctttccccccaacctagccggcacccaccaatggcgaggccgccgcctgcggcgcccgccccggtgaggcttcgtctgcttttcgaaaacagtcgcctcctccagcgtgtacagagggatgaaggccttcggcgctgctggcttctccttagcccggagctcgacaccgtcgccgaccttgccgctcatgtcgcagcccgtttccgcctccgccgcacctgcccgcgcggcgttgtgctctcgatggacgggtttaccttgccaccattcgagtcaacctgcatcttcagggataacgatattataagggttaaacaaaaatcctgcaggaagcaggatcaaagggatggccgtaaacaccaagaagaagaggcacatgatgatcaccagcttgaagaaaatgtcactgctagccatagcatagaaaacaatggtacaagctctaagaggaagtggaacgatggggttgcagaaatacctgagagctcaaagggaaaaaggccgaaggtgaaaaattctggaaaacatatagattgcagcaaggaagaacagcgtggatctaaaaagttgaagttgtcagttattgatattgaagataagaaagcaactctaaatcatgaaactaccactaccttggtggatcagcaaaaagcagaggggaacaataaaaccgaattgaaatgtgaggcaaatgtggcagactacaatgctcaaagtgatacaaaaaagttggagagtagaagtgctcgtcgcaagaaaaattaaaaggctgatgagacagagaggaaaattacaaacagataagaatgtgcatgaagattcactaatagctcctgattttccatcatcaagcaatcaagatggcttgcctgtcccatcaagcaatcaaaatggatcacatgttcatttttcaagcatcaaagcagatgaggaagaatctgatacatcggatgagattgtcccagttgtggttcggcctggtcacattcgctttgaaccagcaggtggagaacccgacaaatcgccagcacaggagttacaggagggagatctgattgcctaccgattggttgagctgtcttccatgttgtgtccggagctctcttcgtaccgtgtgggaaaagttctggtatatgatcccgtatcattgcgtatcattctcgtacccgttcaagagtatccaatcaccaccgaggaaaaagaaaacaaggacgagtcagatatgcttgtggatttgtcaccgtacaaggaagatggctccttggagatcgagtactcttcacttgttgatgtaaggctactgaagggtatcgaaacatgcaacgaagttggatcagcaccggccggaaggccagttaccttgcacaaaaacgaaggcaatattgagagccagaaatcacccttggtgtcaaacaacactaaaggcgaagaacgcgcactaggaaagtcagaaagtacggtctgggaaaaaaatggtgagcccagtgataaggttgatcttctgcaaaatggctgggcaacatggaaacaaaatgctagtacgtcagcttggtcttacagagccctcaggagcagcgcccttggcccgacgatggcaattctacgagggaagaacagccagagtaaaccacccaatcgaaagaactccaagtgatgcctaagtatttaataacttcagtgatacctatgtaatccaaagttgatccgatcctttggagaaggtcaagcaagtcgatgtagttggtcttatatatgtaactgcaattactgccctgcctattttgaaaattccaaagtggtgactgatgcaaagggaactttttagaccagtcaagactcgttactatgcaatgtcagcttatttaatgttgatgaaaattcactaaaattgatctttattgtacatcactcagatcttca

SEQ ID NO: 98141 - DNA, 2229 bp, Zea Mays
gataaaatgaaaaaagttgggaaagaaacccagaaccctttccccccaacctagccggcacccaccaatggcgaggccgccgcctgcggcgcccgccccggtgaggcttcgtctgcttttcgaaaacagtcgcctcctccagcgtgtacagagggatgaaggccttcggcgctgctggcttctccttagcccggagctcgacaccgtcgccgaccttgccgctcatgtcgcagcccgtttccgcctccgccgcacctgcccgcgcggcgttgtgctctcgatggacgggtttaccttgccaccattcgagtcaacctgcatcttcagggataacgatattataagggttaaacaaaaatcctgcaggaagcaggtagggcacatgatgatcaccagcttgaagaaaatgtcactgctagccatagcatagaaaacaatggtacaagctctaagaggaagtggaacgatggggttgcagaaatacctgagagctcaaagggaaaaaggccgaaggtgaaaaattctggaaaacatatagattgcagcaaggaagaacagcgtggatctaaaaagttgaagttgtcagttattgatattgaagataagaaagcaactctaaatcatgaaactaccactaccttggtggatcagcaaaaagcagaggggaacaataaaaccgaattgaaatgtgaggcaaatgtggcagactacaatgctcaaagtgatacaaaaaagttggagagtagaagtgctcgtcgcaagaaaaattaaaaggctgatgagacagagaggaaaattacaaacagataagaatgtgcatgaagattcactaatagctcctgattttccatcatcaagcaatcaagatggcttgcctgtcccatcaagcaatcaaaatggatcacatgttcatttttcaagcatcaaagcagatgaggaagaatctgatacatcggatgagattgtcccagttgtggttcggcctggtcacattcgctttgaaccagcaggtggagaacccgacaaatcgccagcacaggagttacagggcacgttccaatggagtgcaacaatgagcaaaaagaagggccagaagtggggaatgaatagctcaaacaagaaaaatgctgatatcggctatcatgcaggaatagctggatgcagcacagaagttaacaatcatgtcatggacattaaggttactgaaaatggcttttgtgctgtcaataatcgaaggaacaatgaaggcagtaacattgagatgtccagtgtgcaaaatattgctaatgaagaaaagtctagcgaacctttcaattttgagagcttgtaccccctaacacgacttccaaaggagggagatctgattgcctaccgattggttgagctgtcttccatgttgtgtccggagctctcttcgtaccgtgtgggaaaagttctggtatatgatcccgtatcattgcgtatcattctcgtacccgttcaagagtatccaatcaccaccgaggaaaaagaaaacaaggacgagtcagatatgcttgtggatttgtcaccgtacaaggaagatggctccttggagatcgagtactcttcacttgttgatgtaaggctactgaagggtatcgaaacatgcaacgaagttggatcagcaccggccggaaggccagttaccttgcacaaaaacgaaggcaatattgagagccagaaatcacccttggtgtcaaacaacactaaaggcgaagaacgcgcactaggaaagtcagaaagtacggtctgggaaaaaaatggtgagcccagtgataaggttgatcttctgcaaaatggctgggcaacatggaaacaaaatgctagtacgtcagcttggtcttacagagccctcaggagcagcgcccttggcccgacgatggcaattctacgagggaagaacagccagagtaaaccacccaatcgaaagaactccaagtgatgcctaagtatttaataacttcagtgatacctatgtaatccaaagttgatccgatcctttggagaaggtcaagcaagtcgatgtagttggtcttatatatgtaactgcaattactgccctgcctattttgaaaattccaaagtggtgactgatgcaaagggaactttttagaccagtcaagactcgttactatgcaatgtcagcttatttaatgttgatgaaaattcactaaaattgatctttattgtacatcactcagatcttca

SEQ ID NO: 98142 - DNA, 2350 bp, Zea Mays
gataaaatgaaaaaagttgggaaagaaacccagaaccctttccccccaacctagccggcacccaccaatggcgaggccgccgcctgcggcgcccgccccggtgaggcttcgtctgcttttcgaaaacagtcgcctcctccagcgtgtacagagggatgaaggccttcggcgctgctggcttctccttagcccggagctcgacaccgtcgccgaccttgccgctcatgtcgcagcccgtttccgcctccgccgcacctgcccgcgcggcgttgtgctctcgatggacgggtttaccttgccaccattcgagtcaacctgcatcttcagggataacgatattataagggttaaacaaaaatcctgcaggaagcaggtagggcacaatgatgtgcactgtattcgagatcatgatataatagagaagatgccgcttccagttgatgacaaaatccttgccatccaggatcaaagggatggccgtaaacaccaagaagaagaggcacatgatgatcaccagcttgaagaaaatgtcactgctagccatagcatagaaaacaatggtacaagctctaagaggaagtggaacgatggggttgcagaaatacctgagagctcaaagggaaaaaggccgaaggtgaaaaattctggaaaacatatagattgcagcaaggaagaacagcgtggatctaaaaagttgaagttgtcagttattgatattgaagataagaaagcaactctaaatcatgaaactaccactaccttggtggatcagcaaaaagcagaggggaacaataaaaccgaattgaaatgtgaggcaaatgtggcagactacaatgctcaaagtgatacaaaaaagttggagagtagaagtgctcgtcgcaagaaaaattaaaaggctgatgagacagagaggaaaattacaaacagataagaatgtgcatgaagattcactaatagctcctgattttccatcatcaagcaatcaagatggcttgcctgtcccatcaagcaatcaaaatggatcacatgttcatttttcaagcatcaaagcagatgaggaagaatctgatacatcggatgagattgtcccagttgtggttcggcctggtcacattcgctttgaaccagcaggtggagaacccgacaaatcgccagcacaggagttacagggcacgttccaatggagtgcaacaatgagcaaaaagaagggccagaagtggggaatgaatagctcaaacaagaaaaatgctgatatcggctatcatgcaggaatagctggatgcagcacagaagttaacaatcatgtcatggacattaaggttactgaaaatggcttttgtgctgtcaataatcgaaggaacaatgaaggcagtaacattgagatgtccagtgtgcaaaatattgctaatgaagaaaagtctagcgaacctttcaattttgagagcttgtaccccctaacacgacttccaaaggagggagatctgattgcctaccgattggttgagctgtcttccatgttgtgtccggagctctcttcgtaccgtgtgggaaaagttctggtatatgatcccgtatcattgcgtatcattctcgtacccgttcaagagtatccaatcaccaccgaggaaaaagaaaacaaggacgagtcagatatgcttgtggatttgtcaccgtacaaggaagatggctccttggagatcgagtactcttcacttgttgatgtaaggctactgaagggtatcgaaacatgcaacgaagttggatcagcaccggccggaaggccagttaccttgcacaaaaacgaaggcaatattgagagccagaaatcacccttggtgtcaaacaacactaaaggcgaagaacgcgcactaggaaagtcagaaagtacggtctgggaaaaaaatggtgagcccagtgataaggttgatcttctgcaaaatggctgggcaacatggaaacaaaatgctagtacgtcagcttggtcttacagagccctcaggagcagcgcccttggcccgacgatggcaattctacgagggaagaacagccagagtaaaccacccaatcgaaagaactccaagtgatgcctaagtatttaataacttcagtgatacctatgtaatccaaagttgatccgatcctttggagaaggtcaagcaagtcgatgtagttggtcttatatatgtaactgcaattactgccctgcctattttgaaaattccaaagtggtgactgatgcaaagggaactttttagaccagtcaagactcgttactatgcaatgtcagcttatttaatgttgatgaaaattcactaaaattgatctttattgtacatcactcagatcttca

SEQ ID NO: 98143 - DNA, 985 bp, Zea Mays
cgaggtgccgcgcatttcaacgggtctcgcatggggtgcaacggaataagaatggcgtcgccgtcagcgtcaggagagaagaagactacgatcctggtggcgaggaagggccggctgcggcagcgctacgacggcgagtaccgcctggtggccgggtgcgtgccgtaccgcgtggacgcggacggccagacgcagctgctcatggtgtccacgcccaacagggacgacctcgtcttccccaagggcgggtgggaggacgacgaggacgtgcacgaggcggcgtgccgcgaagcgctggaggaggccggcgtcaggggcgccatcaaccgaagtgcgctcgggatgtgggtgttcaggagcaagagcagtccggtgagcagcgacagcccccggggcgcctgcaagggctacatcttcgcgctggaggtggcggaggagctggagcagtggccggagcaggacacccacggcaggcagtgggtctccccggcggacgcgtaccgcctctgccgctacgactggatgcgcgaggcgctgtcggcactgctcgaccgcctcacggaggagcccgagccccccaagtcccccgccgcggacggcctcggcgagcacgcaggcgtgtgcatgatggtcaaggcgaccacagccgctgcggatcgagcggtggcgctctgctagtggcatcattctgaacatgtgcaaatcctcatcatctgggtcgtcaggctcggctgttcgttcgaacttggtgtggttggtcggtgaatgcagtgtatggaaacttgtctcgtcaatccagggcttgtaaatgatgtcggttacgccacgtgttaaatcaaatggctacaactgtccgtagtgcgtagctgagagtttccttgtcaaatctattgaggtttccactgtttgatcctcgcttcgtgtgctaaccttctcgacttctttcaactgtccccccctatatacaatatcttagttttgtttt

SEQ ID NO: 98144 - DNA, 1322 bp, Zea Mays
tttatttgtatactggccgcaattctttactgtctagtcttactctttcctcttgcctccgcaccgaagcagaggaatagtagtgggtcggtctggttggccggtgctggtgcgttaatggcggttgacctcttcatcgatgcctcccggcgcctttaaatcgggcgggacgaagcgtctcctagcctctcgtcgcctcagctccctcttctccccgtgaccgaaccaaacactgagcggaagaagcttcgaaccccttctggccatctctcgtcctcctttcaattcttgagctttgtgcttccatctcctctcctctgttctcttctttgtctctgcgtgcctgttcttgtcgtctcgctcgatcgtaagtgcaacggaataagaatggcgtcgccgtcagcgtcaggagagaagaagactacgatcctggtggcgaggaagggccggctgcggcagcgctacgacggcgagtaccgcctggtggccgggtgcgtgccgtaccgcgtggacgcggacggccagacgcagctgctcatggtgtccacgcccaacagggacgacctcgtcttccccaagggcgggtgggaggacgacgaggacgtgcacgaggcggcgtgccgcgaagcgctggaggaggccggcgtcaggggcgccatcaaccgaagtgcgctcgggatgtgggtgttcaggagcaagagcagtccggtgagcagcgacagcccccggggcgcctgcaagggctacatcttcgcgctggaggtggcggaggagctggagcagtggccggagcaggacacccacggcaggcagtgggtctccccggcggacgcgtaccgcctctgccgctacgactggatgcgcgaggcgctgtcggcactgctcgaccgcctcacggaggagcccgagccccccaagtcccccgccgcggacggcctcggcgagcacgcaggcgtgtgcatgatggtcaaggcgaccacagccgctgcggatcgagcggtggcgctctgctagtggcatcattctgaacatgtgcaaatcctcatcatctgggtcgtcaggctcggctgttcgttcgaacttggtgtggttggtcggtgaatgcagtgtatggaaacttgtctcgtcaatccagggcttgtaaatgatgtcggttacgccacgtgttaaatcaaatggctacaactgtccgtagtgcgtagctgagagtttccttgtcaaatctattgaggtttccactgtttgatcctcgcttcgtgtgctaaccttctcgacttctttcaactgtccccccctatatacaatatcttagttttgttttt

SEQ ID NO: 98145 - DNA, 255 bp, Zea Mays
atgggcagcagcgtgcagtgggtgggtgcttgcttcgtcgtgggctcgtggcgggtccagcagcagctgcaggtgcaagcaaccgccgccattactagctatgactacgagtctacgatgacgatcgcgagcaagggtgcatgcatgcaggggccggggatgctcatgtctgctgggactgctgggagcagcgtccagacacggatcgttttccggtacgccaggggctttaaattcccccggccggaggagtag

SEQ ID NO: 98146 - DNA, 1562 bp, Zea Mays
atgccccattttcataggttatgtagccatttaaggtctcataggctgttagaggataccgtcaatgtctctgttgaagaacaggttgctatgttcttaaagtttgttggccatagatggacaaataggtcagttgggtttgaattcctacagtccggagaaacagttagcatgtacttcaaccttgttttagatgctccatgtgtcatgtcacatgacctcattactatgagaaccacagagacacatccaaagatatctagtagcccgggaagatttcacccttactttgagatgagtaaaggaaaagagaagattgagaggaccattgtgtgggatgaggatcaaagcaagtttatgcttggttggtttactgacttcataaaagaacaatatgctggttttaagattaaaaaacaacgccacttcaagtgtgctgaggcattgaacagacaattcaatatgggggtcactgctactcaagttgaaagacattacaggcattataaagagaattggaagtttgttgctgcagccttaagcaagagtggtaacacttttgacacaataaggtctatggtagtcatatctgaatcagagaaagctaacctaaaggatagggcaagaaggctcatttctaagcctatcaagtttttcaatgaaatgcaagagttgtttattaacagcagtgctgatggctctctagccatggaagctacaacttgtatgaatgaaactcatcctggagatgacagtgacttcaatgatgatgtgtgcagtgacttctccaactatcctcagcctgtgcatgatctaggtgatgattctgacactttaccatctcccaatcatcatccatctcaaaacgttgatcatagctcgtcaagttctggactgaagcgcccacaaggagagggagtaccagcgaaaaggaatgtgaaaccaaagagtcgcacaacaaaggtagtagatgaactcagtgctactttggtagaacttcgaaatgatcttaagaagccaccacctccagtgcctatgccttttggtaaccctgatgcaatattgtggcaaaggcttgagaatatgacaattactactgatcaaaagttaatggtaggaacgtatctagcacacaaagatcaaaagggtatgcgtggtttcttatctgctgcatcagacataacatttgagtcatgggtactaaagcatctgagtgatttggacctatgaatcgactaggatgatccatgtaggagatgaatggtgtgatagttgggttttttgcatttcttctaggttgatggatgtcaattgatggagatatttggtggttgtgactgctgttacattgctctttttgttgatttttaactttgagggtaccaatgagcatagtgcatagcaccagtaccttttacaattatggaatctctgcaaagcaaggaaggcattggactgtaataaattttgctccaatttcgcattgcaaatgttctagtagtgtcagatttttctctaatgcttctagtgaaaaatgagaccttttggagacagtttctaaa

SEQ ID NO: 98147 - DNA, 913 bp, Zea Mays
gtgacaaccagcacagttccacttacattgaggtgattaggtggtgctacaagagaagtgagaagtcggtttgcatggtagaataagggtgattctgagccttttttgtgttttacagacttatcacttgtctgatctcatagtgttgctatttgtattttatttctgaaaaattttacgggttgcttgcctaagtaagtcttcataaacatttaagtggtgtgtacttttggattgttggcagggtccaattttgtgaaaggaatgcttttgctccccttgccttttcggatcgaaatcttggtgttgactgctaatgcagttttagattgttggtagggtccaattttgtgaaaggaatgctgaactgctgatgagtgatgaggagcgatgatgctcaaccttttctaaaatgcatggcactgagcaatgaaggctgctacaagtgtctactttgagctaaccctctccccacatgaagcctattttaatcacccctttttggtttgtggttgtgcctaggatggtcattcggatatgtgacaaccagcacagttccacttacattgaggtgattaggtggtgctgcaagaaaagtgagaagtcggtttgcatggtagaataagggtgatgctgagcccttttttgttttatgttatgatgctttttgtccaatatttttattttgtagtaactcttgagtggctatgatggtttaaatttccatggtaaagctgtttacgtgcatctgttcgatccgtggcttctcggcgctatcccaggtaattttcccgtctcttcattcgaactcatagcagtagcgcacaagtttttcttgattagtggtatactcagatcagtggtatattcagaacaagtttttcttgattagtgttatttttcttgactcggc

SEQ ID NO: 98148 - DNA, 198 bp, Zea Mays
atgacgagccacgcggacgacagcacaacgcgcccaacagccggagccgaaggtcgagaggatgaagacgttcaacatcaccggcccttcatcacggggttcgccatcaccggcttcatcatcatcaagatgacgaccaacttcaccgaggaggacctcaagaactccaagttcatccaggagcacaagagacgctga

SEQ ID NO: 98149 - DNA, 4106 bp, Zea Mays
gtgtaaccgtatattcacaactgttctcgtttccactgtcctgttttcagtaaaaaaaaataataacagaaatggaagaaagttttttcggacggttttcgtccgttttcatctcttcggaacagtggatccctcccctcgttcaccccacacgtgtctggctccagagccgtggttacgaaacgctccactccgctccgctttcccagttccggccaccgagcatggcaccaccccttccctccgtctcccgtggttcgcgggcgctcgtccaagcatccaaccccagctccgtgcgtcgcggcgcgaccaccggacctataagtacggaacgctcatgtccgcctcttgctttcctacctctccgcccccgttgcctcccaccgccgagacgacgcggacttcgtaccctctcaccgacgtgtgcgccgctgtcttccccggcactcactgctgctggttcggctcccgaaccttcgtcgactccgcatttctgaacaggatttttcatacattccaataacctcctaattgtccgaaggtgtcatatgtgacgagagagcacagatgtctctagaagttgagaagccaccagaaacgaccaagcagctcaagcgacaggattcactctatggtgatgcagaaaaggtctccggcttcaagcaccatggctctgagggaggctggccgcggttgctgcagcttgcatttcagagcattggcatcatctatggggacgtcgggacatcaccactctatgcgatatccagcaccttccctgatggcatcaaggaccaggatgacctacttggcgtcctctccctcatcctctacaccctaatcctgataccaatggtcaagtacgtcttcattgtgctttatgcagatgacaatggagatggtggcacgttcgccctctactcacttatatcgcggcactccaaggtaaggctgataccaaatcagcaggctgaggatgccatggtgtcaaattatggcatcgaagcgcccagtccggaactgagggtggcacagtggctgaagcagaagctcgagtctagcaaggcggcaaagattagcctctttatcattacaatccttggcacatcaatggtgatgggggatggaaccttgacaccatcaatttctgtgctctctgcagtgagtgggatcagggagaaggtgccaagcttaactgaaacgcaggtagtctggatctcagtgccgattttgttcgcgctcttctcggtccagcgctatggtacagacaaggtcgggtattcctttgctccgatcatcacactatggttttttcttattgctggcattggaatgtataacctcattgtgcacgagatcggtgttctccgagccttcaatccaatgtacatagtggattacttcagaaggaatgggaaggatggatgggtttcactgggtggcgttatcttgtgtgtcacaggcacagaaggaatgtatgcagacctaagccatttcaatatcaaggccattcagatcagctttagcactgtcttgctcccctccgtggcactgtgttacatcggacagacagcttacctgaggaaattcccagagagtgtcgcagacactttctttagatccatcccagagctaatgttctggccaaccttcattatcgccatcctttcggctatcatcgcaagccaagccatgctgtcaggcgcattcgccatcctctccaaggctttgtctcttggctgtttccccagtgtccaggtgattcatacatccaagagctacgagggccaggtttacattcctgaagtgaactttttgatgggattagcaagcatcatcgtcacgatcaccttcagaaccaccaccgaaatcggcaacgcttatgggatctgtgtggtaaccgtgttctcgatcaccacccacctgacgaccattgtgatgttactcgtgtggaggaagaatttcatcatcgtcttgcttttctacgtggtgttcagctccatagagctggtctacctctcatccatactgaccaagttcatccaaggcgggtacctgccgttctgcttctcgcttgtcctcatggccttgatgatcacatggcactacgtccacgtgatgaagtactggtacgagctggaccacgtcgtgccagccaacgaagtgacaacgctgcttgagaagcatgaggtgcggcggatccccggggtgggcctcctttactcggacctggtccaaggcatcacccccgtgtttccacgtctggtgcagaggataccctccgtgcacgcggtcttcctgttcatgtccatcaagcacctgccgatcccacacgtggcccctgtggagcggttcctcttccggcaggtcggcccgagggagcaccggatgttccggtgtgtggcgaggtatgggtactgtgacaagctagaggagtcggggctgttcaaagggttcctcatggagagcctaaagacgttcatccaagatgaggctgcgtttaagacgaactctacagctggagataccaaggagctgaccgatcccaaggtgtctggccatgatttggctcgttgggtcgaaaaggaaaagcaaatgattgacaaggagatggagcgaggggtggtctaccttatgggggaagccaatgtcattgcaggaccagaatcatctgccgcaaagaagatagtggtagactatgtctacgcattcttgaggaagaacttgacggagggggagaaggtgctctccattccgaaagaccaactactcaaagtagggataacatacgagatatagggattatgctgggcctcaagttacaatcctatgtatcaacttggcctgaagtcatataaagtttatgtatatcgagagattcaagattcaatgtaaattattcaattttattccttccacatggtatctatgaaatcgatctcagcaggggctatgtccttgttaagccaatagatcctattcagttgtcgcatttgctggggggcaactcccttattggtggtacatcatgagttcaagttttaatatttgagttacaatattagaagtctgtcacagcggtgcgcactgcacagtgaaacctgcagctttgatatttgtacacgtgctgtattgactggattcacgacggtttgcacgaatgctacaacagaaaattcccgatcccctgtctgaacgtttgcatcatcgtcatcgcgcatccactaaattcttctatcgtcgtcctcccttaatcagccgattgtgtttgatccacctagcccacgtgaatttcatcagcgagtagatcaagctatcgattgtgttttacctttagcatcgccccctacaatgggagcagatcaagctatccatcccatacatgtatgtgagctaacatcactgcaacagagaacagcagagaagggagaaaggaccagtgaacatttatatatccccattacatttatatatctgtttaatgctaaagatcaagtctgacaaatattctggaggcaaaggatataccgaaggtagtactggcatggagactgccaaataacgccaatgatcagacacgtgcatacaaatccaccatgggctactgcatgagacctagtacagtaccgaggtatggaaggtttaacatggttcctgttgatcagcaacagcaaggcattttgaggatacttagatgtgggactaaccaaatattttctaggcttagcaggctatggtaatatttagatttttttagataatgatggtaatatttagatgattgcccataactatgatggtaatgcaatagcattaagcttattcttgtgagcagcggaaatctcacccaacatatgcactatttaccattcgtcatttcatgactctaccaccttgtagaaaaatcatttgggatgaataagagcaaatagtttaatcgttacagtagccgaaatttgtgcttatgttgccaatagaagctgtgacactagcagcccagcaggtgttaggctatagaccttatcgtctaattagaattcagaagctgggtcgtgtaccactttcttccacatatttctgaaggcagcataccgactcccaatcgc

SEQ ID NO: 98150 - DNA, 2682 bp, Zea Mays
ggctccagagccgtggttacgaaacgctccactccgctccgctttcccagttccggccaccgagcatggcaccaccccttccctccgtctcccgtggttcgcgggcgctcgtccaagcatccaaccccagctccgtgcgtcgcggcgcgaccaccggacctataagtacggaacgctcatgtccgcctcttgctttcctacctctccgcccccgttgcctcccaccgccgagacgacgcggacttcgtaccctctcaccgacgtgtgcgccgctgtcttccccggcactcactgctgctggttcggctcccgaaccttcgtcgactccgcatttctgaacaggatttttcatacattccaataacctcctaattgtccgaaggtgtcatatgtgacgagagagcacagatgtctctagaagttgagaagccaccagaaacgaccaagcagctcaagcgacaggattcactctatggtgatgcagaaaaggtctccggcttcaagcaccatggctctgagggaggctggccgcggttgctgcagcttgcatttcagagcattggcatcatctatggggacgtcgggacatcaccactctatgcgatatccagcaccttccctgatggcatcaaggaccaggatgacctacttggcgtcctctccctcatcctctacaccctaatcctgataccaatggtcaagtacgtcttcattgtgctttatgcagatgacaatggagatggtggcacgttcgccctctactcacttatatcgcggcactccaaggtaaggctgataccaaatcagcaggctgaggatgccatggtgtcaaattatggcatcgaagcgcccagtccggaactgagggtggcacagtggctgaagcagaagctcgagtctagcaaggcggcaaagattagcctctttatcattacaatccttggcacatcaatggtgatgggggatggaaccttgacaccatcaatttctgtgctctctgcagtgagtgggatcagggagaaggtgccaagcttaactgaaacgcaggtagtctggatctcagtgccgattttgttcgcgctcttctcggtccagcgctatggtacagacaaggtcgggtattcctttgctccgatcatcacactatggttttttcttattgctggcattggaatgtataacctcattgtgcacgagatcggtgttctccgagccttcaatccaatgtacatagtggattacttcagaaggaatgggaaggatggatgggtttcactgggtggcgttatcttgtgtgtcacaggcacagaaggaatgtatgcagacctaagccatttcaatatcaaggccattcagatcagctttagcactgtcttgctcccctccgtggcactgtgttacatcggacagacagcttacctgaggaaattcccagagagtgtcgcagacactttctttagatccatcccagagctaatgttctggccaaccttcattatcgccatcctttcggctatcatcgcaagccaagccatgctgtcaggcgcattcgccatcctctccaaggctttgtctcttggctgtttccccagtgtccaggtgattcatacatccaagagctacgagggccaggtttacattcctgaagtgaactttttgatgggattagcaagcatcatcgtcacgatcaccttcagaaccaccaccgaaatcggcaacgcttatgggatctgtgtggtaaccgtgttctcgatcaccacccacctgacgaccattgtgatgttactcgtgtggaggaagaatttcatcatcgtcttgcttttctacgtggtgttcagctccatagagctggtctacctctcatccatactgaccaagttcatccaaggcgggtacctgccgttctgcttctcgcttgtcctcatggccttgatgatcacatggcactacgtccacgtgatgaagtactggtacgagctggaccacgtcgtgccagccaacgaagtgacaacgctgcttgagaagcatgaggtgcggcggatccccggggtgggcctcctttactcggacctggtccaaggcatcacccccgtgtttccacgtctggtgcagaggataccctccgtgcacgcggtcttcctgttcatgtccatcaagcacctgccgatcccacacgtggcccctgtggagcggttcctcttccggcaggtcggcccgagggagcaccggatgttccggtgtgtggcgaggtatgggtactgtgacaagctagaggagtcggggctgttcaaagggttcctcatggagagcctaaagacgttcatccaagatgaggctgcgtttaagacgaactctacagctggagataccaaggagctgaccgatcccaaggtgtctggccatgatttggctcgttgggtcgaaaaggaaaagcaaatgattgacaaggagatggagcgaggggtggtctaccttatgggggaagccaatgtcattgcaggaccagaatcatctgccgcaaagaagatagtggtagactatgtctacgcattcttgaggaagaacttgacggagggggagaaggtgctctccattccgaaagaccaactactcaaagtagggataacatacgagatatagggattatgctgggcctcaagttacaatcctatgtatcaactt

SEQ ID NO: 98151 - DNA, 91 bp, Zea Mays
agtagatcaagctatcgattgtgttttacctttagcatcgccccctacaatgggagcagatcaagctatccatcccatacatgtatgtgag

SEQ ID NO: 98152 - DNA, 288 bp, Zea Mays
atggtcatgatgaaagtggctaaggaaataggccgagcacccctcaacttgtccataccgaaatgcatccaccgtgaatggtgtgccaggaatcttcttgtagaaggggcacgcgaggggcttcttggccgccacccgctcctcctcggtgcttcctcgcctccgcttccttgccaacaaagaaccggaaagggaggaggagggggaggaatctccagccccgagaccctccctctgcggtctctcgatcccccatgcctggaagaggctcctctgcacaagcgatga

SEQ ID NO: 98153 - DNA, 472 bp, Zea Mays
gaattcagaacgcctaattagctcaatactctaggctggcattcctggttcctgaattggaccattttgcaagcaggtagcaaacgataacttgccactgcacaatgtatcaaaacaaagccaactcgcagaactctaattggaatcaatttcgactgaaattcaacaccgtcgcacatagaaacgcccaaattctctacaaatggagcccattaacgattgcaaattaaaaaaaaacaaggaggagaatcatattaccactggcagcagcggaggaaggggaacgccggcgagctgggcaggaaacaggggaccgctagccacggattgggaggacgcgcaaagcaaaaccttctgctttgcggggatggccagcgaaacggggacgggacgctttcacgcgccgcggcttgattgcttccgcacgatcggttgggttgcggctattttctttcgctgggcaggctgccgc

SEQ ID NO: 98154 - DNA, 750 bp, Zea Mays
atggcaagaagtcctccagttcaggagaagaggacgtggagcgagccgttcctggtggtcgcgcagacggggcacgcgtccacgccggcctcgtcgcacacgcggcacaggcacaggtgccggcacggcagcagcagcacgcacgctccgccgctgccacacgacttgcacgccagcttgggcatggacgcgccgttggcgtgcgcggccggcgcctcgccgaagcaacacgaccgcgcgtcctcggcctcggcctcgcagacgcagacggccgcaccgcggggccgcagctggtccagcgtggcgcggaggcccgcggcgacggcctcgtggctcctggccacgcccacccacgcctggcactcggcgcccgcttggcgggccttctcctcgagctccgcgttgcggtggagcgcgcgctccaggcctgtctccgacgcgcgcagccgccccgacgcagcgcggcccacggcggccagcagcgcgcggccgtgcctccgccgcgcctcctgcagcgccgcgcgcatcctctccgcctcgagtctaacgagcgcgtcgatctccatgccgtggtggtgcgtccacgacgacgggatgtcccgcgagacgacggtcgccgcgccaactgccaccactctcccgctagtggacgtcgccgcgccggagcccaccgcccggctccgcgcgtcgacgagcggtggcactggcagcaggcgctccgtgcccgccggaggcataccaacgcgctga

SEQ ID NO: 98155 - DNA, 621 bp, Zea Mays
cggcttgcacgcaccacctcaaatcaaaggacggcgaccacacatcgtcgtaccttcaaggtcaggtcaggcagccccttcaatttcgctagatctgatgagacctctttttttttttgtatcggtacttatattattattgctcctgcttgatccaaaaaccattcaacgctcatgtatagtcagtcatgtttgctcgtcgcttgacagaggggccaaaacaggtagcagtagtgtgccccagtggcccaggctctacactctacagtgttagatctaggtgcgtgccccatacggccatagtgtgcatgccatcacacacgaataataaatgcaggcaataaatcagctcccaaagggtaaagaatgaaaaaaaatataaactggcaccttcataacaagtggataatttttttaagtgttgcctattttcatagtaggtaaaaacaaggggtgagctgttttcaattttgtaccacaacaaaaacagcctttggaacaaagcagttgtggcatttcagccctttggttgacttttacaaaatcaaaagcaggttccaaagcccaaccaaaaggaccttaaaattatcaaatcaacaaaagctacttgccaagaacata

SEQ ID NO: 98156 - DNA, 1070 bp, Zea Mays
atggcagtgggtacggttatgggtaacccgtcgggtacagatatggtggattttcgtatccgcgggtacggatatggatactatatagtatccagggttattaatttcgcggattgtgaatttgtgatgtcaactcccaacgaaaatagcaacactcaatttcaacctccctcatctcaagcatctgttgagggtggaagtgggcttccagagaatgtgattaatgttgaacaagatggtgatgaggatgatgatgaagtagaagaaaatgggagaaaaagaaaattgaaatctgtagtgtggagtgaattcaagagggtaaatgttggagatatttggaaggcaaagtgtaattattgttcaaagaagctttcgggtgtaacaaagaatggtacatctcatttgaaagcccatctagagacatacatctatcgaaagaggaatcctacagataaggtacaaagctctttgtggttcacatctagtagcgaacaaggacaagtgtcggtgaaggagtatgttttcgaccaagatgtggcgagaaaggcccgtcctgaaatggttgttttgcatgaatatccattgtccattgtggatcatgttggttttagaagtagagcaatgctagagatagaaaatgtgaggaaattatttgatgaactgattaaagagtacaacaacaaatgcattaaacctgttactagtggtggacaaaatgcatcatcatcttgtgtttctaatgcttccacatatacggatgagttgttctctgccatggaggaagagctcgatgacatgtgcagtgatgaagaaaaggctaagtctgagcttgatctttatgtggatgaaggtcgtattcccaagtcaaaggaatttgatatattaggctattggaaaatttatgggatacgtttactctcatttgttgtactctcacttattgtaggaaaagaagattatatgggtttgtggacttgtcttgaagatatacaagaagaacttgtggaactctcctttggattctccacaatgccaaatgaagaaatttgaaggaaaattcacaggatgtc

SEQ ID NO: 98157 - DNA, 426 bp, Zea Mays
atgctggtggtcttcgaggcaagcaaatcggtgttgttgtcgacctcaaaaaccaccaccagcagatccctgtcccgcacatctgctcgccgcccagcgaacttggtgccgctcgtcgacgcgtccaactccaccgtggccgatgcactcacggcggagcacctgtttcgtcgtgctcggcgcgcacacctctggttccaccactcggattcggggggtaccggcgttggcgaggcacgcatggatggaggcggtctcatccccggcggcggtcaccatctatccagacacaaaaatggcgttggcgcggacatcctcgcggcgagcaagggtgttgtgtgtgcacgccagggggaggcatcgcgtggtgtctacgccagtgggggagggtgcgggggcgggatgagcggggtggggagcgggtga

SEQ ID NO: 98158 - DNA, 87 bp, Zea Mays
ggccgaccgctccgcggggcaggaggtagtactggtgttccttggcgcccggggcgccgtgggttctttttcgcggcccccccttcc

SEQ ID NO: 98159 - DNA, 428 bp, Zea Mays
gtttctcagatgggtgacctcaaggaggttttccgctccctccaagaactcttccctgaggttgatcattgtatgctgaaggctatcgcaattgagcatcgtaaagatgttgattccgcggttgttactgttcttgatgaagtcatgccgttcatgacgggttcagctggagtggatggttatgttgggaatttgtcatctatggatggttctgttgggaatttgtttgctaatcacagcacacatgaagtcgcggatgccgccgagccggcgcaggtcgtggacgagatcatgcggatcgttgaggaggtcaagacccccggtgacatgtccaaggtggtcgacccggcgctgctggccgagatggcagagctggagagcgacgaggaagaggcagacaccgatgacacctactgatcgctcctgca

SEQ ID NO: 98160 - DNA, 207 bp, Zea Mays
atggatgttgacgcagtcatcgttctctgtgcatttccaagggtgataacaacgacagtcacatcatcgtggtactttctcctactcccaacaggtatcctcatcaattcttcggctgttaaagctgcttccttggctgctttgagtataagttgctcgataagatattttgcaggatcccccattggattatcgtgcataaattga

SEQ ID NO: 98161 - DNA, 1875 bp, Zea Mays
aaaactgtcacgaggaagccagatgcggcggacaagggatcgagtccggagcacgcccgcccggatataaatttatatcgcacacatcccccgttcgccaatctcgcggcggccctgcaaagctgcgatcaggaggtgcagaacagcggtgaagggtggaaaccgagaacactaggcagaggcactagccgagccgagccgcgccaccacgaccacgagtcgaccggcgagtggttggcgcaagttgtcaggggcgttgccggagccgtgcggcggccggcggccgggagcggggccgatggggcgctacgagctcgtccgcagcgacgacgcgcctgccgtcgccgcggatctggaggccggcaccgccgcgccgtgcgacggctaccccaagcgccgcgtgttcacgccctctccgtctccgtctccggcgccggcgtcgacccggtaccggcagcgcctcgtctcgctcgacgtgttccgcgggatcaccgtcctgctgatgatcatcgtggatgacgccggggcattcattccggcgatgaaccactccccctgggatggcgtaacggtggccgactttgtcatgcctttcttcctcttcatcgtcggagtcgccctggcgctcgcgtacaagagagttccggacaagttggacgcttcgagaaaggcattgctccgtgcgctgaagctgttttgtcttggtcttgttctacaaggtggattctttcatggtgttcgcagtctaagtttcggggttgatcttcaagaaatacggctgatgggtgtactgcagagaattgcaatagcttatttgctgaccgccctctgtgagatttggatcagaggagatgaagatgtagactatggatacgatttgctcaagcgataccgctaccaactgttcgtaggtgcagtcgtggcaatcacatacatgtccctgttgtacggtacctatgttcctgactgggagtaccagacatcagctcctggttccacagagaagcatctctttgtgaaatgtggagtaagaggtgacaccagcccaggctgcaatgcggttggcatgatcgaccgtaaaatcctgggcatccagcatctctacggccgacctgtttatgcacgatccaagcaatgcagcatcgactcgccacaaaatgggccccttccttctgatgcaccctcttggtgccaggccccttttgaccctgaagggcttcttagttccgtgatggccatcgtcacatgcttgattggactccaatacggacacgtcatagtgcattttcagaaacacagggagaggatgatgaactggctaatcccttccttcagcatgctggtcctagccttcgccatggacttctttggactacacatgaacaagccactgtacaccctgagctacaccttaggcaccgccggcgcggcggggctcctcttctccggaatctacacgctggtcgacatctacgggtaccggcggccgaccgtcgccatggaatggatggggatgcacgcgctgatgatatacgtcctgatcgcttgcaacgtcctgcccatattcatccacggcttctactggaaggagcccaagaacaacctgctgaagttcatcgggattggagcgtgaggcgatggactgacgacggtacacgagtacggatattgtttaggagtctatttggacagagatagagaagcgcgtgcgttcagcaggccaagttttgctacacggccagtgctgcagctgcagcgcatcattgttgctgcacagagcgcctttctctgtgagctcttgtatatatgataaaaaagagtgttgcatataatgacgacacgatttgaaagaaaaaatatatacataatacagta

SEQ ID NO: 98162 - DNA, 1859 bp, Zea Mays
aaaactgtcacgaggaagccagatgcggcggacaagggatcgagtccggagcacgcccgcccggatataaatttatatcgcacacatcccccgttcgccaatctcgcggcggccctgcaaagctgcgatcaggaggtgcagaacagcggtgaagggtggaaaccgagaacactaggcagaggcactagccgagccgagccgcgccaccacgaccacgagtcgaccggcgagtggttggcgcaagttgtcaggtgagggggggcaccgcaccttccgcgccgcatcttgtcacgcacttgttgtagctgtattgtatgtattgcctgccgcccctggcttgtgctcatgggcgctgctgctgcggccaatgaaggggcgttgccggagccgtgcggcggccggcggccgggagcggggccgatggggcgctacgagctcgtccgcagcgacgacgcgcctgccgtcgccgcggatctggaggccggcaccgccgcgccgtgcgacggctaccccaagcgccgcgtgttcacgccctctccgtctccgtctccggcgccggcgtcgacccggtaccggcagcgcctcgtctcgctcgacgtgttccgcgggatcaccgtcctgagagttccggacaagttggacgcttcgagaaaggcattgctccgtgcgctgaagctgttttgtcttggtcttgttctacaaggtggattctttcatggtgttcgcagtctaagtttcggggttgatcttcaagaaatacggctgatgggtgtactgcagagaattgcaatagcttatttgctgaccgccctctgtgagatttggatcagaggagatgaagatgtagactatggatacgatttgctcaagcgataccgctaccaactgttcgtaggtgcagtcgtggcaatcacatacatgtccctgttgtacggtacctatgttcctgactgggagtaccagacatcagctcctggttccacagagaagcatctctttgtgaaatgtggagtaagaggtgacaccagcccaggctgcaatgcggttggcatgatcgaccgtaaaatcctgggcatccagcatctctacggccgacctgtttatgcacgatccaagcaatgcagcatcgactcgccacaaaatgggccccttccttctgatgcaccctcttggtgccaggccccttttgaccctgaagggcttcttagttccgtgatggccatcgtcacatgcttgattggactccaatacggacacgtcatagtgcattttcagaaacacagggagaggatgatgaactggctaatcccttccttcagcatgctggtcctagccttcgccatggacttctttggactacacatgaacaagccactgtacaccctgagctacaccttaggcaccgccggcgcggcggggctcctcttctccggaatctacacgctggtcgacatctacgggtaccggcggccgaccgtcgccatggaatggatggggatgcacgcgctgatgatatacgtcctgatcgcttgcaacgtcctgcccatattcatccacggcttctactggaaggagcccaagaacaacctgctgaagttcatcgggattggagcgtgaggcgatggactgacgacggtacacgagtacggatattgtttaggagtctatttggacagagatagagaagcgcgtgcgttcagcaggccaagttttgctacacggccagtgctgcagctgcagcgcatcattgttgctgcacagagcgcctttctctgtgagctcttgtatatatgataaaaaagagtgttgcatataatgacgacacgatttgaaagaaaaaatatatacataatacagta

SEQ ID NO: 98163 - DNA, 2325 bp, Zea Mays
aaaactgtcacgaggaagccagatgcggcggacaagggatcgagtccggagcacgcccgcccggatataaatttatatcgcacacatcccccgttcgccaatctcgcggcggccctgcaaagctgcgatcaggaggtgcagaacagcggtgaagggtggaaaccgagaacactaggcagaggcactagccgagccgagccgcgccaccacgaccacgagtcgaccggcgagtggttggcgcaagttgtcaggtgagggggggcaccgcaccttccgcgccgcatcttgtcacgcacttgttgtagctgtattgtatgtattgcctgccgcccctggcttgtgctcatgggcgctgctgctgcggccaatgaaggggcgttgccggagccgtgcggcggccggcggccgggagcggggccgatggggcgctacgagctcgtccgcagcgacgacgcgcctgccgtcgccgcggatctggaggccggcaccgccgcgccgtgcgacggctaccccaagcgccgcgtgttcacgccctctccgtctccgtctccggcgccggcgtcgacccggtaccggcagcgcctcgtctcgctcgacgtgttccgcgggatcaccgtcctgctgatgatcatcgtggatgacgccggggcattcattccggcgatgaaccactccccctgggatggcgtaacggtggccgactttgtcatgcctttcttcctcttcatcgtcggagtcgccctggcgctcgcgtacaagagagttccggacaagttggacgcttcgagaaaggcattgctccgtgcgctgaagctgttttgtcttggtcttgttctacaaggtggattctttcatggtgttcgcagtctaagtttcggggttgatcttcaagaaatacggctgatgggtgtactgcagagaattgcaatagcttatttgctgaccgccctctgtgagatttggatcagaggagatgaagatgtagactatggatacgatttgctcaagcgataccgctaccaactgttcgtaggtgcagtcgtggcaatcacatacatgtccctgttgtacggtacctatgttcctgactgggagtaccagacatcagctcctggttccacagagaagcatctctttgtgaaatgtggagtaagaggtgacaccagcccaggctgcaatgcggttggcatgatcgaccgtaaaatcctgggcatccagcatctctacggccgacctgtttatgcacgatccaagcaatgcagcatcgactcgccacaaaatgggccccttccttctgatgcaccctcttggtgccaggccccttttgaccctgaagggcttcttagttccgtgatggccatcgtcacatgcttgattggactccaatacggacacgtcatagtgcattttcagaaacacagggagaggatgatgaactggctaatcccttccttcagcatgctggtcctagccttcgccatggacttctttggactacacatgaacaagccactgtacaccctgagctacaccttaggcaccgccggcgcggcggggctcctcttctccggaatctacacgctggtcgacatctacgggtaccggcggccgaccgtcgccatggaatggatggggatgcacgcgctgatgatatacgtcctgatcgcttgcaacgtcctgcccatattcatccacggcttctactggaaggagcccaagaacaacctgctgaagttcatcgggattggagcgtgaggcgatggactgacgacggtacacgagtacggatattgtttaggagtctatttggacagagatagagaagcgcgtgcgttcagcaggccaagttttgctacacggccagtgctgcagctgcagcgcatcattgttgctgcacagagcgcctttctctgtgagctcttgtatatatgataaaaaagagtgttgcatataatgacgacacgatttgaaagaaaaaatatatacataatacagtagtatagagatcttacgtgaatgacggtggaaattgtcaccgaactagcaaaattgttccgcgcggggccgcatggggacgaggcgcgcaacaccgttgcacaacctgaatttaatctgaccagatgacattttaacaggtttagtattacaaaacagttactagctatttaaatcctttgctctttataatatatatctatatctgtcattttctgttctgccttttttcgttttctgttttgccctcatcccttgtctggcagtaaaaaatgaaatctgtaagaattatgagtcgaactcaagacctactgctagattagagacaac

SEQ ID NO: 98164 - DNA, 999 bp, Zea Mays
gcccatcgacagcagcccctccccaacgattgtttggtggttgagggctataaatacccctcaaccacctccactccaactatccaagcattcagcactcctcattcaatacaagagcaaagtacaacactccaagacacaaatcaaagccaccgatttaatcaaagtccctaattcaattctagtgctttaggacttgatttcagtgcaggaccagtacctgatgcgatcaagagaaaactagttgtcgagaccagtgtgcctccacaacaatcaagtttcagctgtgtaactggatagaagcagccccaaaactggtacccgacaaagaaaaaggtgaaagttccacatcttccgtcgtagattctgcagtgtcccagaccaaacgtggtgccatccttctactacaaaatctacaaggtcgactgtgtcaccgagttcaatttcagcgctcacgttggaggcaaaaagcacatggccaaaaagctagagattctaggtaagaccgtaagaggaactctgggggcctgctagccgatgcgcaggcaacaggagcggtggacagagtggacttgcagtttctaggagcaaaagcagcgaacaaaatgtggctggcagcgttgctgctggaccgaactgtgacatgtcgtctgagagcggaactaatggagcagaaggaagtgggtgcactgtccagctatgagcagcttgggtttcactccagtctagtattccaataaaagttcgccttgcacattttcttctcaagggcacagttaacatatttctgtgtcagatggctaggcctctagggagatttcatcagataataaattgaaacgtatgcagtgtcctatgtgaaagcagtacattgtttggacatatatctgacggcagatgcatcatgtttcctttcgcttccttctcgaaaatgtacagtagcaagctttgttctgggagaaggtggaagttcaggacgatgttctgattatgtactac

SEQ ID NO: 98165 - DNA, 82 bp, Zea Mays
tacaactcatttataataatctcaaggtgattcaatgtgtatcaaagtcagttaatacaaacaaacattgctgtccagactt

SEQ ID NO: 98166 - DNA, 1748 bp, Zea Mays
ccccgtcccggacctcccgagtcccgaatccatgaacctgcgcccacgcatccccaccgcgccaccaaccccttgcactccaaacgcaggcgccccctatatatcggtcgccacctgcccttggcctcctcagcttctcgctctgaagcttcaaactaccccagttatccggcgcggttccttgcttgtgtcgagcagagatcacaaaaccaagaaacagctgaggcgccgcgcgcggaggtagctgcctgaactaatcggtgtcgcaatggctgcaacgagtatgatcagggcgccgattgggccgaacccgaggctcgcgtgctacgccccggcgaggggcggcggcgtggtcaggtgctcgttgcagggcgcggtcgtcggcggccgggcggagtggcagagcagctgcgccatgctgtccagcaaggtggctgcgctcgggacgcactccatcaacggccacgtcgcgccggcgccggcgccggcgccagcggtgctggatttggtccccgtgagtagtatgaatggcgccgtggctaagaacctgccgcagccgcttcgcatcgcggacctgtcccctgcgccgatgcacgggtcggagctacgcgtggcttaccagggcgtgcccggcgcgtacagcgagaaggcggccgggaaggcgtacccgggctgcgacgccatcccctgcgaccagttcgaggtggcgttccaggccgtggagctgtggattgccgaccgcgccgtgctccccgtggagaactcgctgggcggcagcatccaccgcaactacgacctgctgctccggcaccggctccacatcgtcggggaggtgcagctccccgtgcaccactgcctgctggcgctgcccggggtgcgcaaggagtgcctgacccgcgtgatcagccacccgcaggcgctggcgcagtgcgagcacacgctgacaggcatgggcctgaacgtggtccgcgaggccttcgacgacacggccggcgccgccgagcacgtggccgccaacggcctccgcgacacggccgccatcgcctcctcccgcgccgccgagctgtacgggatggaggtgctggcggacggcatccaggacgactccggcaacgtgacccgcttcgtgacgctggcccgggagcccatcgtgccgcgcacggaccgccccttcaagaccagcatcgtgttcgcgcacgacagggagggcacctccgtgctcttcaaggtgctctccgccttcgccttccgcggcatctcgctgaccaagatcgagagcaggccgcaccgccgcaggcccatccgcctcgtcgacgacggcaacatcggcaccgccaagcacttcgagtacatgttctacgtcgacttccaggcgtccctcgccgagccccgcgcgcagaacgcgctggccgaggtccaggagtacacgtccttcctccgggtgctcgggagctaccccatggacatgacgcccatgaccgccggctcttcctccaccgtttcctcgtccgatccctcgtcgtcatgaattgccctcctggatgctggagctccgaggagaagtcgccgagtagagacgttgggtttctgcttatgtcgtcctactcgcccgcccctcgctgcggctggagtaattaattttgagtttactttaatctttcgtggtaatacgtgtaattgttccgcggtgaatataatgtgagatatatagtaccagtatggcattcatgttcgtctgaacactttct

SEQ ID NO: 98167 - DNA, 1319 bp, Zea Mays
cgcagtgcagcgggtccttccgcggtgaagtcgaccgggccaccgccgaggccttcctcctcacgaggctcccagtgatcctcctccgctacctcggcataatgccagtgctgccgttgctgtccgcaaagccatcccctccctgcacgccccctcggcccggtggtgagtggtaggcggccgaagaattccagggtgggtggggagcgcccggaccggagacaaggaagatcgaggcatgaaggacctggtgtcgtgcttcagcgagcacgccgtgcggatctccgacgtggcctgctccggctccggtcccgccaatgcggcggcgggcgccccggaggccggaggaggagggcgggcgccagcggtgagcgcggtgaccaccgcgtaccggtcgcggctgtcggcgtccgggaaggagctgctcatcgacgtgacttggtcatggtctcgggcgcccgacgggcccgcgctctccgtcgccgtccacgaggcggacgccgtctcgcgccaccgcgccgccagcggcgccgcggcgccgcggcacctgcacaagaagaaggggagcgggacgttcacggcgggcagctgcgtggtgggcgtgttctgggactacgccgcggcgcggtacggcgctggctcggggcccgagccgacgtccgggttctacgtcgccgtggtcgccgacgccgagttcgttctcctgctgggcgacctcagccgcgggtacgtggaccgcctgcacgggggcatcccgatcgccgggtcccggatggcgcggcgccgggagcggtttgtcgggtgcgggcgctggtccacgagagcccggttcttggagtccggcgaggagcacgagatcggcgtcgcgctgctggacggcgacgcggaggcgtgggtcaccgtggacggccgcaaggtcgtgcagctccggcggctgcggtggaacttccgcggctgccacaccatcttcctcgacggcggagcgccagtcgacgtgacgtgggacctgcacggctggctcttccacgcgggcgccgagtcgccccaaccgtcctccacttccccctgtgccgtgttcacgttccaggcgcgcggcgcgtcggagacaaagctgtggacggacgacgattgcttcgacgacggagaggaggcggacaagctgccggtgacgccgagcggtcggcaacagaaggcgggaggcggtggggcgtcggggtcggggcaggggttctgcctgctgatccaaggctccaggagcttttccatgagcacttaacctgtacatgccgttagagactttctatcgccattttttttca

SEQ ID NO: 98168 - DNA, 703 bp, Zea Mays
gcccatcctaaggcaaatttccgcgtggaaacgcgtccggccttcggacgtcgggcgactttccacttctcgagcacgccacgtctcctctcgcctctcgctcggagtcgctcgagcacgccgacgccccgcttccgctcgcctgagcacgctgccaccttcgctcacctagagtcgcttgacgttgtcgcctccgctcgcctgccgccgctcctctcgcctagaggctggagtcgcctgagcacgtcgccttctctggcctagagtctccgagcatgtcgtcgcctcggtcactccgcctcctcagaggttgagtcgttcgtggagaaagaggggcgtgggcgggaaaatgaaaaggttctgtcgggagcgtgcgggagcgacgaagacgtgcgggagagacgaagacggcctatgtgggacggttggctcggacatggcgcgtaggttcggcctgggtgcattctctacattgaatgcactcaggtgtaatatatatattaatcgtcaggatgtactgaatcgaggcctgcagttgccaacaaataataatgtgtttcctattttttgtctaggatcttaagatgattgtatatttgtatggatcttgtaaacaagattagggaatggcttgttaaccacagaggactcagtgtatggctgtaacccactcggagctttaagtcagagcaagcttcattct

SEQ ID NO: 98169 - DNA, 651 bp, Zea Mays
gaaggatgacagtcgatataagtttagcaccatacgctgctggcggaggtgttaccgaagagatgagcccctctagagcagaggttgtgcatgaaggcggacgcagcgcgcggcagctccttgcccaggtggaaccccaggcgaccggcgtcgtcctccattttctgtgcaagcaccacggctgcagcagcacgttggagcagtgcccacacaagaagcagcacatatgaaccaagcgcaaggtccattcgcaccaccgttgccacctcttctgccaccgcttctgcaacagtttggtactttcggtcacgacgctggaggattgatatggaagtaggacctttcgggatgatgcctagctccatgcctccgcctccgataagcacgaggacggggccgcgtccttcggagggggattgggagcttcagaagctgcgaactttgtgcagcgggtggggctttttcgcccgcgagaagatggatacagtacagtttgggttgtttttatatttgtcactaaaatctaaattcggatgagaatattaagatatattgtgtcagagaaaatacatactcctaactagcattaagaccctctcaagaatccttgacgaggtatagagatggcaatggagatccgattctcgattc

SEQ ID NO: 98170 - DNA, 1729 bp, Zea Mays
cacgccattcccattccttgacgccatcgaatgcacccgcccagcccaatgcgcagcgacccccattgtccgcaccaccgctctagcagctactacatgcctatatgggcaggcacatgcatggtcctccgacgatccatccgcatgctgaacgatcaacatctcaggttgcccgaacttgtccgctcataaagaagaatgcgcacgacgcgttgcatgctcatggtcgcccaagctctcgtcgtcgtctccgcgttgctggccgccgccgccgccgccaccgcggcagagtatgtccggcctccaccagggcggatcatcctcacagagcacaccgagcccgccgcccatcctcagcaggtccatgtatcggccgtcggggagaagcacgtgagggtgtcgtgggtcaccgacgacatgcgcgcgcagtccgtggtggactacggcaaggcctcccggaactacaccgcgtccgccaccggcgagcacacgtcataccgctacttcctctactcgtccggcaagatccaccacgtcagcatcggcccgctggagcccagcaccgtgtactactaccggtgcggcaaggcagggaaggagttcagcctcaggaccccgccggccgcgctgcctatcgagctcgccctcgtcggcgacctggggcagaccgagtggacggcgtcgacgctggcgcacgccagcaagacgggccacgacatgctgctggtgcccggcgacctgtcgtacgccgacacgcagcaggccctgtgggactcgttcgggcggttcgtgcagcggcacgcgagccggcggccgtggatggtcacgcagggcaaccacgaggtggaggcgccgcccctgccggtcccggccggctcgccgcccccgttcgccgcatacggcgcgcggtggcggatgccgcacgaggagagcgggtcaccgtccaacctctactactccttcggcgcggcggggggcgccgtgcatgtcgtcatgctgggctcctacgcccccttcaacgccagctcggaccagtaccggtggctggccagggacctcgctgccgtggaccgccgcgccacgccctggctcgtggtgctgctgcacgcgccctggtacaacacgaacgcggcgcatcagggcgagggcgaggccatgaggaaggccatggagcggctgctcttccaggcacgcgtcgacgttgtcttcgctggccacgttcatgcctacgaacgcttcgcaagggtctatgacaacgaggcgaacccgtgcggacccgtgtacatcaccataggcgacggcggcaacagagaaggccttgcattcaactttgacaagaaccacacgctggcgccattgtcgatgacgagggaggcgagcttcgggcacgggcggctgagggtggtcaacaccacctcggcgcactgggcgtggcaccgcaacgacgacgcggactccgtggttcgcgacgagctctggttggagagcctggccgccaaggcctcgtgccggcagcacgccgatcccgccgtcgtcgattgggacgatgagttgtagcggcccatctcttgtttcgcccaaaagccaaaacacgaaaatttgcggcgcgcgtttgcacatccgcgaacgcttccacgtcgtgtagtgcatgtctctcaaattatacttttgtcacactaatttatcgacccatgggctcttttgaaacaaaggaaaatttttctgcgtc

SEQ ID NO: 98171 - DNA, 318 bp, Zea Mays
atggacagactgaacgcgaagctgtacctgcagaactgcttcatcatgaaggagaacgagcggctgcgcaagaaggcgctgctgctcaaccaggagaaccaggccctgctcaccgagctcaagcagcggcgcatcgccaaaaccaaaacggcggcgccgcccaaccacagcgccaacgggaatgcggcggcggcagcaggccaccgcgcgccgatcccggacctcaatgccgccgctccgggcccgcgtgcagccggccacgagaaggcggcggcggcggcgtcgcccaacaagccgaagaaggcggtcgccaactga

SEQ ID NO: 98172 - DNA, 479 bp, Zea Mays
gtcaatccctgttttgttcccatgcttgaaattgatggtcttcattttgttggttgtgacaaaagtcaaaaccggatggaggtgtttaatttggagcagattgcgggttttgaatttcttttccaaatgttgtcttcacgcccaccgcggaggggtggtgaccgaagagatagtggcaaaggcgtcccttgtgggctctgctcctatctcgcggtatgaagcctttaaattatgagatgagataggagtctgtgttcttatcctagtataaggtctacaatggcacaatgcttgtaccatctgtttttgcggtaacttatttttatcatgcagtgcatgtgatttgaaactttgtgttagcctttattgctttctaccttatggcacctgtagtagggaactgatgatattcttgtggactctgaagctttgtttgctcagaatggtaattttgttgtattctatttcacaggataaaa

SEQ ID NO: 98173 - DNA, 1650 bp, Zea Mays
ccgcccccatgacaggatggtgttggcagaggcagagcccgccgcgtgggtccatcacgagcggaccagacgagggaagcgccgtccagagcacgccgcggcagccggcaggcaggtatggcgattggcgtgggcggtgggcctcgggtgccatgcgccgctacggttaaaagccgagagagccagctgccagcctccgcgcttcagcagcagcggcttccactgtagtcccaagccggcgtgaccattccaaatcttccgcacccatctctcgccgcctcgcctgcaccggagactggccctagtgcccgcgcgcctgcgaggtatcgaacacccaaagatggcaatggcaaccttcacatcatccccagttctctgcagcttcaggaccatcgaacagaagaaggcccctctgctgaacaacagcacaaaacggccgcttcacttgggcttcccaaggagcgtgccgacgtcgccgagcttgagagagaggctagacctgcgcgtcgccgctgtctacaaggtgaagctcctcggccccgaagggcaggagagcgtgctcgacgtgccagaggacagctacatcctggacgctgccgaggaggccggtctcgacctgccctactcctgccgcgccggcgcgtgctccacgtgcgccggcaagctcctggagggctccgtcgaccaggcagaccagtcgttcctcgacgaggcgcaggtcggtgccgggtacgcgctcacctgcgtcgcgtacccgacgtccgactgcgtcatccagacgcacagggaggaagacttgtactagaccgggctggtccccgtgcatggatcaaccttgcacttccattcagattcgatctttgagttattgacactgtccttggcacacgctgttgcggttgcagcttgctagaactaatcgtcgtccagataatttggcatgatgaccaagtgcaggttcttgtgatatgattcttccccgtgctttgttacatctggtctctggatatcaaccaagccccgtcttgaaatcaacctgtcagtttcaggctttcagcttctccctggaaagagacagtcaaacagatgggagctttcagggatgttgctgcggccaatgcagacggcaagcgtttacgtcgccgaaaggccggctgggccggcgggcgcaatgatttggatgctactagacaggaacgtgtcacatgatgaaaactgaaaatacgaaaaaggtcctgcgatcctgataaaacaaggagatgccgcgcagtttgctgttggagacatgaggactcgcaccaagcgatgaaacagaagttgatggagtggatgtatggaatgggaggcgatttgtagcgtagatgcgtaattgtgccaaatgcaagaaagagatatgttattattcaggtgttgtccacttgtacctttgccagattgcctagtcccatgctcgtttggacattggagtactagaacatgaggcgttcatacggacgccctatcaagagaacacaagtgatagtatctccatttgtcgggtaccatataattaggggtaattgtcgggtaccataattagggatactcagatcacaatctaaagtgtctagatgcttgagtaagagaatgtcataagcaaatacgcttcca

SEQ ID NO: 98174 - DNA, 2606 bp, Zea Mays
ttccagtccagcacagaaggccctgcccgccgcggcgccgcccactcgttaaaccaccaaaaccaaaacacttcgagacatgcagcttccctgagatctatcgtcacgtcgccagatctaaccaagccccaaatctgcgcgccggcaatggcggtgcgcgcgagcctcgcctgcttcccctccgacccagcgctccacgcggcttgcggcatgccgtggggcgtcgccatcaccccgttctctgccacagatgagcgcggcttcccgccggccaccggcaccgagggccacctcctcccgcgctgccagtcctgcttcgcctacttcaacttgctctgtccgctcgaccgctggtcctggaactgcgccatctgcggcgccgagaatgacctctccgccgacgcagctgcgcgctacgcccgcgacggtggccacgacccgcccgagatgcgctccgcgttcgtcgacctcctcctcccagtggaggagggcgaggcggcagcggcggcggctccgacgcccgtgtacgtggcggcgatcgacttgtcctcttcagaggagttcttggagctagtcaaaagtgctcttcaagctgctcttgaagctcttttgccaggatcactatttggacttttgacatttagcagcaaaataggattgtatgatgtccaaggtccaataccaatcgtgaagaatgtgtttatccctcctgattctgatggtgccttacaagtcgaccttgaagatatcatgcccctttgctcatttttggcttctattgatagctgcaaagaccgcattactgaagcacttgaaacaattaaaccaatgtcttcctgggaagtagcagcaaatgcgcacgatggacaggatcatgtattgcatcacatacgtggttttggtgtagcgttggatgttcttatcaactacctaagttcagaatatggaaatgcatttgagcttgctaggatatttgcgtttttatctggtccacccaattatggggctgggcagctggatataaatgaggaccaaaattctggtaaagcaaggggtgctgatcatatattgcttcaagagcagacaagtttctacagaaatctggctactagtgctgttcaagcaggtgtatgcgtggacctttttgcaattacaaatgaatacactgatcttacttctctgaaagttctgagtgttgagagtggtggatcactgtttctatattccagtacagatgaatcaacacttccacaagatatatacaagatgttgagtcgtccttatgcttttggatgtgtaatgcgattgagaacatcgtcgcagttcaagattgttgattcttatggccatttcttcccagacccccagtacatgcatgttcagcacataaattgttgcgactcttttgctacatacagttatgactttgagtttgaaaaggattcccaattttccaggaagtcaagccctcccattattcaaattgcatttaagtacactgtgcttgtgcacaatggtgatatatcagatcttccaaattctgggtgcagatttaaatacttgttagaaaggaggctaagagtgcggactatccagtacaacacaactgctaatatctgggacctttacgattttgttgatccagatgttgttttgacaatattggtacaccaggttattttggcttctttaagtgatgcactggaaacaaggctgtggctccaagattggttggtggttgtcatcgctcagtacaacaaagcatacaagaatgtcacatctggaggtggtactgagatttataatattgatgtcaatttctcacactgctcgcaactgcagcctttgtcacggtttgtgtttgctattctgttgagccccctgcttcaagtcagcagtgaaggcattcatccagattatgtgacatatttgcaatgcctcttgagtgcactggagccagcttcgcttcggcaggctatttggcctacgttgatttcatactcctcccccgatgtagaagcagaagtacatcaatcactaagccggactgtgttcaccagtctactgagatcaacagtcgatagactaaaacaagaaaggaatataacacccaaactggttttcattcacggagcacatgatgacactacagaatttgagaaataccttgttgaggatcagaccttggatgggtccccgttatctagctccacaggtttcagctcattccttgatgaggttagaagtaaagtggctgagcatggcatttgaggaccagtgtcacctgtctcccgattgctggactgtgatgttaaacgggtgatgactgatgacccatgcaacccagaaatactgtcatgaatagaaagagtaagtgctttgctggtttaccggcaaacgtttttgtatgtgtgccgtgtgtttgatggatgctgttcgccatttttttaccgacagctagatgaattttaaagctttcctttacaagaccgcgctatatgtttttgtaatatccatgcgctactatgtttttttgggtacattgcctgttgctaaactatgcatttgctatatacattgctgaaaaacccgttcattatatttct

SEQ ID NO: 98175 - DNA, 1861 bp, Zea Mays
agatagggcactcttgcttggcgtagcattagggacgacgacgatgggcatggcggcgctgttgcttgtgtgggctctgctgcactgcacaggcacggcggtgacgatggtgcgggcgtcccacgccgtgtatccggagctccagtcactggaggcggagaaggttgatgagacgtcgcgcaccgggtaccatttccagcctcctaagcactggatcaacgatccaaatggaccaatgtactacaaggggctgtaccacctgttctaccagtacaaccccaagggcgcggtgtggggcaacatcgtgtgggcgcactcggtgtcgaccgacctgatcgactggacggcgctggccccggggatctacccgtcgaggcagttcgacgtgaagggctgctggtcgggctccgcgacggtgctgccgagcggcgtgccggtggtgatgtacacgggcatcgacccggacgagcaccaggtgcagaacgtggcgtaccccaagaacctgtcggacccgttcctccgcgagtgggtgaagcccgactacaaccccatcatcgcccccgacagcggcgtgaacgccagcgccttccgcgacccgaccaccgcctggtacgggcccgaccggcactggcgcctgctggtgggcagcaaggtgggcggcaagggcctggccgtgctgtaccggagccgggacttcaggcgctgggtcaaggcgcaccacccgctccactccggcctcacggggatgtgggagtgcccggacttcttccccgtcgcggtgcacggcggcggccgccactaccgccgcggcgtcgacaccgccgagctgcacgacagggccctggccgaggaggtcaagtacgtgctcaaggtcagcctggacctcacgcgctacgagtactacacggtgggcacctacgaccacgccacggaccgctacacccccgacgccggcttccgcgacaacgactacggcctgcgctacgactacggagacttctacgcgtccaagtccttctacgatccggccaagcgccgccgcgtgctgtggggctgggccaacgagtcggacaccgttcctgatgaccgcaggaagggctgggccgggattcaggcgataccgaggaagctgtggctgtcgccgcgcgggaagcagctgatccagtggccggtggaggaggtcaaggctctgcgcgccaagcacgtgaacgtcagtgacaaggtcgtcaagagcgggcagtacttcgaggtcaccggcttcaagtccgtgcagtccgacgtggaggtggagttcgcgatcggcgacctaagcaaggcggagcggttcaaccccaggtggctgaccgacccgcaggcgctgtgcaagaagcggggcgcccgggagacgggcgaggtggggccgttcgggctgtgggtgctggccgctggcgacctcacggagaggacggccgtcttcttcagggtgttccgggccaacagcaacagcagcagcagcaggctcgtcgtcctcatgtgcaacgaccctactaactccaccttcgaggcgcaggtctacaggcccaccttcgccagcttcgtcaacgtcgacatcgccagaaccaagacgatcgcgctgaggacactgatcgaccactccgtggtggagagcttcggcgcgggcggcaggacgtgcatcctgacgagggtgtaccccaagaaggccctgggcgacaacgcgcacctcttcgtcttcaaccacggcgaggtggacgtcaaggtcaccaggctggacgcctgggagatgaggaccccgaagatgaacgcgccggcgcagtagctagtggtggtatagctcgatctagggaaatgatctagttttgtt

SEQ ID NO: 98176 - DNA, 127 bp, Zea Mays
attatatattactaatacataacatgtgcatagaaaatagtggattcgttcgagagaccaaatcgttaatctcaactgccttccaacaccatctatccccaaaaaatcttaaagcgtccaaaaaata

SEQ ID NO: 98177 - DNA, 2593 bp, Zea Mays
cggccctactgcatgacgcctagctagacctcaaagcatcacacacacaccatcgtcctctcctttgccagcgccgccgaacccgccaccagccttctcccatcctcgaagcacggaaggctcccagaaggagctctcacctcgcagccatctctggcacgtccgtccttcttctccctcggtccctccccttctccacagctatcggattggcgttggagtggagatcgacccgggctcggaattcccttcgttggtaaggaaccctaatttggtcagatgggatttccaacttcgacaaagcccgcgaggtcgatcgatctcagttgacgcgagggattggaaaactaagttgcgggtgtagttaattttctaggaagattggggtttcagctcaaactcccatgctcgacgctgaggacgaccctggcgggagatgacgaggatcttcgtgcagcgcgggaccgccggctcctcgtccagctccggccgctcggacacgcagccagtgcagccggcagcagctgcccgggaggaggagttgccgctgcaacctcaaccacagctgccggagctattggccatagatgatacaactgataatttaaatgagggcagcgagaatatcagcaataagcctttgaggacggatgacaccatttcagagagctcaagctccgcagaggagagggctgccagggagaagcctcttaaggatgactctaatgtaatcaaccccactttcttagtagaggaacctgtagggatccagatccctgatcagattgagcatgaaaattctgtgctgtcagtcactggttcatcacagatggcaggtgcagcatcgcacccaccaccaccgccagctccacctccaaaaccattgttggggaataatggcttgcggagaatggggcctggaagttcgaatagtgtgcggattggatcttcaagaaggccagtagcttggccactagtggcagcccggacatctgcttcaggttctcggccttcttcacctaggtcacttgttgatggggaaggttacaacagtgctgatgaacagggcccctgttatgccttgagttatgatgattcggaaagggagcgtatgtttgaccatgacctaaggcgagtgaaagggttggaaatcagaaagatggccgaagatgggaactgtctattcagagctgttgctgatcaagtttatggagacgcagaagcttatgacatggctaggcagatgtgtgttgattatatggaaagggaacgggatcatttctctcagttcataactgaaattgaaagttttacattatactgtaagaggaaaaggagagataaggtttatggcaacaatgttgagatccaggcatttgcagagatgtacaatcgtcccattcacatatattcctacagtacagagcccattaatatttttcaaggaagctataacacagacgttcctccaattagattaagttaccatcatggtaatcattacaattcagtggttgatccccgacggcagacagttggggcaggacttggatttagctcccttagagggacaaataatgttgacagggaccaggtgaaggctgcaataaaagctcagcaagaccagcaaattgagaatgcacttttagcagaagggcgattctactctgatctggagttaacagagagggaaatagaacggatggtgatggagtcctctcgttcagaatatctcgccaaggagaaaaagcttaacattcgggagtcatcgacatcaagggcagagccatcttcatccgccgcaattagtggttcctcccgttcagttgctggagctgatagaggcaaagaggactactttgtgcttccagatactgcactgactcgcagcatgcagttgctcctcgcaatgggcttcagctacatccaggtcatggaggcctacagcatattcggcgaggacgtggactcgatggtctgctacctgttggagacaggaggcaccggagcctcagcgggcggtagcaatcgccggaaaggaaaggctgctgagtgatctgcacaccttcattgctgtggatgtaatcgttgatcgaaatcgttgggcatgaggaagcataccagataatgacagccttgtgagttgatatgtcgatatacctgctaccttttgggtgatgaataaatggtactcacacttgagacttctcgatgccgtttggttgcttaagttaaataattaatggttggtggtggctgggattcagggaaaattaatgttaatcattggtaattttttggtgtatgtttatttaaacttttaaaaaatactttccaaaatgtgagatctgcattgttttgagaactgagggagtagatgttttttttcatttaggtgttgtttggttcacaaaatgtaatgtaaatgtcaacgttaatgattcgcacttaagtacaaaatgtaatgtaaatgtcaacgttaatgattcgcacttaagtaccagcagtaacaagtttaaataagctcatatcaatttttagcatgatatttgattacggttgttagttacaatcatgttacaaatatgtgaac

SEQ ID NO: 98178 - DNA, 2051 bp, Zea Mays
atcgtcctctcctttgccagcgccgccgaacccgccaccagccttctcccatcctcgaagcacggaaggctcccagaaggagctctcacctcgcagccatctctggcacgtccgtccttcttctccctcggtccctccccttctccacagctatcggattggcgttggagtggagatcgacccgggctcggaattcccttcgttgattggggtttcagctcaaactcccatgctcgacgctgaggacgaccctggcgggagatgacgaggatcttcgtgcagcgcgggaccgccggctcctcgtccagctccggccgctcggacacgcagccagtgcagccggcagcagctgcccgggaggaggagttgccgctgcaacctcaaccacagctgccggagctattggccatagatgatacaactgataatttaaatgagggcagcgagaatatcagcaataagcctttgaggacggatgacaccatttcagagagctcaagctccgcagaggagagggctgccagggagaagcctcttaaggatgactctaatgtaatcaaccccactttcttagtagaggaacctgtagggatccagatccctgatcagattgagcatgaaaattctgtgctgtcagtcactggttcatcacagatggcaggtgcagcatcgcacccaccaccaccgccagctccacctccaaaaccattgttggggaataatggcttgcggagaatggggcctggaagttcgaatagtgtgcggattggatcttcaagaaggccagtagcttggccactagtggcagcccggacatctgcttcaggttctcggccttcttcacctaggtcacttgttgatggggaaggttacaacagtgctgatgaacagggcccctgttatgccttgagttatgatgattcggaaagggagcgtatgtttgaccatgacctaaggcgagtgaaagggttggaaatcagaaagatggccgaagatgggaactgtctattcagagctgttgctgatcaagtttatggagacgcagaagcttatgacatggctaggcagatgtgtgttgattatatggaaagggaacgggatcatttctctcagttcataactgaaattgaaagttttacattatactgtaagaggaaaaggagagataaggtttatggcaacaatgttgagatccaggcatttgcagagatgtacaatcgtcccattcacatatattcctacagtacagagcccattaatatttttcaaggaagctataacacagacgttcctccaattagattaagttaccatcatggtaatcattacaattcagtggttgatccccgacggcagacagttggggcaggacttggatttagctcccttagagggacaaataatgttgacagggaccaggtgaaggctgcaataaaagctcagcaagaccagcaaattgagaatgcacttttagcagaagggcgattctactctgatctggagttaacagagagggaaatagaacggatggtgatggagtcctctcgttcagaatatctcgccaaggagaaaaagcttaacattcgggagtcatcgacatcaagggcagagccatcttcatccgccgcaattagtggttcctcccgttcagttgctggagctgatagaggcaaagaggactactttgtgcttccagatactgcactgactcgcagcatgcagttgctcctcgcaatgggcttcagctacatccaggtcatggaggcctacagcatattcggcgaggacgtggactcgatggtctgctacctgttggagacaggaggcaccggagcctcagcgggcggtagcaatcgccggaaaggaaaggctgctgagtgatctgcacaccttcattgctgtggatgtaatcgttgatcgaaatcgttgggcatgaggaagcataccagataatgacagccttgtgagttgatatgtcgatatacctgctaccttttgggtgatgaataaatggtactcacacttgagacttctcgatgccgtttggttgc

SEQ ID NO: 98179 - DNA, 2434 bp, Zea Mays
atcgtcctctcctttgccagcgccgccgaacccgccaccagccttctcccatcctcgaagcacggaaggctcccagaaggagctctcacctcgcagccatctctggcacgtccgtccttcttctccctcggtccctccccttctccacagctatcggattggcgttggagtggagatcgacccgggctcggaattcccttcgttgttaattttctaggaagattggggtttcagctcaaactcccatgctcgacgctgaggacgaccctggcgggagatgacgaggatcttcgtgcagcgcgggaccgccggctcctcgtccagctccggccgctcggacacgcagccagtgcagccggcagcagctgcccgggaggaggagttgccgctgcaacctcaaccacagctgccggagctattggccatagatgatacaactgataatttaaatgagggcagcgagaatatcagcaataagcctttgaggacggatgacaccatttcagagagctcaagctccgcagaggagagggctgccagggagaagcctcttaaggatgactctaatgtaatcaaccccactttcttagtagaggaacctgtagggatccagatccctgatcagattgagcatgaaaattctgtgctgtcagtcactggttcatcacagatggcaggtgcagcatcgcacccaccaccaccgccagctccacctccaaaaccattgttggggaataatggcttgcggagaatggggcctggaagttcgaatagtgtgcggattggatcttcaagaaggccagtagcttggccactagtggcagcccggacatctgcttcaggttctcggccttcttcacctaggtcacttgttgatggggaaggttacaacagtgctgatgaacagggcccctgttatgccttgagttatgatgattcggaaagggagcgtatgtttgaccatgacctaaggcgagtgaaagggttggaaatcagaaagatggccgaagatgggaactgtctattcagagctgttgctgatcaagtttatggagacgcagaagcttatgacatggctaggcagatgtgtgttgattatatggaaagggaacgggatcatttctctcagttcataactgaaattgaaagttttacattatactgtaagaggaaaaggagagataaggtttatggcaacaatgttgagatccaggcatttgcagagatgtacaatcgtcccattcacatatattcctacagtacagagcccattaatatttttcaaggaagctataacacagacgttcctccaattagattaagttaccatcatggtaatcattacaattcagtggttgatccccgacggcagacagttggggcaggacttggatttagctcccttagagggacaaataatgttgacagggaccaggtgaaggctgcaataaaagctcagcaagaccagcaaattgagaatgcacttttagcagaagggcgattctactctgatctggagttaacagagagggaaatagaacggatggtgatggagtcctctcgttcagaatatctcgccaaggagaaaaagcttaacattcgggagtcatcgacatcaagggcagagccatcttcatccgccgcaattagtggttcctcccgttcagttgctggagctgatagaggcaaagaggactactttgtgcttccagatactgcactgactcgcagcatgcagttgctcctcgcaatgggcttcagctacatccaggtcatggaggcctacagcatattcggcgaggacgtggactcgatggtctgctacctgttggagacaggaggcaccggagcctcagcgggcggtagcaatcgccggaaaggaaaggctgctgagtgatctgcacaccttcattgctgtggatgtaatcgttgatcgaaatcgttgggcatgaggaagcataccagataatgacagccttgtgagttgatatgtcgatatacctgctaccttttgggtgatgaataaatggtactcacacttgagacttctcgatgccgtttggttgcttaagttaaataattaatggttggtggtggctgggattcagggaaaattaatgttaatcattggtaattttttggtgtatgtttatttaaacttttaaaaaatactttccaaaatgtgagatctgcattgttttgagaactgagggagtagatgttttttttcatttaggtgttgtttggttcacaaaatgtaatgtaaatgtcaacgttaatgattcgcacttaagtacaaaatgtaatgtaaatgtcaacgttaatgattcgcacttaagtaccagcagtaacaagtttaaataagctcatatcaatttttagcatgatatttgattacggttgttagttacaatcatgttacaaatatgtgaac

SEQ ID NO: 98180 - DNA, 2422 bp, Zea Mays
atcgtcctctcctttgccagcgccgccgaacccgccaccagccttctcccatcctcgaagcacggaaggctcccagaaggagctctcacctcgcagccatctctggcacgtccgtccttcttctccctcggtccctccccttctccacagctatcggattggcgttggagtggagatcgacccgggctcggaattcccttcgttggaagattggggtttcagctcaaactcccatgctcgacgctgaggacgaccctggcgggagatgacgaggatcttcgtgcagcgcgggaccgccggctcctcgtccagctccggccgctcggacacgcagccagtgcagccggcagcagctgcccgggaggaggagttgccgctgcaacctcaaccacagctgccggagctattggccatagatgatacaactgataatttaaatgagggcagcgagaatatcagcaataagcctttgaggacggatgacaccatttcagagagctcaagctccgcagaggagagggctgccagggagaagcctcttaaggatgactctaatgtaatcaaccccactttcttagtagaggaacctgtagggatccagatccctgatcagattgagcatgaaaattctgtgctgtcagtcactggttcatcacagatggcaggtgcagcatcgcacccaccaccaccgccagctccacctccaaaaccattgttggggaataatggcttgcggagaatggggcctggaagttcgaatagtgtgcggattggatcttcaagaaggccagtagcttggccactagtggcagcccggacatctgcttcaggttctcggccttcttcacctaggtcacttgttgatggggaaggttacaacagtgctgatgaacagggcccctgttatgccttgagttatgatgattcggaaagggagcgtatgtttgaccatgacctaaggcgagtgaaagggttggaaatcagaaagatggccgaagatgggaactgtctattcagagctgttgctgatcaagtttatggagacgcagaagcttatgacatggctaggcagatgtgtgttgattatatggaaagggaacgggatcatttctctcagttcataactgaaattgaaagttttacattatactgtaagaggaaaaggagagataaggtttatggcaacaatgttgagatccaggcatttgcagagatgtacaatcgtcccattcacatatattcctacagtacagagcccattaatatttttcaaggaagctataacacagacgttcctccaattagattaagttaccatcatggtaatcattacaattcagtggttgatccccgacggcagacagttggggcaggacttggatttagctcccttagagggacaaataatgttgacagggaccaggtgaaggctgcaataaaagctcagcaagaccagcaaattgagaatgcacttttagcagaagggcgattctactctgatctggagttaacagagagggaaatagaacggatggtgatggagtcctctcgttcagaatatctcgccaaggagaaaaagcttaacattcgggagtcatcgacatcaagggcagagccatcttcatccgccgcaattagtggttcctcccgttcagttgctggagctgatagaggcaaagaggactactttgtgcttccagatactgcactgactcgcagcatgcagttgctcctcgcaatgggcttcagctacatccaggtcatggaggcctacagcatattcggcgaggacgtggactcgatggtctgctacctgttggagacaggaggcaccggagcctcagcgggcggtagcaatcgccggaaaggaaaggctgctgagtgatctgcacaccttcattgctgtggatgtaatcgttgatcgaaatcgttgggcatgaggaagcataccagataatgacagccttgtgagttgatatgtcgatatacctgctaccttttgggtgatgaataaatggtactcacacttgagacttctcgatgccgtttggttgcttaagttaaataattaatggttggtggtggctgggattcagggaaaattaatgttaatcattggtaattttttggtgtatgtttatttaaacttttaaaaaatactttccaaaatgtgagatctgcattgttttgagaactgagggagtagatgttttttttcatttaggtgttgtttggttcacaaaatgtaatgtaaatgtcaacgttaatgattcgcacttaagtacaaaatgtaatgtaaatgtcaacgttaatgattcgcacttaagtaccagcagtaacaagtttaaataagctcatatcaatttttagcatgatatttgattacggttgttagttacaatcatgttacaaatatgtgaac

SEQ ID NO: 98181 - DNA, 646 bp, Zea Mays
accaaaggaacacctctgagcattctaaagctcatagtcctctcctcccagagcatttcacatcggtctcatctccacctgcttgtatccagcgcctcgtcactctacaaaacaacaacacatacttccaaaacacagcacatacctccaaaggatgagccgcagcaacaagaagagctctaggggccttgacctgaaactgaacctctcacttcctgcaacaggggactcctccgggagggtgatggctgatgaggagtcatccccgagctcctgcctgtcgtcagagaacgagcatggcctgcagtggtccaacagccctgaggccacatccatggttcttgctgcctgtcctcgctgcttcatctacgtcatgctcccacaagatgatccttggtgcccccagtgcaagagccctgtgctccttgacttcctgcaggacaacagcaacaacagtaataatagcagcaggaggagcaggaagggatgaacgatatggttccattaggctgagcatcatgaaaaagagttctatgaagtcttccagtagttctattttctccagtcatttcttcagtgtgactgatatatacatactaaaataacgaaacgagcacccatacgctagtattacaattttgatgta

SEQ ID NO: 98182 - DNA, 102 bp, Zea Mays
aatgcagactccattcatccaccaagggtcccaatgccgacaagtttggttgtgtatatgccgaagcatgttgccgaagcatgttgccggctatgatcctac

SEQ ID NO: 98183 - DNA, 1044 bp, Zea Mays
acgagtcatcgatcatcatcatgtgtcctaaatccaaagccagcgaagaagagattccgctggtaccgtagccgctgagctaaccaccagccggttcttgtcgcgttgtctgcaactttgcaagtaagcaactcgtcacccgtcagccaccaccaagtcaccttcgttaggctgtttgcccatccatccacccatcgtcttgcacgtccaagaaatcgagaactcacgcaggcgtcgcccacttgccctcttcgtcctcctcccgtcgtgaattccacgctggttcagggatgtcgatcgagctcctgacgaaattcctcacattgctgttcgggtatgccatgccagcgctggagtgcttcaaggcgatcgagcagcggcccggccgggcagatcagctccgcttctggtgcgagtattggtaatgattcagctccccgtggtttcatttgctcagatgggtgtcgggtggtggtccgaattggatggaactggtaccagtagagagggttgggtacttggatctgtcgaacctggtgctcatccacaaaaaggggatcggtttcttctatctagtaggtgcagtgttgtctcgcttgatgtggaattcagtagcaagttactccctccgtttcttttaagttgtcgctggatagtttaattttgcactatccagcgacaactaaaacgaagcggagggagtattatttagcaaaataaattcagcagcaaatcccgttctcctcttatgatatttgttaaggattatgtagcaacttcgtaccatcttccctacttcattgctgtttttttctttgtgtgtgtgtgcgtgtgtgtggtggtggttgactttcagacgatagagtaaaagcctgcagcgtgcgctgatgggtcttggtcttgctgtgtttgactggtttcagcaatcttgcaggatcatcctagtcctcctcgtcatgttcgacgaaattgctggggttctcatttctaagtaatcaccaaaacacaagtctgaactcatttcagcagtctctctctctctct

SEQ ID NO: 98184 - DNA, 1528 bp, Zea Mays
acgagtcatcgatcatcatcatgtgtcctaaatccaaagccagcgaagaagagattccgctggtaccgtagccgctgagctaaccaccagccggttcttgtcgcgttgtctgcaactttgcaagtaagcaactcgtcacccgtcagccaccaccaagtcaccttcgttaggctgtttgcccatccatccacccatcgtcttgcacgtccaagaaatcgagaactcacgcaggcgtcgcccacttgccctcttcgtcctcctcccgtcgtgaattccacgctggttcagggatgtcgatcgagctcctgacgaaattcctcacattgctgttcgggtatgccatgccagcgctggagtgcttcaaggcgatcgagcagcggcccggccgggcagatcagctccgcttctggtgcgagtattggatcatcctagtcctcctcgtcatgttcgacgaaattgctggggttctcatttctaagatcccaatgtactacgagctgaagctagccttcctcgtctacttgtggtacccaaagacaaggggaacggacatcgtgtacgagaccttcctccagccgctggtgatgcagtaccagcccaacatcgaggccaggctccagtacctgcgcgccaatgccggtgacatcctcgtcttctacctcaagaacttcaccgagagaggctacgagctcttcctccgagtgcttgactacgtccggtcgcaggcgtccagagggtcaagaacacggagtttcttctcgttccgaggtgaacgttcggagaggccaagcttcaccgatgactatgtcactggcggcgaccggagggacgggggaaggcaccgtcgaccacgcagtggctactagtagaccaagtagtcactggatgtataggatgtgcacagaaacatatacgattactggtatagtgttaggtaggagtaggatcaaatcaagcaaaccttacggacagaacttgtaggatccactggaaaaacagatagcttcttataaattttctattcatattgtcactttgtcagcaaccatctctttccgtgcttcttgcagtgctgcatagtggttttgtgttttttttgaaatggaaacatcgttccggccttttgcatttgcatgcatacagccttacaactcaattattacatcatcctgcagcaatttgtagttcaaatagacttcaactaaatcatgatatggaggaaaataaaacacgtgcactaagctgcttcaattcttgaatggaaccgccactcgtgactcgtgaagaactctatggccaccacctccaaagactggcacatgacgaggatttgttgttgcgtttcttccttctgcaatagtctccaaaatctgaaccagtgtgtgcccttgaagatagtctgtataattgacggtataggtttatgattaaacaccacatcattacggcaaagccaaatcgaccaaaacaatgctgcaacaccattaagaagcaattttttatgcgtgcaacctttgttggattccca

SEQ ID NO: 98185 - DNA, 1546 bp, Zea Mays
acgagtcatcgatcatcatcatgtgtcctaaatccaaagccagcgaagaagagattccgctggtaccgtagccgctgagctaaccaccagccggttcttgtcgcgttgtctgcaactttgcaagtaagcaactcgtcacccgtcagccaccaccaagtcaccttcgttaggctgtttgcccatccatccacccatcgtcttgcacgtccaagaaatcgagaactcacgcaggcgtcgcccacttgccctcttcgtcctcctcccgtcgtgaattccacgctggttcagggatgtcgatcgagctcctgacgaaattcctcacattgctgttcgggtatgccatgccagcgctggagtgcttcaaggcgatcgagcagcggcccggccgggcagatcagctccgcttctggtgcgagtattggatcatcctagtcctcctcgtcatgttcgacgaaattgctggggttctcatttctaagtaatcaccaaaacacaagatcccaatgtactacgagctgaagctagccttcctcgtctacttgtggtacccaaagacaaggggaacggacatcgtgtacgagaccttcctccagccgctggtgatgcagtaccagcccaacatcgaggccaggctccagtacctgcgcgccaatgccggtgacatcctcgtcttctacctcaagaacttcaccgagagaggctacgagctcttcctccgagtgcttgactacgtccggtcgcaggcgtccagagggtcaagaacacggagtttcttctcgttccgaggtgaacgttcggagaggccaagcttcaccgatgactatgtcactggcggcgaccggagggacgggggaaggcaccgtcgaccacgcagtggctactagtagaccaagtagtcactggatgtataggatgtgcacagaaacatatacgattactggtatagtgttaggtaggagtaggatcaaatcaagcaaaccttacggacagaacttgtaggatccactggaaaaacagatagcttcttataaattttctattcatattgtcactttgtcagcaaccatctctttccgtgcttcttgcagtgctgcatagtggttttgtgttttttttgaaatggaaacatcgttccggccttttgcatttgcatgcatacagccttacaactcaattattacatcatcctgcagcaatttgtagttcaaatagacttcaactaaatcatgatatggaggaaaataaaacacgtgcactaagctgcttcaattcttgaatggaaccgccactcgtgactcgtgaagaactctatggccaccacctccaaagactggcacatgacgaggatttgttgttgcgtttcttccttctgcaatagtctccaaaatctgaaccagtgtgtgcccttgaagatagtctgtataattgacggtataggtttatgattaaacaccacatcattacggcaaagccaaatcgaccaaaacaatgctgcaacaccattaagaagcaattttttatgcgtgcaacctttgttggattccca

SEQ ID NO: 98186 - DNA, 886 bp, Zea Mays
acacacagacagtcacacactcacagttccgctcgcttcgctctttcgctgtagccaagaactcgttctcgtcctcgtcccgttccaaagatccagcagcaatgaagggcatgggcgcgacggagacggcgccggcgggcaaggcggctccggcctcgcacatgccgatgccgatgacacgcgtccttctcctggggcgaccgcccggtggtgctgttcgcggggtggcccggcgcgcgcggcgcgggcgcgtacctgctctgcctcctcctcgtgctggcgctcgccgcgctcaccgaggcgctcgccgccgcctcgcgctgcgtcgcgcgccgcggcgcgggggcagaggcgggacgccgcgtcccggcgtcctcggccgcgctactcgcggcggcgcacgcagccaggatgggcacggcgtacctcgtcatgctggccgtcatgtccttcaacggcggcgtgctgctcgccgccgtcgccggccactcgctcggcttcctcctcgcgcgaagcagggtcgtgcaccctggcggcggaggtgccgccgcagccgctggccgtgaccacgggctcggcggtggtgtcgtgggcgtccatcctccggatggctccaaggcctaaggctgcagcagggcaaatgcgctcgggttaaacaaatgactgactgtctgtctcgtgcttgtctgttgttgtagttgtctgaacacattcaggatactttttccatggttctcaaaccccgatgtcatctccctgtctatcgtgctatgggttattagtgtatgctgtaaagacggtataatgtgctaagtttccacgtgaattgattataacgttgtatttgtatccaagaacaaagagtttctcccttttgcgatatata

SEQ ID NO: 98187 - DNA, 276 bp, Zea Mays
gtgttcaactccaaggaagaggaggagggagccgaggggaagaagtcacggacagcgaaggagctcctggccaagtacggcagcgcgtacctagccatctccatctcgctctccctcgtctccttcgccctctgctacctcctcatcagcgccggcgccgacgtgcaggagctgctcgccaaggtttcaatttttagcatgaacactttcttgacttccttcgtcaactattatgcttcaatcgaggccaagtgtttcgatcttacgtctgcttga

SEQ ID NO: 98188 - DNA, 2934 bp, Zea Mays
gctagctataggtggctcgctggagagatgagggccggggggtgcacggtgcagcagtcgctgacggcggaggccgcggcggtggtgaagcaggcggtgagccttgcgcggcggcgcgggaacgcgcaggtgacgccgctacacgtggcgagcgcgatgctagcggcgcccacggggttgctgcgcgcggcgtgcctccgctcgcactcccacccgctgcagtgcaaggcgctggagctgtgcttcaacgtggcgctgaaccgcctccccgcgtcggccgcggtcgcctcgtcgccgctgctcggcgggcacggccaccaccaccaccaccactactacccgccgtccctgtccaacgcgctcgtggcggcgttcaagcgcgcgcaggcgcaccagcggcgcgggtccgtggagagccagcagcagccggtgctcgccgtcaagatcgagctggagcagctcgtggtgtccatcctcgacgaccccagcgtcagccgcgtgatgcgcgaggctggcttctccagcacccaggtgaaggccaacgtggagcaggccgtgtgcagcagcaccaccacaacaagcaccgcggccgcggccaccgctcccagcaaaaaccctaatcctagcagctctgctgccaccgcaagcccacctcaggaagccgccaaaggcaacaagctgccgctccaccaagcgcgcgacgaggacgtcgccgccgtcctggactgcctggcctcgcggagcaagaggagggtggtcgtcatcgcggagagcgcggcggcggccgaggccacggcgcatgcggccatggacaagatcaagagcgccgaggcgaagcacgacgcgctgcgaggcgcgcaggtcgtcagcgtccgcgtgtcgtcgttccgcgagatggcgagggaggagaccgagcggcggcttggcgagctgcggtgcctcgtcaggggcaggagggggcaggtcgtcgtgctcgtcgtggaggacctcaagtgggcggccgagttctgggcgggtcacgtcgtccagagcgggaggagagggtactactactgctccgtcgagcacgtcgtcaccgagctgcgcgccctggcgagcggcggcggcggcagcctgtgctggctcctcgggttcgggacgtaccaggcctacacgaggtgtcgggtggggcagccgtcgctggagagcctgtgggagctccagacgctcaccgtgcccgccggcagcctcgcgctgagcctcaactgcgccttcgacgacagtgctctaggtctaggcacggtcaatcagtccatgaaagcgggctcatctgacacggatgggaacggaccagcgtcttgctggccgcttttggccggcagcaagctgatctccagatgctgcggcggcgactgctccgccgcgaggatcgagacgacgaaggcggcgctgcctcggacgccgttcgtctcgtcgtccagcctcccttcctggctccagcattgccgtgatcatcaggagcccgctacccatcttacggatgatctcggcaagacatggagctccatctgcagcagcagcaggccgtcacagcgaacgacgacgctgcatttctcggcgccggtgtctccggcctcctccatctcttcctacgagcacggcggcggccagtcgcagcagcctcgccactcgtggctcctcgccggcctcgacgccgcgcaccacccgtggagacccaagcgcgaggccagcatcaggtcccacgactccggcgcctccaacggctccgtggaggtggagtgccgcgccaggttcaaggagctcaacgccgagaacctcaagctgctctgcggcgcgctggagaaggaggtgccgtggcagaaggagatcgtccccgaggtcgcgagcgccgtcctgcagtgccggtcggggatcgccaagaggcgcgacaagtccaggtcggcggacgccaaggaggagacgtggatgctcttcctcggaggcgacgccgacggcaaggagagggttgcgagggagctcgccaggctcgtgttcgggttacgcagcagctttttgtccatcaggcctggcggtgtcgtctccgcctcgtcgccaccgccggcctcgtcaggctcctccgaggggcacaggagtagtaagcgcccacggatgccggaggaggagccggcggcctactacctagagcggttgcacgaggctgtctccgaaaacccacaccgggtcatattcatggaggacgtcgagcgggctgaccgggactgccagctccgcatcaaggaggcgatcgagagcggggtggtgcggaaccatgctggtcaagaggtcggcgtgggcgacgccatcgtcatcctcagctgcgagagctttggcgacagcaggtctagtagagcttgctcgccgccgagcaagaaggtgaaggtagagatggaggaggccaaggaggagcgcgcaggtgaccatgaacacaaccaagatggtgtttccaagccgtctccatcttgcatagatttgaacgtggacatggagagtgatcaggcggacgagccaagtctcggtgatcagtgtctgctcacggccgtcgacagggccctattcttcagaagacaggacaactagtgactgacagtgtacattggagttgaaggctccgtggtcgttccaacgtgctcagttctgataagaacctagattagttgcatgggcaatagggcatccagtctaattggcattttctttagttcatgttttttaggtttatctttttttttgctgtcttcgttttagagaattggatcgctggtgtatttgggcttcactaaagacaaacatacagctgctgtaaatttacctgcagattctaattcgcagtaccatatccggccaagttcactctctttctttttcacctagagataagcttgcaatttcaagatt

SEQ ID NO: 98189 - DNA, 1094 bp, Zea Mays
ctactagtttatatgattagtctaccggttggagtaattaaaatttaaaaggccatccatccactcgcaccacactttagcttcccactgtccacaatccacatgcgcgcacgtcgcacagtctcctacgctagtagcaacaaggcagccagctgagctcccactcccagaagagtccagcgccgcagcaggggcaggtcagatcagctcggtctcgccatgagcaaggagaagcaccaccgcgactggatcctccgccgttgctgcggctccgtcgccgcctgcatcctcacgctcgccgccgtggtcggcttcatcgtgctggtcatctacctcgcgctgcgcccctccaagccgtccttctacctccaggacgtgcagctccgctccatcgacctcagcgacccggcgctctccctcgacctccaggtcacgatcgtgtcgcggaacccgaacgagcgggtgggcgtgtactacaagaccctggacgcgttcaccacgtaccgcgacgaggcggtgacggtgccggtgtcgatgccggcggtgtaccagggccacagggacgcgtcggtgtggtcgccggtgatgtcgggcgacgcggtgcccctgccgcagtacgcggcggacgccatgaggcaggacatcgccgcgggctacgtgctgctccacgtcagggtggacggccgtgtcaagtggaaggtcggcagctgggtctccggcagctaccgcctcttcgtcaactgccccgcgctgctcgccgccagcgggagcgccggcgccggcggcgcctttgccgccagcgccgcgtcgttgcggtcgggggtccccgccggcgtcaacaccaccgtctcgctcaagttcacgcatccggccgactgcacggtcgacgtgtgactttgtgacgacggcgggcgttcgagttttcttgtagcaaatgttctcatatattttcccttccgaacctgtgcagaataagttattaagctattctatatctagctatacttgcgtcatagattattttgttatattagaggggtttcaagagggaacgatatgcatgcaaagtataaatggatcttttacatcacctt

SEQ ID NO: 98190 - DNA, 1508 bp, Zea Mays
aaaaaacacctctgccgtaaaacaaaaaacccacatagccacaccacacgtcgcattgatttttgcctcccggagctcacccgcccacaggcactccactccaccccaccaccaggccacaccactccgtctcctcccggtcccggcctccccccttcctttcccctcatgctgaattcccattcccggcccgatccccgctccccgttcctccaccacggcctcgcccacgccgccgccgtgacggagcacggggaccgggcgcgggggatggaccctccatcgtcgtcgggccgccccaccacgccgcgccggcagctgcagggcccgcgcccgcccaagctcaacgtcagggcggagtcgcacgccatcaagaagcactcggggtcgggggttccggcccccgggcgggcgcccgtcatcatctacgacgcgtcgcccaaggtcatccacgtcaagcccagcgacttcatggcgctcgtgcagcacctcacgggccccggtgggtccggcacgccgcctccgccgccgcagcagcacgagggccacatggtggacgacgacggcggcggcggcgtcccgctggggcaggcgttcctgccccccgagctgctgctgtcgccgtccgccgccatgtccccggccgcgcgcctggccaccatcgagcgctccgtgcgccccatgcccgcggcggcgccggcctacggcgccgacgacggcaccctggcggcggctctcggccccgcgcgccacccgggcatcctgtccccggtgccgtcctcgctgccgccggccgccgcgtgcgggctgttctcgccgctgcccttcgacgaccccggcagcatcagctggctcaacgagctcagccccatcctccgggcagcagcgtccgcggccaacgccggcgcctcttcgtccggcaccggcccgggcaacggcccgccgcctccgccgccgccggcctactactgcgacccgttcgtccccagcccccgcaacctcctcgccacgcccaccgttccctcgccggccacgtgcgcggagttcttcggcagcctaccggatctttagctcggcgcccctccgcttgcgtccaggtccaaccaagacagatatgcagcgccggcccaaacttttgcgacatttttccacaatttttcctctctctatctctcttctggaaggtaggggcaagttggtgttggtgggcccgccactgatgctaatttgattagtgcagaaaggacgtgagaacagaaaaagttttccggtagcagtagtagcagcagatgactactagaagcggccggccaccacacccacatgcctttgtttatttcttcttttcctttagatttacacctcttgtgtaggccaaggaaatggttgttgtcggcttaatgatggatttgttaattctttactaactcagtgatgcgcttatcattatgtcatgctgacctggtgcgttgtaaccgaactcactatgtaaacagttgggggcaaaa

SEQ ID NO: 98191 - DNA, 2514 bp, Zea Mays
caaataattgataacgaaggtatgtttcaaccaaaaggaataaaatcacctgggaaactaagccgcatagaaaggtaatttatagaaaggttattattgtgagtaagatatctagtttcaaaattcaacgacccacgaggccacgcaacgcaattttttccttggtcaccgaatacctctgctgggctttgtctgtgtctcagcatgtccggttcgacgactcgtgccaacggccgaaccaacttagccacaggccacaacacagcccacagcccacattgtggaggcagcggcggagccttcgccggaggaactggggccaccgaggtagttggtggtgggagcctgggagggcttgcaaggggcgaaggaggtcgacgcagtctacaaggtcgtcggggagagggagatcgacgtcctcgcggcccggtgttgccgctgcctggtcgcctcgtcggtagcaccaagcgccacctagttatactataaaaccaaacttgtttgcgcctttggaatgtgcacacccatgggaatttttcttgatggtccactgctgacatgcacagacatctcttctacctctgccaattcaaaggccatgctgttataccagcagtagctgcaacgattcaactagttgtggcaaatttcggcacatccccaacactcgagatatcaagaaagcaaaggtgtgctaaccttcaaaatgcattgagaattttggaccttgtaccatccaagcatcatcatgaccaagaggaagttccgtcacatcaccgccttatcaatggctgtatgggtgacatctcgggagtccaatcaagactgcacactatgcgtaggggtaaagagagctttgctaactcaaactcaaatcaagcacagcctaaacacggtaacattgtctcaaataatacctcggtttgcccctccataactagactcacaaaggaagacatgtttatgcaaattgtggagttacataggaggggacaaatcagttcagatgcatccattttggcatctgcactgagttactgtgctgatgagaaaactcttaccacaggtgtacagttccatgctcaactagtgaaagtaggatatgtctcatctatccccattggcagctcgctgatcagtttttattcacgatgcagccaattggaaattgctcatcggattttccaaaatatgacagcaaaaagtactgtgacatggacagcattaatttctggttatgcccaagataatcaggtcgaaccatgtctccatttatttgcactgatgaggcagtctgtgtgcaagccaaatgacatcacatttgcaactatcttgagtgtctgcactaatcatgcatttcttgtacttggtaaaagtgtgcaagccctacaaatgagaatgggttttggttcctatgtgcatgtgtccaatgcattgatatcaatgtatgcaaaatgcgggagcattggtgaagcacgagctgtatttgagagcattacatgcaaagacctggtctcttggaactccttgatctttggatattcacagcatggccttgctgagcattgcctatacttgctaagagaaatggaaggacatataataccggatgcaatctccttcctaggtgtgctctcatcatgccggcatgcatgccttgtggcagagggccgacgctgcttcagggcaatgattgaacatggagtaataccagagatagatcactactcatgtatggttgatctttttggccgtgcaggactgcttgatgaagcatgggatctgatccagacgatgcccatgcctccaaatggtgtcatatggggctccctgctagcttcctgtaggctgcatgggagcatttcgatcggcatacaagctgcagagcaccgtctaaagctggaaccaagttgtgctgcaactcatgtccagctagcgaatttgtatgggagcattgggtgctgggatgatgtggcaagagtgaggaaagtgatgaaggagagagggctgaaaacaaatatcgggtgcagttggatagaagttggcaataaagtttatacatttacagcagaaaacagatcaaagaaccaggtaaacaatgtcctagttgttctcgattgcttgcagtcacatatggatcacaagtatgatatactgattgagggtctggattgggatgatcctgaacatataaagttgagtttaaacaatatataaatttgaagatcattgcccgccatgttcagcttcatttgaagaggcactcaataggaattgacatgtgtcattcacacctcaaatatcttcaatctcgatgtaacatgtaagtttaacacctgtgtttgagcatttgaaaagatttggtttgctcagtttactttcatctgagctactgctgatatccatattcattttgtactaaatatatttttcacaattgaaacctctgtatacaagaatgcatgttcaatctcttgagtaatgtgcagttctgcatggaagatgatgggcaat

SEQ ID NO: 98192 - DNA, 1320 bp, Zea Mays
ccagcataaccttagagctggtttgaagaggatgcaaccggtgcagctgcacaaatggcagacaagagattgtgctgtgtgtggccctctgattcccaaaaaaaaacaccactgagatgcagtccacttgccacaagcaaagaagcttccatttgtgcacattccaacctttgccaaatgctttttgtctcaattggctggcagagacgaaagggacaagggcgaaagaggcagcatatcatattaccaaataaaataatccgcgtactgtattattgcagcctcaaagagcctataaatacttgagcacagaccagtttatggttctacatgaggcagactaaaaacaagaacatacctacgcaactagcagagcttacagatttgcacccacaggactctgaataaagctggggctttttgcagcacaaggacatggagtacccaagaaggacactgctgcacacccctttctccgggcatccctctggtccaagccagccaatagatggagccacggccacagacggaagcaacttcgacgcgaacgtggtcatgatcctggctgtcctcctgtgcgcgctgatctgcgctctcgggctcaactccatcgtccggtgcgcgctgcggtgctcgagccgggtggtggtgggtcctgaaccgaaccaggtgacgcggcttgtccagagcgggctgaggaggaaggcgctccgagccatgccggtcctggtctactcgcctgggctgaggatcaatgctgccaacccgacatgcgcgatctgcctctcggacttcgaggcaggggagcatgtcagggtcctccccaaatgcaaccacggcttccatgtcaggtgcatcgaccggtggctgctggcgcggtcgacgtgcccgacgtgccggcagtccctgttcggagtgccgcagaaggcctccggctgctccgaggcgagccgggctgccgagccagagcctgcgcctgcgcctgcgcctgctcgctctgtccttgtgccgctcagacctgaaggtttggtcactcattatgatttttagaatgttcggttgcttcttagtcgttgcataaatgatgagagggaggctgagaaaaagtagaaacaaaaactgtgagcattagatcttactgccaatctggtttgtacattgttggttgctagagaaaaaaaagatgtgaaggttttctagttttttttttacttgctgtgtcagtgccaattgttgctggggaatgtgccatggaaaataccagctggtgctatctgctatgggttccttttctgaatcaccattcaatgttggttttgt

SEQ ID NO: 98193 - DNA, 1805 bp, Zea Mays
gcacggtagagcagtgtgggactgggagccggggaggcgccgacgcgacgaccagcaccaccatcgcttttctccttccttataccagcacccccaccacctcttcctccctttccctttctggccgcattccctcgtcctccggcagccgtcgccagcttccgatggtccggaaggagacggccatgaggctgcccccgcagcaccagggcctggaggtcaagatccccagcttcttccgctgccccatctcgctggacgtcatgcgctcgcccgttagcctctgcaccggcgtcacctacgaccgcgcctccatccagcagtggctcgactccggcaacaccacgtgcccggccaccatgctcccgctcccctccaccgacctcgtccccaacctcactctccgcagcctcatcgcccactgggccgcctccgccgcctcctgttcccccaccgccgccggcggcgccggagtcgccgactcctcttcggcacgtacttcttctcccgcgagcctcgtccgccaggtggcttcgtccggcgtggacccctcgccggccctccgcgagctggcagcctatctctccgacgacgacgtcgacgacttcgaaaagaacgcgcttgtgggcgccggccgcgccgccgagaccgtcgcgtcagttcttcggagaagagccgaggaaaccggcgtcgaaggcgtggaggcggccacgagagtgctagccttgatcttggcctcggacggcatcgacgactcgaacaagaagcgggtggccactggcctcgccgcggacgcggcggcctcgaccgcgtcgctggcgcgcgtgatgcgcggcgggagcgacctggaggcgaggatcgacgcggccaagctggcggagctgttgctcgccaatgcggccggcgaggcgaaggcggcggcgaccaaatcgtccgagttgctggccgagctggtacgcctcgtgggcaccgtcgacgagacgggcgccctggacaggaacgccgtggacgccggcctctcctgcctggccgccatctgcgggtcgtgccgtgccgcgcgtggcgagatggtgcgccttggcgcggtcccggccgctgtgcgcgctctgcgcgcctcgacggagtccggcgcgtccgcgaaggcgctccgggtcctcgagtccgccgtgggctgcgccgagggccgtgccgcgctgtgcgccaacgcggaggacgccatccctgcggtggtgggcaagatgatgaaggctgggcgcgacggcgcggaggccgccgtggccgtgctctgggcggtctgccaccggtaccaggaccgccgggcggcggacgcggctgcggcggccgagggcgggctgacgaggctgctcctcctgatgcagagcgggtgctcgccggcggcgagacagatggcgctggagctgctgaagatatacagggtgaacgccaagagctgtctcgccggctacgactccaagaccacccacatcatgccgttctgaggaaccgaagcggacgagagtggtttgccgcgatcctgggtggctgttttgacatgatgaaatggattcaattcagtgaatcaattaaatcgcatggaacaggggaatgtgttcttgttcctgtgatgtttattgatttccactcccccctcctcttttctttggatgtaagtcggtagagaaacaaacaagaattagttcacgaggtgagatgaagaataatctgtacagacatgatcagaacaggcatagtggacaatttaaccaaaggattgatttttaggctaaagaaattggtagtgtttc

SEQ ID NO: 98194 - DNA, 902 bp, Zea Mays
tacccgtcacgcggattggcactagcagccgagcaacgcccgccgtccatctccatccgacggccgacgccgtgtcccccaaaattttcgcgatcccgccctgcttctgcctgctacaaatgcccgccccgagacacaggcccagcatccacagctcgcatccgatttccaatttcaaatccttcgatcgcgcagcgccgcccgccctctcgcagctctctccgatggcccgcacgaagcagacggcgaggaagtcaactggcggcaaggcgccgcggaagcagctggccaccaaggcggcgcgcaagtcggctccggccaccggcggcgtgaagaagccgcacaggttccgccccggcaccgtcgctctccgcgagatccgcaagtaccagaagagcacggagctgctcatccggaagctgcccttccagcggctggtgcgtgagatcgcgcaagacttcaagaccgaccttcggttccagtcctccgctgtcgccgcgctgcaggaggccgccgaggcgtatctggtgggtctctttgaggacaccaacctctgcgccatccacgccaagagggtcaccatcatgcccaaggacatccagctcgcgcgccgcatcaggggcgagagggcctgattgctgctctgtcttcctgtttctgtaatgtctgaactaggcgatggactctatcgcttcttgtcctgcaatcgtgtaccgatgttcttggcaaatcaatttggctgttatgaatgtgattcagtgatttgatttataacttttttgttccaaaattggaacaatcactgatccaagagagcgttgttttttgagccagaacataaaatctaggttttatcggttcttatattttatcgtgacagtagcagccaaaaaacagtgaat

SEQ ID NO: 98195 - DNA, 631 bp, Zea Mays
gcatccacagctcgcatccgatttccaatttcaaatccttcgatcgcgcagcgccgcccgccctctcgcagctctctccgatggcccgcacgaagcagacggcgaggaagtcaactggcggcaaggcgccgcggaagcagctggccaccaaggcggcgcgcaagtcggctccggccaccggcggcgtgaagaagccgcacaggttccgccccggcaccgtcgctctccgcgagatccgcaagtaccagaagagcacggagctgctcatccggaagctgcccttccagcggctggtgcgtgagatcgcgcaagacttcaagaccgaccttcggttccagtcctccgctgtcgccgcgctgcaggaggccgccgaggcgtatctggtgggtctctttgaggacaccaacctctgcgccatccacgccaagagggtcaccatcatgcccaaggacatccagctcgcgcgccgcatcaggggcgagagggcctgattgctgctctgtcttcctgtttctgtaatgtctgaactaggcgatggactctatcgcttcttgtcctgcaatcgtgtaccgatgttcttggcaaatcaatttggctgttatgaatgtgattcaaaaagagagaagaaaga

SEQ ID NO: 98196 - DNA, 623 bp, Zea Mays
gcatccacagctcgcatccgatttccaatttcaaatccttcgatcgcgcagcgccgcccgccctctcgcagctctctccgatggcccgcacgaagcagacggcgaggaagtcaactggcggcaaggcgccgcggaagcagctggccaccaaggcggcgcgcaagtcggctccggccaccggcggcgtgaagaagccgcacaggttccgccccggcaccgtcgctctccgcgagatccgcaagtaccagaagagcacggagctgctcatccggaagctgcccttccagcggctggtgcgtgagatcgcgcaagacttcaagaccgaccttcggttccagtcctccgctgtcgccgcgctgcaggaggccgccgaggcgtatctggtgggtctctttgaggacaccaacctctgcgccatccacgccaagagggtcaccatcatgcccaaggacatccagctcgcgcgccgcatcaggggcgagagggcctgattgctgctctgtcttcctgtttctgtaatgtctgaactaggcgatggactctatcgcttcttgtcctgcaatcgtgtaccgatgttcttggcaaatcaatttggctgttatgaataaaagagagaagaaaga

SEQ ID NO: 98197 - DNA, 596 bp, Zea Mays
gattgggacatcaacacgccgacaccatacaacttaactagccggttagattgagacaacaacacgacaccacactcaccgtcgacacagagtgcccaaacaaacacaggcagcggaaaccccacacgagagcatataaaactgctaaaggtcatcattgtcaagcaaggatgcagagcatccagcaactccgacttcccaaaacagccgacagatgaaccaaacgaaaagcagacagacagcccgaagcgaaaggtctcaacaggtcatcgttgccgagctcaaggcacagagcagctccgacttccaatcttgacccttcgccctacctctggtttttgcccgaccttataaacattctggaccacgaagaagggaggttcgcctcatgttatcgttgccgagccacatcccctgacatagcagctccgacttcatgttgcaaaaccccacctccacccgcgtaccaggcgtcgagaagcgaagcaacagccgaaggcaaagctgtggccgagacgaacttcagaagcgacaccttcaggaaaggagtgacgtcaccatgacgccagcgtcgcctgtccgcgatagaccgggct

SEQ ID NO: 98198 - DNA, 903 bp, Zea Mays
atgtggcgcctctgttgctgcaattgccaagtggatgaaacaaatcagtgtgagagtggtcaagtcaaggccacaaccaacaaaatcgacggggcaacgaagggtttgcgggattctgctactgcaaaagtcaagccacacgatgatgctccccttatcgatgtccctgttctatccttggatgatctgataaaaacactattgacttggttcaagaaccttggtagatgtacagagctccgaggcttggcgcaggaagaagagtctttacagcccactagctaccaacaacgtcctgaaaagatcacgcgcgagcgttctcgtggtgaaggtggtatccttagaaatagtgaagggccattgaaggaccacatttatttgcatctgaaccatctgccgcctgaggttctcaaagaaaggctccctggtatttctgaaactgctgctatttttgctggtgttgacgttacaaaggagcccattccagttttgcctactgtgcactacaatatgggtggtatcccaacgaactaccatggggaggtagtggatatcaagggtgataatccagatgctgttatccctggtctaatggctgctggtgaagcagcctgtgcatctgtccatggtgcaaataggctaggcgcaaattcacttcttgacatagttgttttggcagagcttgtgcaaacaggggaggctatgaaggggctggacatcagaaaggtgttggaggcgcccaaggaggtcaagtgcgtgcccatgaagaatgtgctcgagcccggagacatccccacgcttgctgagctcggtctcactactccaccaggcatggcacaggtacaactagaaaggtttctggcattcagtaccatgatgcgttctgtcgttgaacctgtttga

SEQ ID NO: 98199 - DNA, 937 bp, Zea Mays
tgctaattcatttcctatgttgtattactttagaaattggcgcaatttgggactagacagcttatcgcagttcttttaattgatcaaaagctgttaaaacatggagacgttttggatttgatttaacctccacttttgtgaactaatggttttgttttttacgtagatgcacatggagacgtttgtaatgatcataataaaaaggctcaaggatgccaaccttttcgtgtcacaaggagggctcatcattctagcacaggaagttgaggagtgtttacttaaagttgagcagtcacctcctgaaagcacatcgaatgctcttcaagtagcaactgcagctcttgatgtattctctttaattgtggaggccttcaagcatctggatgacatagagagccccttctttggaaggagaacttcaatttttgatacagtcgcaaaagttcggtcctgtgtggtgatgctagatcttgaatgtgacgatttgataaatgatatgttccatcacttcttgaggactgttaattctgggcattcagaagccatcatatgctgcatggaaacaataataatgagattggtaattgaggagagtgaggatgtccaaccacagattgcttcatgtctactccaaaatgttagaaaagaagaaaaggtgtccacatgcgcgtgttctgcctccagaaatctcggtctgcaaactctccatctcacgccgaagctcgtgagcgggagcgaccacggcaacggtgtggactggtgggcctttggcgtcttcctctacgagctcgtctgcggccgcacgccattcaagggccacaccaaggaggccaccctcaagaacatcctctccaagcagaccacttacctaggttttagtttgtccggctttgctcgtcattttgtacttgttcttctcacatatttgttcgcttag

SEQ ID NO: 98200 - DNA, 215 bp, Zea Mays
actatttttaaaatatgttttatgtttcctggaaacgatttgcactgacggttttattacgtcgaccgccagtgaaaatcgattttcactggcggtcttcagttacccgcctgtaaaaatgatgatttttactgacccctagcactagcggttacgataaacgccactaaaaatgggtttatgaccgccagtatagatcttctctgtactagtgt

SEQ ID NO: 98201 - DNA, 3770 bp, Zea Mays
tcttcaccaaacacacgctctctctccccttcccatctccttcctcccgccccagatccgagcccggcgcccgagttcatggcgagcgacagcgacgtcgacgaggacgagctcctgcagattgcgctgcaggagcaggcggcgcgggacctcagccaccagcgcccgcccgccgccaacaagcccgttgtcaacctcgtccgcccacccgcccccaatgctcgcggcggcaacgccagggccgggggcgccgcagcgaaggcgcgccagcccagccgcggcggcgacgaggacgacgactcggaggtcgagctgctctccatctcctccggcgacgaggacgacaatccccgcgcccgcggcccgccgccgccccgcgggggcgggggtggacgcgccggagcgcggagggccgcgtcacgggacgatggggacttcgacgatgaggagcccagaagctggaagcgcgtcgacgaggcagagcttgctcgcagggttcgagaaatgcgtgaagcaaaggtggctcctaacattcaagaacttgatcagaaagcagcagctgctgctgcagctgctgctcgaaaggccctcacgagtgtacagactttaccaaaaggagttgaggttttagatcctttgggccttggtgtcattgataataaatccctgcggttgatcactgacgcttcagtaagttctccaatttcaagggagaagtctcaaggtttggaccccaatatgcgagacaaagttatctattcatctccaaattttgatcccaaagttttcctttcgtgggtccacaaagacacgagcgctgctgacttagaggctggtgctctcaccttgaaaactgatctcaaagggagaacacagcagaaaaaacagttagtcaaggagaacttcgattgttttgtctcgtgcaaaactacaatagatgacattgagtcgaaattgagacagatagaggaagatcctgaaggtgcaggtactgctcacttgtattcagtgacacaaaaaattagcggtgtggcaaatcgtgcatttgagcctctatttgagaggcaggcccaagctgaaaagatcagatctgttcagggaatgcttcaaagattccgaacactatttaacctaccaagtgcaatccgtgggaacattagaaaaggagaatatgatcttgctgtcagagagtaccaaaaagcaaagtcaattgttcttccttctcatgtggggatactaaaacgtgtactcgaagaggtcgaaaaggtgatgcaagaattcaggggcatgctttataagtccatggaggatcctcatcttgatcttgctgagattgagaacattgttcgtctattgttggagttggaacctgaaacagatccagtgtggcattatttaaatattcagaatagcaggattcatggattgtttgaaaagtgtactcaagatcatgactcgagaatggaagttttgcaaaataaaattcgcgaaaaagtgctctctgattcgaagtggaggcagctgcaacaagattcaaataaatctctggaagttgattctaccattggtgattctcctcgagttgatcagttgtcaacaaactttatggctgaggaagctgatagtttaagggccacctacattcgtaggctaacttctgtactgatccagcatgttccagctttctggagattagctttatctgttttcagtggaaaatttgccaaggcagcttctggtaacgtagtttctgattttgatgtgaatgcaaagccgactgcaaataagaatgatgaaaaaggtggagaagtaaagtacacaaaccacactcttgatgaagttggtagtatggttcaggctactatatcggcttttgacactaaggttcagagtaccttccgtgattttgaggaatgcaacattctttgtccatacatgagtgacactataaaagaaatagctaaggcctgtcagactcttgaagggaaggattcgtctccaactgctgtaaaaatgttgcgcacacttcattttgaaatgacaaagctttacattctacggctttgttcatggatgcgggcaacaacaaaggagatatcaaaagatgagacttgggttactttatccacccttgagagaaacaagtcccagtatgcgatttcatgcttgcccctggagttccgtgacataacagtttcagctatggaccgaattgatactatgattcttaatctgatgagcgagactgcgaagtcatatgacatttctcaaccacttcaggaaatcaatgagtctgttagacttgcatttttgaattcctttctggactttgctggttatctggagaggtttggaggtgaactaaccgagaacagaccaaacaaagaaaacaattatgtctcaaatggatacataaatggtactagagaaacatttgttaacacagatggagatttgcacaaaaagctgctggttgttttgagtaacattgggtattgtaaagctgaactttcagaagaactttacagcaaatatagacacatttggtctccagtcaggaataatgaggagcgaagttctgacatgcgagacctgaggacttctttctctgcacttgaagagaaagtcctggaccaatatacttttgcaaagtcaaacttgatcagaagtgctgcacaaagttatcttttggattctgggatttattggggagcagcgccaatggtaaagggcattcgagatgcaactcttgacttactgcacatccttgtagcagtacatgcagaggtatactctggcgctcggcctctgttggagaagacaatgaaaattttggttgagggtttggtcgacatctttcttagtgtttttcatgagaataagaccaaagatattagattgttggatgcgaatggtttttgtcaactgatgcttgagcttgagtattttgagactgtactgcacacgtacttctcacctgaggcgcaacaggctatgaaatctttacaagagaatttgttggaaaaggcctgtgaaagtgttgcagaagccatggaaaatcctggacaccaacgtcgaccaacccgtggcagtgaagatacagcatcggatgacagacagccatcagtatcacctgatgatttgcttgtgcttgctcagcagtgcagtagtgatctgctgcaaggggagttggagaggactcgattgaacatagcctgtttcatggagtcgacccttcaaccaacagctgcgccagcaggcccaaagcctgccgcacattcttcttaccaagcacagcatgctcccgtccaaacgtcctcgcctagttttagaaggcagcagactggtacaagttcccctgtagtctccaggcggcgccggtgagcttagtgcatctttccatcattggcgtagcctcttcccggagtttccttccttttcccccctcacatgtgtgctttttttaatcacttgtaattgtcatcctgttgtcatgtgttacgaatttcgatccattcttttggtgttgtataagatgaaaaggaggagtacagtactggtgctgctgcacgggatcatggaattgtataatatcgacgagtcaaatattattgctgcttgaagataccaccacagctttatgtatatggaattctggagttgtcggtctgcgccaacttccttcctgcggtcgtcaccgcatgtttgtacattcgtcgcttggacagttttatgtatcccgagatttgttaatattgtatcagttggtt

SEQ ID NO: 98202 - DNA, 240 bp, Zea Mays
atggctcaagggggtaacaagggcaagaaggcagtgtcactgcgagagaagaaagatggtgcaaataatgcagccctagcggccttaagcaaagaagcaggggagtataactctatgatgaacagggttgaaacgatggctggtccagagctgagggagtacgtctcacaaaacaaacacacactgggtagcaaactgaaagcaacaattaagaagcttctacggaaaggagatgcgtaa

SEQ ID NO: 98203 - DNA, 1385 bp, Zea Mays
gatgccaaaattagcgccccgccaccccctgctgcgcgcggtgagcatagcactcctccaatcctcctatctgctgcacgtacgagctaccccgggcagctgtccagggccacgcttcccacgcccgaacgatcgatggccagtggcggcggcaacgcggcggcggacgccaagcacgtcgatgcggaggtcgtcatcgtgggcggcggcatcgcggggctggcgacggcgctggcgctccggcgggcgggcgcggcgcggcgcgtgctggtgctggagcgccacgcggggcatcgtgccaccggcgccgcgctcaccatcttccccaacggctggttcgcgctgcgcgcgctcggcgtcgcgcacaagctcgcctcccgctacgacgcctacgaaacatccagggtgaccaatctcgagaccggggcgacgcaggtgtttcgctttgccggcaacaagaacaagggcgaagaagtcagagtgagggcgcttgacaggaaggcgctgctggaggcgctcgcggaggagctgccgccgggcaccgtccgtttctcgtccaaggtcgtctccatcgacaccgagcgagcagccggcgactcgtcggtgaccgtcgtccttggattggacgacggcacggtgatccgagccaaggtcttgatcgggtgtgacggcgtgcactcggtggtggcgcggtggctgggcctgtcggaaccggcgagctcgggccggtctgccgtccgcgggctctccgtcttccctggcgggcacggcgtaaagcgggagctccggcagttcctatcggagggtctcagagccggcatggtgcccatcagcgacaccgacatctactggttcctcgtcaacaacacggtcgccgcaggcaagtgaagtcactgccgcatgccacttcggtgccagtccttcagagctcagctcagacgcgcgcgtgctggtggtgcctgcgtttgcagagaaagaagccgccggggacccggtgaagaccctgctcgaggtgaccgacaacctggccaggcacatgccagcggagtacctggacgtggtgcgccactccgaccacggcaacctctcgtgggcgccgctcctgtaccgcaacccggtgtccgtcctcctgggccccgcggctcgcgggcccgtcacggtggccggcgacgcgttccatcccatgacgcccgacatggcgcagggcgggtgctccgcgctggaggacgcggtggtgctcgcccgggcgctgtcgcgtgaggcgacgccggccgagggcgtgtccgcgtacgtggcgcagcggcggtggcgcgctgcctggctggtcgccggagcctacctgtcggggtggatccagcagggcgggaccaacgtcggcggcgtgc

SEQ ID NO: 98204 - DNA, 1470 bp, Zea Mays
gatgccaaaattagcgccccgccaccccctgctgcgcgcggtgagcatagcactcctccaatcctcctatctgctgcacgtacgagctaccccgggcagctgtccagggccacgcttcccacgcccgaacgatcgatggccagtggcggcggcaacgcggcggcggacgccaagcacgtcgatgcggaggtcgtcatcgtgggcggcggcatcgcggggctggcgacggcgctggcgctccggcgggcgggcgcggcgcggcgcgtgctggtgctggagcgccacgcggggcatcgtgccaccggcgccgcgctcaccatcttccccaacggctggttcgcgctgcgcgcgctcggcgtcgcgcacaagctcgcctcccgctacgacgcctacgaaacatccagggtgaccaatctcgagaccggggcgacgcaggtgtttcgctttgccggcaacaagaacaagggcgaagaagtcagagtgagggcgcttgacaggaaggcgctgctggaggcgctcgcggaggagctgccgccgggcaccgtccgtttctcgtccaaggtcgtctccatcgacaccgagcgagcagccggcgactcgtcggtgaccgtcgtccttggattggacgacggcacggtgatccgagccaaggtcttgatcgggtgtgacggcgtgcactcggtggtggcgcggtggctgggcctgtcggaaccggcgagctcgggccggtctgccgtccgcgggctctccgtcttccctggcgggcacggcgtaaagcgggagctccggcagttcctatcggagggtctcagagccggcatggtgcccatcagcgacaccgacatctactggttcctcgtcaacaacacggtcgccgcagagaaagaagccgccggggacccggtgaagaccctgctcgaggtgaccgacaacctggccaggcacatgccagcggagtacctggacgtggtgcgccactccgaccacggcaacctctcgtgggcgccgctcctgtaccgcaacccggtgtccgtcctcctgggccccgcggctcgcgggcccgtcacggtggccggcgacgcgttccatcccatgacgcccgacatggcgcagggcgggtgctccgcgctggaggacgcggtggtgctcgcccgggcgctgtcgcgtgaggcgacgccggccgagggcgtgtccgcgtacgtggcgcagcggcggtggcgcgctgcctggctggtcgccggagcctacctgtcggggtggatccagcagggcgggaccaacgtcggcggcgtgcgcggccgcctggtgaaggtgttccgggactggatcttctacaggttcgtgttcccccggctcgcggacaccatgtggttcgactgcggcgacctcacgccgccgccgcccacggcagcagtaggcaagagccaccacatcgagtgaactccgaaccacggcgtgtcagtatcagct

SEQ ID NO: 98205 - DNA, 396 bp, Zea Mays
atggagtttgctaggctgaccatatttttaaatgtcgtcaaaagttcgcctgcaactgcggtctcgtcgtgtccgtcggtcttcaacttcagcgaccactatcatcttcatctgcaacatcgtcgttgcctccttggtgttcgttgccgactccgctacctgtttgaaccagaattcatcgtcatcttacccatgccgtggccgcaatttcctatgtccctagtccacgtcgtcgtccagttcagattattcctatgtagaagaaggtggagctgtagaggaagaataaagcgaagttcaatgcgttgctcactaggcgttcgacaaaaggctcaaatcagagattgttatcgtattgagaatatcaagcctgagttagtgatggttaaccggtaa

SEQ ID NO: 98206 - DNA, 204 bp, Zea Mays
atggcctttgcgcactccaagctttcctctggggacgttagcctcggcatggtcgtcgtcgacgcgaaccactcctcctgggccgccgcggcgctccccttcaccgactccttcacgtgcttgaactccctcctactgttgggccacctcaaccgtgtggttgtcatcgcggcgggagtccattgcttgggatgcgcgcactag

SEQ ID NO: 98207 - DNA, 675 bp, Zea Mays
atgatgatcatgtttcttttattttgtgcaggctggcagtgctcatgctcaaatatacccttcacccactgacgttttcaaacctctgataaaggagggcaatgtctacaatgtctcctacattcagatcaagaaagctaataggatgtacaagcctgttgacaacgatatcatgatcggtttcacaaaatggatcctatgctgccttgacaaacccgcggtttgaacacgtgacagatgacggcttagcttatgtggatggacatcttggttgcttttgtagatggaatgtttggttggcttttgtagacagaatcaggctgcacttgtgcttgtgtaacacttatgagcatggttgtgtggactgtgtcggccaaagtatgcctcccagtgccttgtatatatcacctacttagctgcctatccccaactaggtcgcctgataatagactttgatcatgtcatgctattctataacaatttccgatgtaacttgcttgatcgtcatactatggtacacgcttaaatttggtgctgcaactttaatgtggattatgttcagtcgatctgtgtttagtttggtgttttgttggtgttatttattttttttctgtgctggatagggcgcccgaatgggcgccacctgatctagttctttagtaaaaagcaaaagaa

SEQ ID NO: 98208 - DNA, 100 bp, Zea Mays
gaatgttttatctcttcatagatgtttgtggagttgatttttcatttaattgtaaggttgtatgcatggaagtgcaaaaagctagaacttgtttccatca

SEQ ID NO: 98209 - DNA, 2419 bp, Zea Mays
ccgtcactgctcgctgagtcgccgtcactgctgtgcgcgcgcttgtgctgtctgctcgccgtggatctgctggaggccgagcggtggaccggtggtcgcgtagagccgtagagcggtggacggccgcgcggggagcgaacctgggcgcctggcggtggacgaccgagcggtggagcctgggcgcctggcggtggcggctaccggctagggttcttggctgttggtttgtcgctctctggatgccaggctcccagtcccagccgacccagcctcttcggtcttcacgacttcaccgcagcaccgctcaaggagacaaggactcaagatttcacactttcatcgctcacggcccacggcccacgggattggagaataagatctgggtccacatgtcatatacccaacgggtgacggatatggatagcctatatccatacccgcgaaattattacccgcagatattatatagtaaccatacccgtacccgcggatacgaaaacccaccatatccgtacccgacgggtaaataaccacggttttttacccataaccgtacccacttccatccgtaggcacaccacccgcccatcctgaaagtgaaaacggtggtgggagctcagcgcgctggcgtcgcgcgaaagtgaaaacgcccacatgctgccagtgatcctggccaaagccgcctcagccaatggcctcgcactatcatccatgacgtggatcaccaccactagcagcaccatccgcaccgtccatatccatccaacggacagcgtcccttccccgccggcgcctcccaaaaatattcgcatcccgcgcttccacaaccatccgtgagtcacgaccagtacaaatattccacctggaatgctcgatccacacacgcgaatcctcaaatctgcccttgccgccgccaccgcccgatccaggtctgcagactgctccctcctcctctccgctccgaatggcccgcacgaagcagacggcgcgcaagtcgaccggcggcaaggcgccgcggaagcagctggccaccaaggcggcgcgcaagtcggccccggccacgggcggcgtgaagaagccgcaccgcttccgccccggcaccgtcgcgctccgcgagatccgcaagtaccagaagagcacggagctgctcatccgcaagctccccttccagcgcctcgtccgcgagatcgcgcaggacttcaagacggacctgcggttccagtcctcggccgtggcggcgctgcaggaggccgcggaggcgtacctggtggggctcttcgaggacaccaacctctgcgccatccacgccaagagggtcaccatcatgcccaaggacatccagctcgcccgccgcatcaggggcgagagggcttgagctgtcgcgctgctgctgttcgtcgttgtaacgtctgaagtagatgatggtgggtgctttctatgccgtgcctatttggctatttcggacgtgttgtcctcactgaatggaaaatggaatgcgattgctcgtctgaaattaacgaatgactttttacctggccaagttccttggaggaaccataacatgccaacataattaaatctaagagaccttatggaataaaaagaagcaagaggagctagctcgatcgagctgagccaaactggctcgattaccaagtttcgatggttgtgagagtacgtgaattgccaaaaatcccatataaataggactatttaccaatttatatgggcaagacattgtacatttttgtataaatataaatcaatgccacgattccaacctataggacttactatatgccccatttgttttcttttattttgaggaattggtatcttactaatggaatgtgttatttttttagaatgtgacattctaccacttttcaaagttatcatataaacttatctcaaattcatgaggtgagagatgaaaattgattttatagatttacatgctatttttccgatgttcaacttatagtacactcttctacttgcgccgctataataaaaacatattatataactatctttttcatataatttaggataatatagaaatatattacatatataaatatataaacttaattagttttgtctaaattataattattaaaatggaattcaattccaatgaaacaaagggggcctaaatgatgtttctgtcttttgtcccgtgaaatgttgtgtacgtctctcatccctacgttttccgtacagttgaggctcgtttagagatgccattagataaatactcactgagtatcactatttcatactcatatctatgataaaaaataacctgtcgggtcactcatatccactagtgggtatgtatttaccatcatacccatacctatgtgggtataagttatccatcgggtcatccgtcctcataaaaattaaacatata

SEQ ID NO: 98210 - DNA, 303 bp, Zea Mays
atggtgctgaggcgggcgacaaccgaatgccccaagaaggttgcggggctgaaggatttggtgaacctactgacccagctgcgagagtttgccggaggccggttaaacaaaaatgcattatgtggcttcataattattttctctagatacggtaataagtatcctgatttgcaagacccaacaaataagaacattgtgaagtgtgatgagaagctgaagatcgtattattgggcaggtccaaagtgcaactgtctgaactcccaatgattgttaagctcaatttcccaaaattaccaaagtag

SEQ ID NO: 98211 - DNA, 2292 bp, Zea Mays
aaattccattctggtcccttccttgccttctccgcctccgcatccatccggtctccagttgtctcctcccgcctccttccggtcccctcccggcgcagcctctcccgccccctccagccaagcggaccctaggcggagccaccttccacgcttcccgaagctcgcccgtgaggggaggccaggatggcagcgacgtcggcgccgcccgcgagcgcccacgccaacggcaacggctccctcgtgggggtggcggcgccggtgggagcgcccaccaaccccatggcgacggctctgctcaccgaccagtaccagttctccatggcctacgcgtactggaaggccgggaagcacgccgaccgtgccgtgtttgacctgtactttaggaaaaatccatttggtggggaattcactgtttttgctggccttgaggagtgcatcaaatttattgcgaattttaagttcacagaacatgacatttctttcctgcaatcagtcatgccaatgtgtgagggtgcgttcttcaattatctcagggaagttgactgctctgatgtagaggtgtactccattcctgagggatcagtagtttttccaaaagtgcccttgatgagagttgagggtccagttgctgtggttcaacttctggagactccatttgtgaatcttatcaattatgcctctttggtaactactaatgctgcgcgtcatcgtcatgttgctggaaagtcaaaggttctgttagaatttggtttaagacgggcacagggacctgatggagcaataagtgcctcaaaatattgttttatgggaggttttgacgcaaccagtaatgttttggctgggaatttgtttggcataccacttcgtggaacacattctcatgcttttgttagctcatacatgagccttgatgagataccagacaaggccctcaagagcaaagatggctcaagactttgccaggattttgttagtttagtgcaagagtggcttcaaaagattcaggcagcaaattcattaggtggtgtatttggtgatacaaataaaagtgagctggctgcatttgcatcctacgcattggcttttccaagcaacttccttgctcttgtggacacatatgacgttatgcgaagtggtattccgaatttctgtgcagtggctctagcacttcatgacttagggtacaaggcatctggtattagattagattctggtgatctggcctatttgtccattgaagcacgaaaagtgtttagtgcagtagagaaggaatataatgtacctggttttgcaaagatgctcattactgctagcaacgacctgaatgaagaaacaattgatgccctcaacaaacagggtcatgaggttgatgcctttggaattggaacttaccttgtgacgtgttattcccaggctgctcttggctgtgtctttaagctagttgagataaataataaacctcgtattaagctttctgaggatgtggcaaaagtttccattccatgcaaaaagagatgcttcagactgtatgggaaagaaggctacccactggtagatatcatgattcgcgaaagtgaaccatcgcctaaggcaggagaaagaatcctctgccgccatccattcattgaatcaaagagagcatatgttgtcccccagcatgttgaggagcttctacagtgctattggcctgggacatcagataaacctagagcagagctgccctccttggagaagatcagaagccgctgcatgcagcagcttgaaatgctgcgcccggatcacatccggcggctaaatccaacgccctacaaggtgagcgtgagcaccaagctgtacgatttcatccaccgcctatggctgaacgaggcgccagtaggtgaactgcagtagatgatgatcatataaaagaagttttgggtcatctgcgatacagcagcaattcatcgaagaaaattagagctcttctgcacaacatcaacagttgagcccatggcaggattttgctccccaaattttcatctctagtcaccggtatagaggcaggttaatcaggttgtctagtttatacgtcccttaattggtgggatgctatacacatcatcatcagaaaagaaccgaaatcatatggagccaaaaatgttactaggtcgtccggtgtttgtgctcgacggtgtcacatttgtttttctagccgatcgtgcatatggtcatataaaacactgcactgttgattgtactgtttatatagtgaaatttgaaatgatagatgaaataggagatagaatgagtaaa

SEQ ID NO: 98212 - DNA, 549 bp, Zea Mays
aaaaaccacaccgcggcggcagctatataaaagccttcacctgacccgggcgctagggtttattcgctcctcccgcccgccgccgtcgccgcctcctctccccagcacccggagctcgcccgaccgccgctcaccatgatcatccccaagaagaaccgcaatgagatctgcaagtacctcttcaagggtatgtggttcttggtccactagactcgcagtagggtaacctgggctgattggttgtttcaccttctaggaggtgacaggtcttcaaattattttcgtattactaggagggagtgctcgtgtattattttgagttcacttttttggtccaatttcagcatctcacaaacttacgatctgatatataggcttgacacagcgagcattgtcaaatatttttgtgctccaaatttatttgccccctaaactatggattccttgttatacattcatctgcgttatgttcatgcgatttctgttagtttgatgtatttgctgctgcagagggcgtgctgtatgccaagaaggactacaacctggcga

SEQ ID NO: 98213 - DNA, 634 bp, Zea Mays
aaaaaccacaccgcggcggcagctatataaaagccttcacctgacccgggcgctagggtttattcgctcctcccgcccgccgccgtcgccgcctcctctccccagcacccggagctcgcccgaccgccgctcaccatgatcatccccaagaagaaccgcaatgagatctgcaagtacctcttcaaggagggcgtgctgtatgccaagaaggactacaacctggcgaagcacccgcagatcgatgtgcccaacctccaggtgatcaagctcatgcagagctttaagtccaaggagtatgttagggagaccttctcctggcagtactactactggtatctcaccaacgatggcattgagcacctacgcaactacctgaacctcccgtctgagatcgtgcctgccacgctcaagaagtctgccaagccacctggccgcccatttggctctggccctcctggtgaccgcccaaggggcccaggtcgttttgacggcgacaggccaaggtttggtgacagggatgggtaccgtggtggtcctcgtggtgctcctggtgactttggtggcgataagagtggagctcctgctgagttccagccatcattcaggaggcctcaaatgtggactggtaaagcaa

SEQ ID NO: 98214 - DNA, 1202 bp, Zea Mays
cgcggcggcagctatataaaagccttcacctgacccgggcgctagggtttattcgctcctcccgcccgccgccgtcgccgcctcctctccccagcacccggagctcgcccgaccgccgctcaccatgatcatccccaagaagaaccgcaatgagatctgcaagtacctcttcaaggagggcgtgctgtatgccaagaaggactacaacctggcgaagcacccgcagatcgatgtgcccaacctccaggtgatcaagctcatgcagagctttaagtccaaggagtatgttagggagaccttctcctggcagtactactactggtatctcaccaacgatggcattgagcacctacgcaactacctgaacctcccgtctgagatcgtgcctgccacgctcaagaagtctgccaagccacctggccgcccatttggctctggccctcctggtgaccgcccaaggtaaaagccttaaatcttgtggtgctgtggcatttttgttcatgtacttaacaaatgtgtctagtgatgatttcacatgtttgcttctcatgtctggtgatgattttagatggaaaagtacagtcaaatctgaagtagctttttgtgcacctctcatcttatgatgatagggttatctagtaaatggcttgttgctgggtgcttattatgcattttccaattatgtttttgtgcaatgcaacattatttctaatactgtagctcggggatattggagataaagccttttacatgtgtgctattatgaagctggttgttgcataagaaaaaaagattacatgtttattaaagaattctgtctttgctttatgtatttatactgagttgtaattggtttgctaaaatctgctctagaatgacacattttgcagtgtaaaggatattgttgtgaagaagacaatctaaatttatgtaagattgtatttgtgtgcttattacagtgtgttttaccgaggagcagattaaagttaaccaattaggtacaaatctttaagttttgaattgttgatactgttatttaatcttctctttcctgtaacttatgtaggggcccaggtcgttttgacggcgacaggccaaggtttggtgacagggatgggtaccgtggtggtcctcgtggtgctcctggtgactttggtggcgataagagtggagctcctgctgagttccagccatcattcagg

SEQ ID NO: 98215 - DNA, 748 bp, Zea Mays
ggcggcagctatataaaagccttcacctgacccgggcgctagggtttattcgctcctcccgcccgccgccgtcgccgcctcctctccccagcacccggagctcgcccgaccgccgctcaccatgatcatccccaagaagaaccgcaatgagatctgcaagtacctcttcaaggagggcgtgctgtatgccaagaaggactacaacctggcgaagcacccgcagatcgatgtgcccaacctccaggtgatcaagctcatgcagagctttaagtccaaggagtatgttagggagaccttctcctggcagtactactactggtatctcaccaacgatggcattgagcacctacgcaactacctgaacctcccgtctgagatcgtgcctgccacgctcaagaagtctgccaagccacctggccgcccatttggctctggccctcctggtgaccgcccaaggggcccaggtcgttttgacggcgacaggccaaggtttggtgacagggatgggtaccgtggtggtcctcgtggtgctcctggtgactttggtggcgataagagtggagctcctgctgagttccagccatcattcagggtaatcatactcagccgttgatggcatgcaattctattccttagttttgagcatactgaatggaaattcacttgcaattgtccatgtgttgtgcatataaataaacattgtgcaacttgaagcgaaattggtattgtgaaacaacatggtgcaatc

SEQ ID NO: 98216 - DNA, 185 bp, Zea Mays
cgttgtaaataaaaaaataaaacttaaaaggagaccaaattaacacatatataaatataaaaggaggaatggtacattgtggtgttcaattaaaaacaagcttcaatgatcgaatggacatgaaagagacacgtctgagggaaagaaaaaggctcgaccataatggtgagatctcggcgcaatgc

SEQ ID NO: 98217 - DNA, 1784 bp, Zea Mays
gtcgcggccgagtctcgcggagtggtgggcgccgcgagtgcacactacacaccactcctgcacttgtctatttctaccggccgctgacctgaccgaggggcacctccagctttctactctactacctgcaggagtgcaggctgcaggcgcacacgcaactcgcagccgaccacgccccccgcaggccgcgatgccgccgccgccgcagcagcagcccccgcaccggcacgccaagacggactcggaggtgacgtccagcatggcggcgtcgtccccgccgcgtgcggcctactacgtgcagtcgccgagccacgacgacggcgagaacaagacggccgcgtcctccttccactcgtcccctgcggcatccccgccgcggtcggcgtccaggcactcctcctcctcctcccgcttctccgccagcgcaaagggcaccgcctccggcgccggcggcggccggcgacgcggcagcgcgtgggcgaaggaggcggccatcgaggaggagggcctgctcggcgtggacgacggcagcggcggcgatggagacggccgcggcgggatccccaggcgggcgcgctacttgctcggcttcgcgggcgccttcctcggcctgttcctcctcttcgcgctcgtcctctggggcgccagccgcaaccagcgccccgtcgtggccctgcgcgccgtcacgttccaccgcttcgtcgtccaggccggcaccgacgcgtcgctcgtgcccaccgagatggcctcgctcaacgccaccgtcagcctcaccttccgcaacgtcggtaccttcttcggcgtccacgtctccgccgaccccgtcacgctccactacgcgcagctccagctcgcgtcgggcaacatgaagtacttctaccagccccggaggagccagcggagcctggcggtggcggtggtcggcgacaaggtgcccctgtacggcggcggggcggggctgagcagcaccccgacgacgctgccgccgccgaggaagcgcgcgccgccggtggtggtgccgccgccgcccgtgccgctgcggctggccgtgcgggtgcggtcgcgcgcgttcgtgctggggagcctggtcaagcccaagttctacagcgaggcgcagtgcagcgtcaccatggaccaggccaggctcggtaagccagtctccctcaacaaggcatgcacctacacacactagcttggctaggctacatacatacgcctgctgccgtgggtcgtctcgtcgccaccatgcatggtcgtcgcgtcgtgaactttgcccttcttcttgaacaacacacactctctctcagtctctctctcccttcgcttttctgcgtgcgtgcgtttgttggtcgcttgtcttgtacatagaaatttttagtttctggtgtacgtaggagagttttgagtgagatggaataagaatcaggcattatttccctcatacggcgtttccgattgcgtgacatgccgtggagggcatgtaaaatgtcggtgaaattcaatgcgcctgtttggtgaaattcaatgcgctcgaagcagacgtaagattctggtgaaatacacctaaaaattcacggccgcgcatgtaatatagcttcttcaggtgaagtttggaccccggccgacagtcaccgaccgcaagtgctcatccggtgaggtttgtcagttagattcaaatccactaccgttcatataaatccgattcttttttttagatctgacaaatgtaacacggagccttcgcaatgaatgaatgaatgattgaataaacaaataaataaaaa

SEQ ID NO: 98218 - DNA, 630 bp, Zea Mays
atgcggaacgcgagcgaacacgatggagtagggcgtgacggcgatgggccgcgccgcgtccacctcgaccgcctccagggcggggatgttccccgccgcgtcggtggccaacgccctgccgttcagcagcacgacctggctcgtcaggtcgccatccttgggggtgaggtggtactcgtgtctcacgacgcccgccgccgcctcgccgagcagcaggccgacgaggaagacgaagaggacgaggtcgaggtcgtggagaacgcgacgggcttgcttgtcctgttcccactcttcttctgctcgcgctcaagcatggaaccagaactctgggagcaatggaccttgaaggaagcaattgaaatcaataactctgttcctcaaggattgagcagttctatatttacaaagaggccagatattatttttaagtggctcgggccccatggtagtgattgtggtatagtgaatgtgaacatacctactaatggtgctgaaattggtggagcatttggtggagaaaaagcagctggtggtggacgagaagcagggagtgattcctggaagcagtacatgaggagggcgacttggagggaggtcctagaggtagtaagtcacttgtttactccatga

SEQ ID NO: 98219 - DNA, 1062 bp, Zea Mays
atggacgactggagaaagccttacatagtggccatcatcgtacgggtgatcatcaccggcatgttcgttatcaacaaggcagcaatggaccacggattcaacagcttcgtcttcgtcttctaccgccaggtagccgcgtctgtcctcatggtgcccatcgcagtccttctcgagaggagaaatgcaagatccatgtcgtccgtgttgctcttcaagatctttgtgtgcgccttgatcgggatcacagttagtagcaacctgtacaacgtgagcctgaagctgacgtcggcgacggtggtcgcagcatcgaccaacgccatacccgttatcactttctgcctggcgcttctattaaggatggaggaggtgaagctgaggagcgcgtcaggcatggccaagctgactggtgtggcgttgtgtctcgccggggtcttagtcatcgccttctacgccggggagctgctgagcgccgtcaaccatcaccatgccttcggtgctcctgctcccacccatgctgcctcttccaccgcagcggcgaaaacgatgacgggagccgcgtggatcaaggggacgttcatcacggtgctcgctaccctggcgtggtccctgtggctcgtcctgcagtgcttgttcagcgtggtgcaatcgttcttcgccgcagtggtagctgagagggacttgtcgatgtggaagctccggctagacgtcgccttgctcgcggtcctttactcggggtttgtggtggctggagtgaactactatctccaagcatggtgcatggagatgaggggccctgtcttcctcgccgcttggacgccactcagctttgccctaacagtattctgttcctccttctttctgggagagatggttcatctcggcagtctgctatggggtaaaagcagggaagcaaagaccgtgcagcgcaacatagaggcctccacggccgatggcgatgctcaagatgaggttcactgctgggaactagaaggggagaaggaaaatgaaggcagggaagagcgagagaatggagacttaagaacatgtgttcaacaagattga

SEQ ID NO: 98220 - DNA, 2874 bp, Zea Mays
acgaaacatcgaactgttctcacagatcactctcaaactttttcccattttctctcaaaaagaagaaacagcgaaatttgtaattctcagtgacgccaaccctgactccgtttgacgcggctccgatggtcaccgccggcgacctcgccgctgccgccaactcctgagacctcgtcgcgcctaggccctaggggcgtgagcttgcctccgccgcgatccgggtaccagtcctcgaggatgcagtaccagcacgctggcagtcgaagccgcatgccgccattcgcgcgcggcggcggcgcctacagccgcggacggaagcagttctacccgccgtctcccctcccgtcggcggcgctgtctctgccgctgcagaacaagtatgaggtgctcatggaggcaggccgcctcgctgccgagtacctgttggcgaagggcgtgctcccaccgggctccctgcagcaacgcagcgggacagtcgtccctggagggtggggccagcttcctcctccgcctccgctttccgtgactttggaagcccaagcttaccacggggccaggaatggccggcggcaggtcgatgatgagtgtggtattcgtaatgccagctcgcggcggaaccgtggtggtgactacagtagcagcaacagtagtaactacaatagaagggggaaaaggaaatttggggctgacaataggtattcagattgggcaaaggatagggggaggaacaggcggtattctgatatccggagttatgatgacgatgatgacaatggggctcctgggttcaaacgggagcgccgaagcagtggtgggattgacgaggttggcagtagggtgtcaggggtggctggggagggaccatcatcgaaggtggaggcgatgggggagtcggagctggaggatactgggtcaaaggctagttctaacagcaatgtccagcagaaagctgatgcttcgcaagaggcgaaggatgaaaatgaggcaagcaaaatgcaggagaatagtgtggtgtctaattcagatgtagtcgagcaagctttgaatggtgaagataatagcaacaatgattcttctgatggtgttcaagagttagagacaaaacatttgccagtatcctcaggtgaaaaggtctcagatgggaggcctgaagatagtggtgttctgaatggcaaggttgaagatggcagtacttcgcatgagaaggctgaagatgatacaacgtcagaagaggtctccattatggagaacaatttgcctaatgatgttggaaatttgctaaattattgtaattttgcaagagttccaacaagaccacgatcagtgcttgcaaacaggaatgttgaaccagctcaaaaagaaattgatgtgtccgaactggtcaatccagttactcctgaagaaatgtcccagatggcaattgatagagaagctaacaccaattccataactaatattgaggaaaacagtaaagacgagctcgttggtcaagaccaagaacgtgctgaagaaattaatatctgcaatcaagtggcggaatcaatggcattccatgaaaaggaaacacaaggtgaaactgaggaaatggaagagcagaagaacatccctcgacattatgaagttgaggataataatgagactaatgaactgtctcctacatttgcttcttgtcagaataacttcagtttgcaagtggaaaaaggaatacaaatctacaatttagataccccgccacaagatgaagtgttgattgatccacccgataaagggaagacagttgattcagagttatcacctaacatcaaagcagaagatgctgttacaatagaagaggaaaagcttggccagtctagctcatttaaaatacgtgatctcaacctggttggtagtccagaggttgccgacatgcgaggtgaccctcgtttaggccaaagcttcactgctagatgttcagtggacctacaagataatcaacaaattgaccttggaacagctcttggtaacaatccaaataatactgatacatgtaccccatttctgttggcaaacaaggcagttcaagttattgatatcgaagatgactcaccaattgaagctggtgcttgtgacacttcaaagtcaaaaggtgagatggtatattctagcatggagggctcgatgaaccctccggcaaacaacgatgctctacatggtatcccagatggttatagccttgcaatttcagattaccttggtgctgatatgtcatgctaccaatcaatacaaacagaacttcaaggtgggatgaacctaaatggttcagagggcataactgttatggatgattcaatatacagttctcttggtgacataggttttatggaggtttgggaccagcaacctcaagactatgagaagttcttctgaggcgctcgtatccctgaaactgttctggagttcgactgataaatagaccagttacacttgcataggcagaaataaaacacctgatcgtgcctataaactggaaacccgtatacttgtgcgccagcagcagctctttcacttgtatgttccaggccatgcatattggggcttttgtacgggtgcatcctacgcgaagcactttcccttctgtaataccagggtctgcgtcggcagctcaaagagcagatattcgtatgaaacagttctttgactccctgccttgcccgacagcggtgtaaaaagttgtcgtatagctgccacgtaattcaaaggaattgacctaagcacgacatagtattcgtctgaaacatgtcttcatttataaacagttctatattccgaaatagaattgtttatttgttatatctatgttcttgttgcgctgtaagttgtgtggtttgtggcttc

SEQ ID NO: 98221 - DNA, 1394 bp, Zea Mays
atgaagatccaacagagaacctgggcattttcaaatgatatctctgttgatattcgtcctgacataaactcatttgatcattttttaagcatgcgatacattgcaacagatagaccctggctgaaattatatggaataagagttcagcctgtgccaccattcagcagtttgagctacaaacctgatccagcgctcattcatcattgcctacctgatgaactaatgctcgagatttttacaagaatgagcccatatactttagggagggctgcatgtgtctgccgcaagtggaaatatactgcacgcaatcctactttgtggcgtgctgcatgcttgaaaacttggcagaggagtggaatggaggcaaactacatgatggttcggtcgttgtatgattcctcttggaggagaatgtggctacagagaccaagaatccgaattgatggtctctatgtgagcaggaacacatacattcatactggagttacagaatggcaattcaagaaaactgtcaatgtggtttgctactaccgttacttaagatttttcccgagcgggaagtttctctataagatctctccagataaagttaaagacgctgttaagtgcatgcatttccgggcatcaaaggctgattgtgtatttaaaggtgactacgtgctgtcagaggatggccagatagaaatggctctcctgtacccagggcatcggtacacgcttgtcaggatgcaccttaggcttaggggcaccacagttggtgcaaataacaggttggatgtactgaagattctaaccaccggagtgaatgcaactgagctgcaaaactggaaaggaagcatactagaactcgttgagggctgggaggaggatgagacgcatgacccggatgtgcctgccgtttcccacagcaggggtttgtcaccctttgtgtttgttccgtttgaggaggctgatacttcggtgttaaacctccccgtggagaagatggactactacgtccctgggtgagctcttcatgacgacgatggccattggagaatgagatgatgggtggtcatgttacaggttaaaatgatgatggccaacgatctccttccctctcagatcccttgctagagcaaatgtgtaaatacagtgttgttttgtttacacttttcggttggtcgcatgctgttgtatgacattatgtttgttgatacctggaaacaggttttattattgttggtgcttgaaaatggtgtgggaggaaactcactatcaaaaaaagtagagctaccctcctgaagtaatgtgggtctgtattattatagaaacaagcagtctatcgttgcgaactttttagtctgtatgtattttcgtattgtacagttaaaccttggcaccgtgcttcgttt

SEQ ID NO: 98222 - DNA, 1750 bp, Zea Mays
caggccgcaacccgcaaccgtggcaccctgcgcgcctcgaacaatctcgtttcgtactcccgtttcgtttctccccctcgctccccagccgcatctcgagcgcgctctcggcggccgtccacgtctcggtcccacgcgctgctcgcttgctcgccggcggggcgcgagggcggtggcctaggtcgtacccagcgaagcgcggcgtgccacgaggtgggggttggctcgggaccatcgagcctgtccggaattttttctggcgcgtgatttgccgctgagaaagcatcggaaaagggaacggggatttactctcagtagccgcgagctacccgccgtcccctggtcgattcagtgcaaatcctccaggtttctgggtcttaatggcttcctcagatatctctgttgatattcgtcctgacataaactcatttgatcattttttaagcatgcgatacattgcaacagatagaccctggctgaaattatatggaataagagttcagcctgtgccaccattcagcagtttgagctacaaacctgatccagcgctcattcatcattgcctacctgatgaactaatgctcgagatttttacaagaatgagcccatatactttagggagggctgcatgtgtctgccgcaagtggaaatatactgcacgcaatcctactttgtggcgtgctgcatgcttgaaaacttggcagaggagtggaatggaggcaaactacatgatggttcggtcgttgtatgattcctcttggaggagaatgtggctacagagaccaagaatccgaattgatggtctctatgtgagcaggaacacatacattcatactggagttacagaatggcaattcaagaaaactgtcaatgtggtttgctactaccgttacttaagatttttcccgagcgggaagtttctctataagatctctccagataaagttaaagacgctgttaagtgcatgcatttccgggcatcaaaggctgattgtgtatttaaaggtgactacgtgctgtcagaggatggccagatagaaatggctctcctgtacccagggcatcggtacacgcttgtcaggatgcaccttaggcttaggggcaccacagttggtgcaaataacaggttggatgtactgaagattctaaccaccggagtgaatgcaactgagctgcaaaactggaaaggaagcatactagaactcgttgagggctgggaggaggatgagacgcatgacccggatgtgcctgccgtttcccacagcaggggtttgtcaccctttgtgtttgttccgtttgaggaggctgatacttcggtgttaaacctccccgtggagaagatggactactacgtccctgggtgagctcttcatgacgacgatggccattggagaatgagatgatgggtggtcatgttacaggttaaaatgatgatggccaacgatctccttccctctcagatcccttgctagagcaaatgtgtaaatacagtgttgttttgtttacacttttcggttggtcgcatgctgttgtatgacattatgtttgttgatacctggaaacaggttttattattgttggtgcttgaaaatggtgtgggaggaaactcactatcaaaaaaagtagagctaccctcctgaagtaatgtgggtctgtattattatagaaacaagcagtctatcgttgcgaactttttagtctgtatgtattttcgtattgtacagttaaaccttggcaccgtgcttcgttt

SEQ ID NO: 98223 - DNA, 254 bp, Zea Mays
aacatacaagacctgacgcctgtagtcactcggagaatttactgaatagtaaaggcaaacgagtgctccatatgaataatggaatatttcataatttcataatacaaagacaacaacttgagaatggaagcacacaacttctgcttccatgccaaactgacaaagaaaacatggtagtttgtcggtaacattttcaaacagaagataatggaatcacagtcagtttgacgggaccagattcttattgatgccca

SEQ ID NO: 98224 - DNA, 183 bp, Zea Mays
tttttatttgatttatttgatatttctatgatggaagtattcaaagtgactaaaagctcgtcagtgactgaggaaacatagcatctatgctttccttggatttagaaactggaccttcatgggatcattacagaggccgagagacgagccttgtccttcaactacctgctcaccgtacccaaa

SEQ ID NO: 98225 - DNA, 965 bp, Zea Mays
agcaactcaaaccccaatcaatataacacaatccagaataacaactagtatagaacatcttgcaacagcatgcgccagatttaaaacgagattatcagcgttccgcgattatttaaccacctcagatcctatcaggattgcgagcgaattcataacagcccgcctaaaccataccaccagtccaccaccgcgtactaaaacgcaagtcacataatattaaattagccggaaggcgaaaaggaatcccataataataataaaatgtgccggaaggaaggagagacagaattcttagatcttgtcgatgtcctcgtcctcgaactggatgtagttgtagtcgccgttctcctcgccctcctcgggcccatcgacgtcgacgccctcgttgagcctgagcgtctcgggaagctccccgtaggccttgagcaggcgcgcctcgtcgttcatgtacttgaggatgacgtcggccttgtcgtcctggtagtcgcggaggccgacgaggacgatgtccccggccgcgatccacaccttcttgtgcatcttgccccggatatggcagaggcgacgcgtgccgtccacgcaggtggcctcgcaccgcccgttgccgagcatccgggtcacctgcgcatactcctgcccgtcttccttgaagacgagctcgcgcttgtcgtcgtcagcctcgttctttccacgcttccggttcttgcctcccttacccttgttcttcggcatcttcgcggaggacgagagcggtgtggcgaaaacctagcgcgagatcgaggtggggaaagggcgtgctgcgggccgcgtttcctgcggaacttttttagaagtgtgcggcggtgtttggtgaacgcgaggggaggaggtcttgagccgtatggttcgttggatctagggttcggcggcgtggaccgctcgcataggaagggcggtgtctgtttctggataagcagggcgcggtg

SEQ ID NO: 98226 - DNA, 1000 bp, Zea Mays
cctaagaaacaccctcccgcgcctactccactgactccagcgctctgtccgacggccgcagcgatgcccaaccccgccgcatccccggtaccggtgcccggcgccgccactcgccgccggcggaggaatatcctcccgtcgtcgtcgtcgtcgtcttcttcgtcgtcctcctcctcctccttctctgccacggcgatccgcacgtccgcctccggcgcctcctcctcgtcctcctccgccccgcccttctcgccggcgccctcgccgttccaccaccgcttcctctccccgctgcgcgcctccgcggtgcccttctcctgggagcaccgccccgggcatccccaagacgcccgcgcggcgcgccagcggcagcaaggccaagacgccggcggcgctgcccctcccgccctccctcctctccagcaaggtcagcgccgtcgacgggaccttctcctccgccgacggctacctcgtcgtcccgcccgacgccaaggcgaggcggcggcgcaggcggccgccggcgctggccgcctctctcaccgactggctcgccgtgctcagcctctaccggtcgtgcacgcggtcccgcgactgcctcgcccgcacgccgccgctgcgcccccgcgctccggcgccggcgaaggcccgtctcgtcgatcggctcaccactcaccagtgagccaggtccgcgcgtgtccggtgctcccggtccttcgccgggtgttgcggttgcggattgagaatgtgagtaggattaatcacgcctggctagctttgacactgtaattaaggtggtttcccccgccccatgtttgttccagccaataataattggttcatccggacttgatgccgctgatgatagcctgctagtgatgcgtttgcatgccggtgaggtgagtaagcttgtctcaccgttaattaggttgtaagcttgttcgctgattggtgagtaagacacagttagtgtcaattatgaaaaagaccacttgcgacaaga

SEQ ID NO: 98227 - DNA, 1785 bp, Zea Mays
gctcacttcttgttacagctgatgcctgctcaccaaatgcgacaccgacacgccgccgccatgatgaacgtcgtggccatcgggctcatcctctccacgctggcagccgcgggggtctggtccccagcgccgcagccgaccgcggccccacatcatggcgaccgcatcgtccgggagggccgacgcgtggtaatcgtggagtacgagcgcgagctcccgctgtcgaccgatggcggcggcagcgtcaaggtcaaggagacgcgcgtcctgcccccggacgcactggacggcgtcgagggcgacggcggaacctttgatgaggccaggggcgtggtctcagacgcggccggcaaggtggccggtgcggcagaggaaggcaaggagagattgtccgacgccaaggagagcgccaagggcggtgtcctcggtaccgtcaagcggtgcaaggatagactctgcggcgccggcaggaaagtggaagagggagccaaggacgcggtgtcccgcgtcgaacacggcgcggaggacgcggcgaggggcgccatggaggcggtctcggatgccaaggacagcgccgagaacacggcgttcgacgccgtgcagaagggtaaggagacgatgaaaagcgccaaggacaaggcgtcggacgccgagcagcgagggaaggatgccgtaaggagcgcgaaggacaaggcgtccgacgctgcgcatcaggggaaggagacagtgaagagcgccaaggacaaggtctgcgaaactgccagcaaagcgaaggagagggcgtcaggcatccagcacggagcagccgaagcggcgaaggctgcaaaggagagggtgtctgcggcagccaagagcgccaaggacaccgtccagagcgccagggacagcgtctccgacatcgcccagagagccgaggagtgcgcggaggacaccgccgagcgcgcggcggacagggccgcggaggccgaggaggaagcgaaggcgagagcggccgaggtgggcaagaacctgaccgacatcgcgcggcgggcgcgcggcgtggcgtccgacgcggccgcgtacctcctgggcgcgccccgggaggccgcgcgcaccgcgacggccgtgatgcacctcctcggcttcgccaccgcctacggcgcctgcgtgtgggtgacgttcgtgtccagccacgtcctggccgcggcgctgccgcggcagcagctcggcgtggtgcagagcaagctgttcccggtgtacttccgcgccctggcgtacggcgtcgggctggcgctcgccgcgcacctgctggggcgcgagcgcgggtccctggcgtcgcgcgcgcagagcctcaacctgctcgccgcgctcggcctggtcctcgccaacatgctgctgctcgagccgaaagccaccagagtgatgtttgagaggatgaaagtggagaaggaagaaggccggggacgtgacatggcggacatcgtcgacccgcccgtggtcaccgtggccacgccgaccgctggcaccaccaccgtcccgacggcggcggccgcagcacgcacagctcccggggacggcgcggggacggggattggcaagcaatcgaagccggcgacggcaacagccgacgcggagatgtcgaagagccgggcggtgaggctgagcaggcggctgaagcagctcaacggctactcgtccctgtgcaacgtgctctgtctcatgtccctcacctggcacctcgtgcacctcgcgcgccgcctgcacgcgggcaccgcctgctaggttgatgatatgggtggcttcgtg

SEQ ID NO: 98228 - DNA, 1217 bp, Zea Mays
gcgataacgagcggcgccgcggcgggtcaggcagacgccacagcgctagcggcatagccggcgacagaaacaaccgatgccactcctcgccgtctgtccccgccgcgttccgccgctttcgctcgcgcgccgccaccgccgcagcttgtatcgggcccggtccctcgcgctcaaatgcgaggtctcctctcctccgctacttctgacccggaggatgtccgccgctggctcgctgcttgtcgctgtcgtccccgtccccgcgccgtcgccgcaactccccgtcgcctccgcgtcggagttggagacggagacggcggaaggagagagcggagcttctgaggggttagcattggagcgttacaccgaccaggagcagggcttcaccctcctcaagccggcctcctggcccaaggtggagaaggcgggcgcgacggcgctgtttcagcaggagggaaaagggagcaacaatattggggttgtcgtgaaccctgtccggctcaattcgctggcggagttcgggacgccgcagttcgttgcggacaggcttctgcaagcagagaagaaaaaggaaagtaccaagtctgccgaggtgatttcagtgggagagaggtcaggtcatggtggcttgacagtgtatgagatcgagtacacgctggacagcacaaggggagggatgaagcggatcttctcgggtgcgtttgtcgcttcaaggaagctctatctgctcaacatagcctattcagacacccaggagaagcccttggacagggagacaagaaccgttctggaaaaagttctccattcttttgattctgtataggtgatatttttttatagccgaggtatggcaccttttcttattttcggaatttctttcacttgaaaatacagtcgcaagtaattgtttgtttgtaaaatgagtgctgaccaaaatagctgcagtgtccatgtgtccaatactgttgcacttgcacctttatcagtgatttcaggttataagtaatttcagttcagataatgagcttcatcttctacagattggtagtatttgtgtcaccaggcagtaaaatgttgtgacctttgattcctagcctggcattactgcatctgtaatatcctggacaaagcgtggggtggtggcagtgttattccttgaaaaatctgtaacgcctattgaactccctaaagtttatctgaattccaggatcacttcattt

SEQ ID NO: 98229 - DNA, 2199 bp, Zea Mays
atataaattccacaccgctcgctgccgtgcccgcacctgtgctgtgcataacgaacgccagcaaacaaacagcgccgcaacccaccctatagcgcaggaggagaggagcccctcctcccgttcccataaatcccattcgcacggcgaggcgagacgaggcgagggcaactgggcctgggctgccggcagagcttggaccgctcgccatggccggcggcggggagagggagggcgcgcaggcgatggactccggcgagaagcgcctcaacgagctcggctacaagcaggagctccgcagggagatgacgctgttcaagacgctggccatctccttctccacgatgacgctcttcacggggatcacgccgctgtacgggagcagcctgcagtacgcggggccggcgccgctcgtctggggctgggtcgtcgtctccttcttcacctgcttcgtcggcgtcgccatggccgagatctgctcctccttcccgaccactggttctctgtatttctgggctgcacatttggcaggtccagtctggggtccgttggcgtcttggtgctgcgcttggctggaggccatcggcctcattgccgggattggcacacaggcatacgcaggatcccaggtactgcagagcatcatcctgctctgcaccggcaccaacatgggcggtggctacctggcccctcgctggctgttcctggtcatgtacatcgggctgacactgatctgggccgtgctcaacactttcgcgctcgaagtcatcgcgttcctcgacgtgatctccatgtggtggcaggtaggtaaccgctgccgcatctggattctggagaaccattcctcccgtggcggtggcgcgccgtgctcctgttcgttgcctagctttcggcttcagcggctgttcggtgcttgcttgcaggtgatcggtggcaccgtcattgtggtgatgctcccgctggtggccaagacgacgcagccggcgtcgtacgtgttcacccacttccagacggcgcccgacgtgacggggatcggcagcagcgcctacgccgtcgtcctgtccttcctggtcagccagtactcgctgtacgggtacgacgcggcggcgcacctgacggaggagaccaaaggcgccgacaagaacggacccatcgccatcctctccagcatcggcatcatctccgtgttcggctgggcgtacatcctggccctcaccttcagcatccaggtactttggtggtgactggtgaggctgctgtgctgatttctcctctcaaatgtcaaaacatgtcctttctttctttacctgcgcaggacttcagctacctgtacaacccgaacaacgagaccgccggcacgttcgtgccggcgcagatcctgtacgacgcgttccacgggcggtacaacagctcggccggcgccatcgtgctgctgttcgtcatctggggctccttcttcttcggcgggctgtccatcacgacgagcgcggcgcgggtggtgtacgcgctgtcgcgggaccagggcgtcccgctgtcgtcggtgtggcgccgtatccacccgcggcacaaggtgccggcgaacgcggtgtggctgtgcgcggcggtgtgcacgctgctgggcctgcccatcctgcgcatcaacgtggtgttcacggccatcacctccatcgccaccatcggctgggtgggcggctacgcggtgcccatcttcgcgcgcatggtgatgcgggaggacgacttccggccgggccccttctacctcggccgcgccagcaggcccgtctgcctcgtcgccttcctctggatctgctacacctgctccgtcttcctgctccccaccgtctaccccatcaagatggacaccttcaactacgcgcccatcgcgctcggcgtctgcctcggcctcatcatgctctggtggctgctcgacgcgcgcaagtggttcaaaggccccgtcaggaacatcgacgaccacaacaacggcaaggtctgaacacctacgcacgtcaagccaaggcctcaatcgactgacgccattctgtgctgtttgactccgggacttgggcgctgctgacaccgtctccctccctctcaccctctgtatgttttcgatgctgcatcagcagcacctgtggcctgtgggtgacaagtgacttacatggagaacagaggaaaaattgagcaaacacaaaaggaaaaaaa

SEQ ID NO: 98230 - DNA, 2539 bp, Zea Mays
atataaattccacaccgctcgctgccgtgcccgcacctgtgctgtgcataacgaacgccagcaaacaaacagcgccgcaacccaccctatagcgcaggaggagaggagcccctcctcccgttcccataaatcccattcgcacggcgaggcgagacgaggcgagggcaactgggcctgggctgccggcagagcttggaccgctcgccatggccggcggcggggagagggagggcgcgcaggcgatggactccggcgagaagcgcctcaacgagctcggctacaagcaggagctccgcagggagatgacgctgttcaagacgctggccatctccttctccacgatgacgctcttcacggggatcacgccgctgtacgggagcagcctgcagtacgcggggccggcgccgctcgtctggggctgggtcgtcgtctccttcttcacctgcttcgtcggcgtcgccatggccgagatctgctcctccttcccgaccactggttctctgtatttctgggctgcacatttggcaggtccagtctggggtccgttggcgtcttggtgctgcgcttggctggaggccatcggcctcattgccgggattggcacacaggcatacgcaggatcccaggtactgcagagcatcatcctgctctgcaccggcaccaacatgggcggtggctacctggcccctcgctggctgttcctggtcatgtacatcgggctgacactgatctgggccgtgctcaacactttcgcgctcgaagtcatcgcgttcctcgacgtgatctccatgtggtggcaggtgatcggtggcaccgtcattgtggtgatgctcccgctggtggccaagacgacgcagccggcgtcgtacgtgttcacccacttccagacggcgcccgacgtgacggggatcggcagcagcgcctacgccgtcgtcctgtccttcctggtcagccagtactcgctgtacgggtacgacgcggcggcgcacctgacggaggagaccaaaggcgccgacaagaacggacccatcgccatcctctccagcatcggcatcatctccgtgttcggctgggcgtacatcctggccctcaccttcagcatccaggacttcagctacctgtacaacccgaacaacgagaccgccggcacgttcgtgccggcgcagatcctgtacgacgcgttccacgggcggtacaacagctcggccggcgccatcgtgctgctgttcgtcatctggggctccttcttcttcggcgggctgtccatcacgacgagcgcggcgcgggtggtgtacgcgctgtcgcgggaccagggcgtcccgctgtcgtcggtgtggcgccgtatccacccgcggcacaaggtgccggcgaacgcggtgtggctgtgcgcggcggtgtgcacgctgctgggcctgcccatcctgcgcatcaacgtggtgttcacggccatcacctccatcgccaccatcggctgggtgggcggctacgcggtgcccatcttcgcgcgcatggtgatgcgggaggacgacttccggccgggccccttctacctcggccgcgccagcaggcccgtctgcctcgtcgccttcctctggatctgctacacctgctccgtcttcctgctccccaccgtctaccccatcaagatggacaccttcaactacgcgcccatcgcgctcggcgtctgcctcggcctcatcatgctctggtggctgctcgacgcgcgcaagtggttcaaaggccccgtcaggaacatcgacgaccacaacaacggcaaggtctgaacacctacgcacgtcaagccaaggcctcaatcgactgacgccattctgtgctgtttgactccgggacttgggcgctgctgacaccgtctccctccctctcaccctctgtatgttttcgatgctgcatcagcagcacctgtggcctgtgggtgacaagtgacttacatggagaacagaggaaaaattgagcaaacacaaaaggaaaaaaatgaatgaccagtatttaagttattttagatggaaacatgtgaaatatttaagtttttgcaacagaaaagttcataatacataaataaatctatacaaaactgattcaaatagctaaatatgtccagtatatttaacttccggtcttcaggctgaacctttattcttaacctacatgtatatttatttttacaagcctacaatggatacatatgcagttcaggaagctcctatgggaataaaattcttcggcactgctaggaggctcaacgtgctgtatacttatatatctattcagcacatacattatgtgcttgattaaaaaactgacattacctgtctgacactttcgatttcaattcacgatggagctgctggtcatgttcatcatggatatggctcaattcaggcggtgttaagtttttttgaactagttaggatgacataggatcccatattcttgggtcctttgatgtctacaatctacattagtgagctgttgcatattactcatgatatataaaatttaccttgtgttttttaaataa

SEQ ID NO: 98231 - DNA, 103 bp, Zea Mays
gagctctttgtattatagagagaagaaatggcctgtatgtattacccatgccaggaccatacatgagaaggttaaaaacactctacaaacagtcatgtaagcc

SEQ ID NO: 98232 - DNA, 474 bp, Zea Mays
atgaagaccgaggtgggcgtgaaagatgggaaaaaggcttgggcgtccatgtttttgaagctgctggccatggtgaggatgactggtgacgcatggtgcacagcatgtgtgcaccaagtatggagcgacccagcacgacatcccgagcgaagcgagcagaggtcgacgcaggtcaacgcagctgggaagaccaagcgtaggtcacggttggtacaggagttggacaccatggcgagttggagaccgacagaaagctcagcgcgcggcaaggaactcgacgtgcgcagagaaacagagactgagctaagctcgacatcggacaaaacactgcgcagtatggcgttcagctgcgcaagcacaaggagcgcgacgcagcggccatggaaggtgctgtttcgtacaagacctcggcttgggttgagcagtgagccggccatgggaaaaacctcggcgaggtcacggccagcgagctga

SEQ ID NO: 98233 - DNA, 1121 bp, Zea Mays
atgcattttttctttgtgatttttgctcataatgttggcatgagactggtggagctgataatatgctacagcagccagtcactgccacaacaatttatgggtcatatgtaccttgtgactagctgcattgcaatttctgggtcatctgtaccttgtgtccctagaaaggccacagtgctacaacagccaaaaggttggcatgatgctggtacctatgacaagaacattatcgagtggcccaagtgcagtggcgctaatggtagtttgagatttaaagtcgagttgaagcatggggccaatgctgatcttgtgaatgctctgaagctgatccaacctatcaaggacaagttttcaagtgttacctatgcagatctgtttcagcttgccagcgccatagctattgaggaagcaggtgtccccaaaatccctatgatctatggaagggttgacgttattgcccttgacaatgcccgccaaaggggaggcttcctgcttagaatcttagatgaacctacaattaaaggtatacctagcagtggatataggattgctgttgactcgtcttctaagcatggtgaagttgacgtatcacatgagcttgcatcaaccacattagcaatgaactatcagggcaatgatcatgattttgtacacacctttggtgtcgcatcgcctaataaagtgtccacaaacttgtgagcctttttccggttccagctgcagatcccacagtaggacctatagttctagcaaataagtctaaatggtcaccagagcaggggcaacgcagaatcaggcgcccattctatgttgctgaagtagaagcacatgtgcttgcagtcaaaaagcatggaacgggaagatatagtttcctatcccccctcattcgacctaacagaattccttggtttctatattctcactaaagcaaaaatatatgtctttgcatatattcgctacagacagttctttaatagaacaagctaggtttagtgtatttatattttatcaaagtccgtgttttttgtttatttatgtcacttttacaatcacgcttgtctttataattgcttctatttgattttattgtgaggtgtttgtgttaacttcgagagaacacc

SEQ ID NO: 98234 - DNA, 2037 bp, Zea Mays
gtgtccgcgtccaccgccgtctcaacggtgtccgcgatctccacccacattgctgcggggcacctcttcacggccatcgacgcccttccctcgtgctccgcctcctctccttgctcccgccctctttacgcctcgctcctccgcttggcaaagtcccgacgctccctcgccgccgcccgccgggtcgcctcccacctcgcctcctcctcgtcatcgtccccccccccccccccttccacctcggtctcgttcactccaacattcctcttcaaccgcgccatcgagtccctcgctgcctgcggcagtctcgccgacgcgcgggagatgttcgacgcaatgccacgccgggacggcggttcctggaacgccatcatctccgcctcgtcccgcgccgggcaccctgcagaggcgttctccctcttcgctgacatgaactctcttggcattcgccccaaggatttcacgctggcatcagtgcttgcctgctgtgctgctgagtgccttgacctgcgtggtgcacaggcagcacagcagctacatggtcatatcgtgtacgggaagtgcctctcgcttacggacgcaaggcgggcgtttgatgacatcctgcaacccaatgacgttttcatggaacataatcatccggaggtatcgtcttgctggtatgggcgacatggcagttcatatgtttttcatgatgttacgggctggcgttaggcggccgctggtatatactgtcgcacatgcaatgcttgcttgccgggatagctgcgcacttaaagaagggaagtgcatacatagtttagttttgtgctccggcgagggtatgaccaccaccacatacatgtgcggagctctgttgtagacatgtatgccaagtgcggcgacattgatgcagcacaaaggctcttcaacctggccccaaagaaggatgtggtgatgtccacttcggttgtgtcagggtagagttggctgtttgtgggaggatcgctgatgcaaaactggtgtttgatggcatggaacaacacaatttggtgtcctggaatgctatgttgactggttatgtcaagcccatggatctggccggtgctttagatttgttccagcagatgaggcagaggagacgaaggagcttgatgtagttacactggcttctgtactcaatgcctgtacagggctgcttgaccttgggaaaggtgaggagctccatgcacttgtgaggttgtattccaaatgtggatgcctgaggactgcagaacgtcttcttctatttgaaatgggatcagagagagagagagagagagagagatactcctggaactcgatcatctcaggttacgaacgccactccatgagtgcggacgctctcagcatgccctacccctacgtgagatgcaatccgaggcaaaacctagccagtcaacgtttttcagctctgcccttgcagcctgtgcgaacatatttctgcttaagcatgggaagcacattcatgcatacatgatcagaaacaggaacgacattgacgatatactgcgaagtgcgctggttgatatgtattccaagtgtaggctgtttgattattccgcccgggtctttgagttagggtcatctaatgatgtcgtcctgtggaattctatgatctttgcatgcgcgtaccatagtgaaggtgactctggtttcgtgtatctgtgaggggcatgtcaggttgggaaggagttacttcactctgatgagtacaacagcatcgttccacggatcgaacaccatgaatgcatgatcgagctgttgggaaagcatatggatacatggttgagctagaggatttcgtggaccacatgccctttgagccaacaaccgccatgtggctcaggatctttgactgctgcagggaatatgggagcagaaaattaggggagagggctgcgcagcgcatcaatgatagcaaaccgtcatatttgttcagtccgctcctgtctacgaatgcagtggctgtgacgatgcagagcccatgtcattcttgctgaggctgacaaaactggt

SEQ ID NO: 98235 - DNA, 682 bp, Zea Mays
gcccccccccccccccccccctcaaatcaccaggtccaccaccacggcacgcccacgcccaccgatcgggctcccaggatgatggcggtcggtggaagacacgacaccgtatgccctcctgtcggcggatcgatcgacccagcgcgacaagggccggcgggggcgggagcagacgccgcggtggaggacaggatggacctgctgtgggaggacttcaacgaggagctggcgcgcggcctgtggccggagtcctcggactactcgtcggacgcggagtcggagcccgcggcggcccgcgggtgcgcccctgcgctgcgcccctcgtccagggccggcgcggcccggcactgccgccgccgcgccggcacgtgggtgctgctcatcaggatcttccggaggctcttcgtcatcgagaagaccgtcgccgcggccacggcgagggcgagctgacgcgacgcgagcgtgcttgcgcagccaatgcgagcccctcttcccacgcaggcaactggcgcctccagccctccatggatggtacggtgtgctgctgagcctaaagtgcgagctgcctcttcgaggaagaaccgtgcatgcatgcttcctatgcgaaaacgtacggtggctagtaaattatactgctgctccattagagtagagacacgttcttgacgctgcaaataaatag

SEQ ID NO: 98236 - DNA, 706 bp, Zea Mays
gttgtatcgttgctgcctattaataatggcatcagtaatggacagttcgggcgcaattatgttgacatcttgttaacagaagggggcagcctcacaatctgcttgatgccacaagatacttggtgtgacgggcctgcgccatcagttttcctgtctttttcttcctgaaatcgacagagacgacaccgactgacttgccggcacgcaacagctttccctcgacctctatttcctcctggacaatcaaccaaaaaagctaacagtgatgtccaaaaactttgtaaggaaccgtagcattgtgtaacaaagaaaaaagttgaaaaaaaatagaactaatttgacagtttgtcgccgccaagggcagtgcagagagaggactaacaaagtaaaaaggaggggctatgtgggcaaaagtgtaaataaagtagcaaatatttgaagcctatgcatagaaagtggcgttttaatgtgttgcacgtctaaagtggcgtttttttaagcctgcacttggcggtgtcaaattgccgattttcactaaccggagctggcttagtttttgtaacttccagtagaacaaccaaagaaccaacagcctatatacaatgtgacatctgacagtattatctaccgagatggttactgttatacctaccagaaaattttcgagatataaagtgatacaattctacactgttcaataatgtta

SEQ ID NO: 98237 - DNA, 103 bp, Zea Mays
attaacatttaaattagtgttcaggttcgaaatgagtttaaagcatcacgttttctcacttgctggtgcatttttcaaggattggatcgagaatgctccttgc

SEQ ID NO: 98238 - DNA, 1298 bp, Zea Mays
gaaccgattctcgcttaaacggacctcccaaactaccattcccagttcccacggcacgatggcctccgccgaaatccccaactccagccccgacgccaccaaccccgcccccgccgccgccgccgccaccggccccgacctctcctcttcgccgccgccgctcccgccgcgcaagcgccgcctttcgccttccccaccaccaacgcggtccgcgtcacgctctcggtccccccgctcccgctccccgcacggccgacgctcgcgcagccggagccgcagcccgcagcagtacccgaccgatggcaagcggcaacggcacaatggccttaccgtggatgcgtgccgcgatttcctgcgcgacaggtgcacccgctccgacctcgagtgcagatacgcgcaccctcacaactccgtttccatcgacctggacaataaggtgactgcgtgtgcggattctctgaggaacaattgcttccgggggatgacatgccgttactaccatccgcctccacatatccaggagcaattactgagatcagttggcgtggaagacccaaaggtgaagacgcagatctgcagagattttacacgtgggaagtgttcaagatcagcaaatgagtgccgattcttgcaccattcatctgttgaagatgttgcaattgtttgccaagacttcttgcgtggacagtgcaatcgcatagcatgtaggtactctcatgtagtagcacatccgatgccaccaatgaaccatgttcccatgccataccctgagatgctttacatgccaccaccaccaccaccaccccttggagtaccaatgatggggcctctgccttcacctcctataccatttgctgataatacgaacagagttgaagtttgtagggacttcttgaagaacatgtgcaatagagaatcctgccggtttgtgcaccctgagacacatacaacggcggtgaacgccaatgttgaagtatgccgtgattttaaacgaggagaatgcaatcgatctgcctgtcgctttttccatccacatacaagctgaagttttctgttgcctaaagtaaagtaaattatactttgtttccccccttttaatacaaatgactgccaaatacatatagatgaaagaatactcccttaggaacacctatttacagagttaactttgacttcaattccttgtggatcttgtgtctattcaaaccagctagagcaatatagagtttaagattggcaatttgtcatttgagtgaatcaacatattttttccaatgaaatgcaacttttatccgttc

SEQ ID NO: 98239 - DNA, 1295 bp, Zea Mays
gaaccgattctcgcttaaacggacctcccaaactaccattcccagttcccacggcacgatggcctccgccgaaatccccaactccagccccgacgccaccaaccccgcccccgccgccgccgccgccaccggccccgacctctcctcttcgccgccgccgctcccgccgcgcaagcgccgcctttcgccttccccaccaccaacgcggtccgcgtcacgctctcggtccccccgctcccgctccccgcacggccgacgctcgcgcagccggagccgcagcccgcagcagtacccgaccgatggcaagcggcaacggcacaatggccttaccgtggatgcgtgccgcgatttcctgcgcgacaggtgcacccgctccgacctcgagtgcagatacgcgcaccctcacaactccgtttccatcgacctggacaataaggtgactgcgtgtgcggattctctgaggaacaattgcttccgggggatgacatgccgttactaccatccgcctccacatatccaggagcaattactgagatcagttggcgtggaagacccaaaggtgaagacgatctgcagagattttacacgtgggaagtgttcaagatcagcaaatgagtgccgattcttgcaccattcatctgttgaagatgttgcaattgtttgccaagacttcttgcgtggacagtgcaatcgcatagcatgtaggtactctcatgtagtagcacatccgatgccaccaatgaaccatgttcccatgccataccctgagatgctttacatgccaccaccaccaccaccaccccttggagtaccaatgatggggcctctgccttcacctcctataccatttgctgataatacgaacagagttgaagtttgtagggacttcttgaagaacatgtgcaatagagaatcctgccggtttgtgcaccctgagacacatacaacggcggtgaacgccaatgttgaagtatgccgtgattttaaacgaggagaatgcaatcgatctgcctgtcgctttttccatccacatacaagctgaagttttctgttgcctaaagtaaagtaaattatactttgtttccccccttttaatacaaatgactgccaaatacatatagatgaaagaatactcccttaggaacacctatttacagagttaactttgacttcaattccttgtggatcttgtgtctattcaaaccagctagagcaatatagagtttaagattggcaatttgtcatttgagtgaatcaacatattttttccaatgaaatgcaacttttatccgttc

SEQ ID NO: 98240 - DNA, 1454 bp, Zea Mays
ttctcgcttaaacggacctcccaaactaccattcccagttcccacggcacgatggcctccgccgaaatccccaactccagccccgacgccaccaaccccgcccccgccgccgccgccgccaccggccccgacctctcctcttcgccgccgccgctcccgccgcgcaagcgccgcctttcgccttccccaccaccaacgcggtccgcgtcacgctctcggtccccccgctcccgctccccgcacggccgacgctcgcgcagccggagccgcagcccgcagcagtacccgaccgatggcaagcggcaacggcacaatggccttaccgtggatgcgtgccgcgatttcctgcgcgacaggtgcacccgctccgacctcgagtgcagatacgcgcaccctcacaactccgtttccatcgacctggacaataaggtgactgcgtgtgcggattctctgaggaacaattgcttccgggggatgacatgccgttactaccatccgcctccacatatccaggagcaattactgagatcagttggcgtggaagacccaaaggtgaagacgatctgcagagattttacacgtgggaagtgttcaagatcagcaaatgagtgccgattcttgcaccattcatctgttgaagatgttgcaattgtttgccaagacttcttgcgtggacagtgcaatcgcatagcatgtaggtactctcatgtagtagcacatccgatgccaccaatgaaccatgttcccatgccataccctgagatgctttacatgccaccaccaccaccaccaccccttggagtaccaatgatggggcctctgccttcacctcctataccatttgctgataatacgaacagagttgaagtttgtagggacttcttgaagaacatgtgcaatagagaatcctgccggtttgtgcaccctgagacacatacaacggcggtgaacgccaatgttgaagtatgccgtgattttaaacgaggagaatgcaatcgatctgcctgtcgctttttccatccacatacaagctgaagttttctgttgcctaaacttgagtgccctgcgccgctgctgctgctgctgccgccgccgccgcagccaccaattctgcttctgccaccaaagagctgctgcgctggctgttgtgttgctaaggtgccatagagcatggaagccgtagaaggtgctacgtaggcatggaataaaagatactatcgtcctgttatattcagatggttgcttgaacttgcttgactcaatgcttgagtggtacctcttcactatggggtctctctctccccctgtgtgtggttatgtatttgttgtcataaagatgattttgactccagctaatctggtgtctgcgctattggcttccctttagcgccacacgtttgttgtatggatacttttttttgagccaatgtttcgccacgctttgccgctgtttc

SEQ ID NO: 98241 - DNA, 1288 bp, Zea Mays
ttctcgcttaaacggacctcccaaactaccattcccagttcccacggcacgatggcctccgccgaaatccccaactccagccccgacgccaccaaccccgcccccgccgccgccgccgccaccggccccgacctctcctcttcgccgccgccgctcccgccgcgcaagcgccgcctttcgccttccccaccaccaacgcggtccgcgtcacgctctcggtccccccgctcccgctccccgcacggccgacgctcgcgcagccggagccgcagcccgcagcagtacccgaccgatggcaagcggcaacggcacaatggccttaccgtggatgcgtgccgcgatttcctgcgcgacaggtgcacccgctccgacctcgagtgcagatacgcgcaccctcacaactccgtttccatcgacctggacaataaggtgactgcgtgtgcggattctctgaggaacaattgcttccgggggatgacatgccgttactaccatccgcctccacatatccaggagcaattactgagatcagttggcgtggaagacccaaaggtgaagacgatctgcagagattttacacgtgggaagtgttcaagatcagcaaatgagtgccgattcttgcaccattcatctgttgaagatgttgcaattgtttgccaagacttcttgcgtggacagtgcaatcgcatagcatgtaggtactctcatgtagtagcacatccgatgccaccaatgaaccatgttcccatgccataccctgagatgctttacatgccaccaccaccaccaccaccccttggagtaccaatgatggggcctctgccttcacctcctataccatttgctgataatacgaacagagttgaagtttgtagggacttcttgaagaacatgtgcaatagagaatcctgccggtttgtgcaccctgagacacatacaacggcggtgaacgccaatgttgaagtatgccgtgattttaaacgaggagaatgcaatcgatctgcctgtcgctttttccatccacatacaagctgaagttttctgttgcctaaagaatacagtgccaggtaccaagctgattgaaacggcaaggtatctgaaaggttgggtgatgatgaggccttatgccaagcgtgccattctgttgctgctcgaatgcgtgcggtctacaggtaagcgattttaagggcatgtacaacggccatgtacaattggttttctatgtacaagagacatttaagaaactgtatcatacagtggagagttcttaaaatcagtcatatcagac

SEQ ID NO: 98242 - DNA, 403 bp, Zea Mays
ctgctagtttacaagctactatttatacgtttttattttctgcatttgtttgaccaggcggtgaacgccaatgttgaagtatgccgtgattttaaacgaggagaatgcaatcgatctgcctgtcgctttttccatccacatacaagctgaagttttctgttgcctaaagaatacagtgccaggtaccaagctgattgaaacggcaaggtatctgaaaggttgggtgatgatgaggccttatgccaagcgtgccattctgttgctgctcgaatgcgtgcggtctacaggtaagcgattttaagggcatgtacaacggccatgtacaattggttttctatgtacaagagacatttaagaaactgtatcatacagtggagagttcttaaaatcagtcatatcagac

SEQ ID NO: 98243 - DNA, 670 bp, Zea Mays
gtgcgatctccaggccgcagctgcttattccgtggcacgcacgcgacgcgacgatagtgaccaaaaaaatggctgccagcagtgccacggcgttggcggcggcgttgttcgaggccctggacacggacggcgacggcaaggtgtcggcgtcggagctgcgcggcagcgcggcggcggtggcgctggacgaggaggaagccgccgccgtgctcgcggcggcgggcgccgacggcgacggcctgctgggccgcgacgagttcctcaggatggcatgcgaggctgctgcggcggaccaggccgacgcggacgtcaggcggcgctgcctcagggctgcgttcgggatgttcgcggacggccagggccagcagggggcggcggggacgaaggagcaggagcgagagcagcgcatcacgccggcgagcctgcagcggatgctaggccggctgcaggtgggggcggagcagctgcccgtgggcctggacgagtgcagggccatgatttgcaggttcgatctcgatggggacggcgtcatttcgttcgaagagttcagggtcatgatgcatgatggcctcatgtgatacgtcttccttgttcatgctactgctatatattaccgcccgtccgccaccttcggtcacgtttcagtaaaatacttcattttttttcggac

SEQ ID NO: 98244 - DNA, 105 bp, Zea Mays
gtagtgattttccgatccaggcaatttgtcgagcgcttggggaatatcactcggctagcttcgtcttcactcgacgtttgggatttcttggggatgcacgaacga

SEQ ID NO: 98245 - DNA, 1789 bp, Zea Mays
ggaaggtgaagcagcgtctcccctcccggtcgccagtcgcgtcgaccccgagtcccgaccggtgcgcgcgcaggcgcacagccaggacacgaccgagcacggagcaacgtcgccctcccccagtagcgcagcccggccacgccctcatcgcccatcctgccgggccgcgtcgccgactcgccgccaattaccattcgcctctgcagacccgacacggcgcgcggctcctcgccgatttgttcccggcggctcatcagaaaggctgtctccttggggggatcgattactcgcgtggctcgcagttcgcacgatactcgggggttctgacttggttctaaacagcatctgcatcttctcgaccccccaggctttggatctggccttcgtctcagttcagcgagccgcgaagaacagccttgatttggtgccccaagtgatgtagtgtgagaggctaacttcttgagagcgcgatgagcagccagggattcggtgcggggagccccaagtccttccgctaccccagaggcggcgacttcgatctcgagtccgggtccccacgcaagggccgcaagcccaagaaccctcacctcgagacctcgatcgtcatgaggatccgctacttctacgaggcgcaccccgtggccgtcgccctcatcctcctctccttcgggctcagcgtgctcatcctcctctccgtgtacgagacccggttcaggacgatgaggagcgtcagtgcgtggtccagtgacggtggggattatccattgccaatgctccggaaccttgtcatggtggctgggcattcgatctatacgagctcaagatgcggggagaccgagagtgagaattcctggttcttggagccgtaccagaagcacgctggacaggcggccaccttcctggctcacatcaaggagggggtggggatcgcggcgagggatgagggggcactcctgttgttcagcggcggggagacgaggagagatgctggcccgaggagtgaggcacagagctactgggctattgccgagtcgaaaggatggttcggaaatgatgagggtgtaagaagccgagcactcaccgaggagcatgcacgagatagttttgaaaacctcctatttagtgtgtgccgtttcagagagctaactggaagatacccacagaacataactgttgttagctacgatttcaaggaggaacgttttgcacaactgcacagaaccgcactcggattcccggaaggaaggttcttcttctcaggtacaccagctacgccttctgcaagggaggctgctctgaaaggcgaagcagctgtccgagctcagttccttgaagacccgtatggatgtctaggatctcttcatgtaaagaggctgaagcgggacccgttccaccgaaccattccataccctgccggttgcccagagctgaagggtctgttctcctattgtggcccggtgccttactctgggcacctcccttggactgagtagtagtgtaatgtacatcagccttggatggagctccccactgccacttcacgatgtccagcagccttgcactgaccttgttctgaattgagggagagtatatgttacactatcaacatatggatttttaacctttttgtttcttctcgatgacttggctactgtctttactcacaattcaaacttgtgattttatttttacacgtactccgccttattctgtggtgcaatgcaaacagtgaagaacttcccctttgcagccgaagttaatgaaccttccctgtcagcagaacccgaac

SEQ ID NO: 98246 - DNA, 1843 bp, Zea Mays
cgcgtcgaccccgagtcccgaccggtgcgcgcgcaggcgcacagccaggacacgaccgagcacggagcaacgtcgccctcccccagtagcgcagcccggccacgccctcatcgcccatcctgccgggccgcgtcgccgactcgccgccaattaccattcgcctctgcagacccgacacggcgcgcggctcctcgccgatttgttcccggcggctcatcagaaaggtggggtctctagttccgagatcactggagcactctctcggttttaatccgtaatcgtgctgcttggcgccgatttctcatctccgcaggctgtctccttggggggatcgattactcgcgtggctcgcagttcgcacgatactcgggggttctgacttggttctaaacagcatctgcatcttctcgaccccccaggctttggatctggccttcgtctcagttcagcgagccgcgaagaacagccttgatttggtgccccaagtgatgtagtgtgagaggctaacttcttgagagcgcgatgagcagccagggattcggtgcggggagccccaagtccttccgctaccccagaggcggcgacttcgatctcgagtccgggtccccacgcaagggccgcaagcccaagaaccctcacctcgagacctcgatcgtcatgaggatccgctacttctacgaggcgcaccccgtggccgtcgccctcatcctcctctccttcgggctcagcgtgctcatcctcctctccgtgtacgagacccggttcaggacgatgaggagcgtcagtgcgtggtccagtgacggtggggattatccattgccaatgctccggaaccttgtcatggtggctgggcattcgatctatacgagctcaagatgcggggagaccgagagtgagaattcctggttcttggagccgtaccagaagcacgctggacaggcggccaccttcctggctcacatcaaggagggggtggggatcgcggcgagggatgagggggcactcctgttgttcagcggcggggagacgaggagagatgctggcccgaggagtgaggcacagagctactgggctattgccgagtcgaaaggatggttcggaaatgatgagggtgtaagaagccgagcactcaccgaggagcatgcacgagatagttttgaaaacctcctatttagtgtgtgccgtttcagagagctaactggaagatacccacagaacataactgttgttagctacgatttcaaggaggaacgttttgcacaactgcacagaaccgcactcggattcccggaaggaaggttcttcttctcaggtacaccagctacgccttctgcaagggaggctgctctgaaaggcgaagcagctgtccgagctcagttccttgaagacccgtatggatgtctaggatctcttcatgtaaagaggctgaagcgggacccgttccaccgaaccattccataccctgccggttgcccagagctgaagggtctgttctcctattgtggcccggtgccttactctgggcacctcccttggactgagtagtagtgtaatgtacatcagccttggatggagctccccactgccacttcacgatgtccagcagccttgcactgaccttgttctgaattgagggagagtatatgttacactatcaacatatggatttttaacctttttgtttcttctcgatgacttggctactgtctttactcacaattcaaacttgtgattttatttttacacgtactccgccttattctgtggtgcaatgcaaacagtgaagaacttcccctttgcagccgaagttaatgaaccttccctgtcagcagaacccgaacag

SEQ ID NO: 98247 - DNA, 1636 bp, Zea Mays
ccgagtcccgaccggtgcgcgcgcaggcgcacagccaggacacgaccgagcacggagcaacgtcgccctcccccagtagcgcagcccggccacgccctcatcgcccatcctgccgggccgcgtcgccgactcgccgccaattaccattcgcctctgcagacccgacacggcgcgcggctcctcgccgatttgttcccggcggctcatcagaaaggctttggatctggccttcgtctcagttcagcgagccgcgaagaacagccttgatttggtgccccaagtgatgtagtgtgagaggctaacttcttgagagcgcgatgagcagccagggattcggtgcggggagccccaagtccttccgctaccccagaggcggcgacttcgatctcgagtccgggtccccacgcaagggccgcaagcccaagaaccctcacctcgagacctcgatcgtcatgaggatccgctacttctacgaggcgcaccccgtggccgtcgccctcatcctcctctccttcgggctcagcgtgctcatcctcctctccgtgtacgagacccggttcaggacgatgaggagcgtcagtgcgtggtccagtgacggtggggattatccattgccaatgctccggaaccttgtcatggtggctgggcattcgatctatacgagctcaagatgcggggagaccgagagtgagaattcctggttcttggagccgtaccagaagcacgctggacaggcggccaccttcctggctcacatcaaggagggggtggggatcgcggcgagggatgagggggcactcctgttgttcagcggcggggagacgaggagagatgctggcccgaggagtgaggcacagagctactgggctattgccgagtcgaaaggatggttcggaaatgatgagggtgtaagaagccgagcactcaccgaggagcatgcacgagatagttttgaaaacctcctatttagtgtgtgccgtttcagagagctaactggaagatacccacagaacataactgttgttagctacgatttcaaggaggaacgttttgcacaactgcacagaaccgcactcggattcccggaaggaaggttcttcttctcaggtacaccagctacgccttctgcaagggaggctgctctgaaaggcgaagcagctgtccgagctcagttccttgaagacccgtatggatgtctaggatctcttcatgtaaagaggctgaagcgggacccgttccaccgaaccattccataccctgccggttgcccagagctgaagggtctgttctcctattgtggcccggtgccttactctgggcacctcccttggactgagtagtagtgtaatgtacatcagccttggatggagctccccactgccacttcacgatgtccagcagccttgcactgaccttgttctgaattgagggagagtatatgttacactatcaacatatggatttttaacctttttgtttcttctcgatgacttggctactgtctttactcacaattcaaacttgtgattttatttttacacgtactccgccttattctgtggtgcaatgcaaacagtgaagaacttcccctttgcagccgaagttaatgaaccttccctgtcagcagaacccgaac

SEQ ID NO: 98248 - DNA, 688 bp, Zea Mays
atggtgtcagcagcacagatcctggaactgtctaaagactataaggccaaattttacctacagaaacctgacagcacaaggatatctgttgacagtgataagagggctggaaaacatggattggatcagagcagaagcatttcgaacaatataagttgtagtgtgactggaggaaggaaccctaccttccaagttaaagatggagaggttggtcagcaagatgcaggtcatcagagtgcaagccatgttttccagatcaccgactactccagagtcacaggcctaccaaattttgtgcaaacctaccattacttgagtagtcttctcacagaacttttacatcaaagtgctgatttttgtccaggatcaagttctggggaggtcaaaggggaattgatcactaacaaggtcattgcaggacctacaagccctctgtgtgtttttcctcgaaggcatgtgcaccatagaaaaaaaggccggtacgcaatgaatgtatttccccctctaacatagccaagacagatgtaaaagttaatgaaaaacaggaaatgtgctctttaagtgaacatttggaccatccacatcagcctgatgcatttgacggaggtgatgtgattgacctcatggagaattcatcaataatgacaaggcagagatctgaagtgaacaataaattgatgtctttacg

SEQ ID NO: 98249 - DNA, 261 bp, Zea Mays
atgtcgcaagctcatgggacagctcttgctgcatcaagctcactacgaggatgcaatctcagaaggaatgctagcagcaagcgtgcaagaccttctaagccaaggttggttgaagatgacttaggtttagatgacgaagaagatgaagcaagtcaagacccacatgacgatgctgatgtgacagattgtgaagatgctcctggccctaatggctccaacaatggagaggaccttgaggctgctgcaaacatccatgattaa

SEQ ID NO: 98250 - DNA, 1171 bp, Zea Mays
atggacatggaggactccggccagttcatgcagtgggcgatggctacgctgcagcacgatgaggaccaggcagtggactaccccatcgacgacggccgcggcggggctaccttcccctcgctccgagcgctccgcgaggcctcgtcgcaagctgcagaaatgatccaggaacctctcgccgccgcaaacagccgctgcggcggcgacgggggcaccgcagccgcaggcaataatatctcaggaaccgcgccaagaagaagcagcagtggtagtgccgtaatccagcccttgaggtggaattttggcgccggcgccgccgcaccgcctggccgcgacggcgtgcctgtgccagctgaggccgctgccacgggcagcctgctgccagatctggcgtacgggccaccgccgacgaggaagcaggccgtcttaaagagcgtgggatccatctacgcgcaggaccacatcatcgcggagaggaagcggcgggagaagatcaaccagcgcttcatcgagctctctaccgtcatccccggcctcaagaagatggacaaggccacgatcctttctgacgcgacgagatacgtgagggatctccaagaaaagatcaaggcgcatgaagacggcggcggcagtaacgaccggggcatcgtcgaatcctgggtgctcgtgaagaagccgtgcgtcgcagcgcccgacgaggatgctggctcctcgccgtcgtgggactcgtcggggacgacggcgccgtcgccggcgacgaatccgctcccggagatagaggcccggttcttgaacaagaacgtgacggtgaggatccactgcgtgggtgtcaagggcgtggtcgtgagggtgctggccgagttggaggagctccacctcagcatcatccacgccaatgtcgtgccattccacgcttgcactttgatcataaccatcacggcgaaggtggacgaaggcttcacagtcacggcggaggagatcgttggcagactcaagacttctgcatgcattaatgcgccagcaaagccgctgctgcaatagcgctgaagaaactgcatgaaataaactagttattgaattgaaaaaaatcctggggcgtgattaatctatgtatagtatttatatatgctcatatatgaacaaacggtatgaaaacgttctttttgaacaa

SEQ ID NO: 98251 - DNA, 164 bp, Zea Mays
acgagttcagcccacggagcaatggtgcatgggcaatttacccccatagtcaatggtggaaacaacaagattagtcaagtcattcagacagtgagtttacggcgctcagcttcctgctgtcactgctaaccggtaacttctactcggatgtcagcttttttttt

SEQ ID NO: 98252 - DNA, 2299 bp, Zea Mays
aacgcaactatccccacttcaccgcgcggaaaaaacaaagagattcccctttgctctacaggaagcgccgacgccgttgatggaattcggaaggaccaaagctgctgccgtagccctgatccccgaagcgaccttccgccggtccagtctgtccttctcggcctccgcgacgccgtggtcccgggaggtgtgggtcaacgcatccaaataacggctcttccagaggaaaacactgctgaatttctcagctggtgcctagtggtgggaaataaagctagggacccagcatccttgtgatagcaatcacatcattggtgttgttttttcagcttacgctgaaactagactgatcaagaaggcgaccagctgtcaaaatgcatagacagaagaacccaaactctgggtgggctgcgtttgatcgcaagcagcgcagtgcagatggcagtgggtatgaaggtgatgctgatccatttccgtctctctcaaattctggagcctctaatattgctagtagctccattacagaaaagaatgggctaaaacgaaagccctttgcttcagtggttcgcccttctgttgattctggagctgttagtactggatgcggaaataagaattctgctaatcacgtggacagcgggaatcacggtgcaatctctgcacctcttaataaagttaagatcttgaaagatgcacacagttgggccgacattcacttaattgaggatgtactagctgctgtgaataatgatgtcggacaagcatctgatttgttgaaagttatggactctcctgccttgcagactggagagggcagaacatctggccaactggctgatgtgatgaataaaacacacggatcaccatcagaaagtgctgcagcaggcaaagcaaatccagatagctcacagttgttgctgcccctgatgaactttccctctatacccttgcagcctgaattcgaagatattgatgatgaatacttcagctaccggaaagatgcattgaaaatgatgagggctgccacaaagcattcccagtctgccagtaatgcatttttgagagatgaccatgctgctgccaaggaactttctctcagagctcaggaagagcgggcagctgctgaaaagctaaataacaaggcagcggaagaaatttttcgccttaggaatagcaataatgacatctggaagatagacatgcatggtcttcatgcatcagaggctgtggcagtattggagaggcatctccacatgatagagttccagcaacctgggaataagtcagcctcatctgaggacttagctaagttggaatctgcatattctgaatcaaccactggttcaaacattgagcttgctgctgagaaggtggtcttacgccggcctaagcagtctatcttacatgtgatcacagggatgggtaaccatagcaaagggcaggcttcactacctgttgccgttaggggtttccttattgagaacgggtatcgatttgatgagctgaggcctggtgtttttgcggttcgtccaaaattccgccgcaggtgaacctgtggaagtttgtacaattgtaacatggtggtggcttggggtgattatgtgctctaaattttacactaaaatttaaggatcaaatcggattaggatcagactctatttttattatgaagtagatccttcggtacctccacggcatcaccgacttcgtccttctccttcatcgatttgcgaccgttgttctcgttttctacaccgataccgattagggtggttatcccgatacctgtcggttcactttcggttttgccgtctttcttagcgacaacctcgtctcttctggtcttcgaagcgacagcctgtcgtctcccgctccagcgccgagtcgacatggcttcgtcagctgctccagaagctacaatgttcgttgactcgaagcacttttgtctactgtgataacatcagcgtcatatacttctcctccaaccttatccagcatcagcgctcgaagcatgtcgatctcgacctacatttccttcgcgagtgggttgccgtcaaagatgtgcgggttctttatgtcccgactacttagtttgtcgacatcttcaccaagggcttccctgcgtcgatgttcgatgactttcagtccagtctcaacatctcccgtagctagagttttgactgtggttaatgtgtattcagtgtaatgggctatgtattcagtgtaatggggctttgtgtaatgggcttaggtccaacatctatattataaatttagcacacgaccttgataagggtta

SEQ ID NO: 98253 - DNA, 1785 bp, Zea Mays
gttgtgtggtttgcgagcgcagagcagttcgtggacgtggagccaggtggtctgctgcccgaagaagccacactacgctccacgcatcgcgtagacggcgtagttggctcgcgggaccccggagtcagcatcgcgccgctctctcccgaagctcgcgcgtctcctcggcgcccggagcgagcctgaggcgcgcggacaaacgatgtcctcgccggcggcggcgacgctgcacccttcccccaccttccttgcctccggccctcgctaccgccgccgcggacatccatcttcgaaggtcagcttccgaaggttggcgccacgattaaaggtcaatgcactttttggatggcctaggggggacacgacagcacgtgaactgatccctcctgctgaatcctatacgctctcagggtaggtgcaaaaccacgtgaggtgtctatatctgttgcttcttcaatcatggacattcctgctgcggattgggatgcctgtgcgtgtgatttagatgatcctggaaattttaaccctttccttacttatgcattcctctcaagcttagaagaatcaggttctgcggtcaaggaaactggctggttaccttttcatattgttgcacgggatgagaatggacatattataggtgttgttccactttaccttaaaagccattctaggggagagtttgtgtttgatcaatcatgggcagaagcttactacaactatggccttgaatactatccaaagctccagtcttgtgtgccttttactccagtaactggtcaaagaatattacttcgaaatacatcataccgtgatcaagtttttgacgcactagtcaaaggtttgatgagcctcactaccaagatgaatgtgtcatcattacatattacgtttccgtccgaaggtgaattcagtaaactgaaggatagtgggttgttacaaagaatcgggttgcaatatcactggagaaatcggaattacaagagttttgatgagtttctgatggatttgaagcagcctaaacggaagaatatcagacaagaacgtaaaaagattcctgcccaaaatttgcaaatgaagcgacttcgtggagacgaaataaagagcagacactgggacaccttctataaattctaccgtaacacaactgataatcattggggcagaccatacttgacaagggatttctttcacctcttgggagaaaagatgggggataatgtgatgcttatagttgctgaaaaagatgataaactagttgctggcgctcttaaccttattggaggtgatacactatttggccggttatggggatgcctgccagatgcttactttcccaatttgcattttgaagcttgctattatcaggcaattgaagcagccatagagttaaacctgagtaaggtggaggcaggtgctcagggagagcacaagatccagcgtggttacctcccagtgacaacttacagctgccactacttttcaaatcctggttttgcggcagctattggaaattatcttactcatgagacggctcaggttaagcatgctattaaggtccttcgtgattccggaccatacaaggaagacatactgaaagagttcgctgctcaacaagacgacgacctgtagaatacagaagggacttaaactatttgcatactgttttatagaactaacatcttctatgtagcaacagggatacaggtcgtccaaagtgttaccaaactacgaatcccacatttggacactgctaggactgtaaatatttaacattgtaacatc

SEQ ID NO: 98254 - DNA, 1886 bp, Zea Mays
gttgtgtggtttgcgagcgcagagcagttcgtggacgtggagccaggtggtctgctgcccgaagaagccacactacgctccacgcatcgcgtagacggcgtagttggctcgcgggaccccggagtcagcatcgcgccgctctctcccgaagctcgcgcgtctcctcggcgcccggagcgagcctgaggcgcgcggacaaacgatgtcctcgccggcggcggcgacgctgcacccttcccccaccttccttgcctccggccctcgctaccgccgccgcggacatccatcttcgaaggtcagcttccgaaggttggcgccacgattaaaggtcaatgcactttttggatggcctaggggggacacgacagcacgtgaactgatccctcctgctgaatcctatacgctctcagggtcagcctcagaggtaggtgcaaaaccacgtgaggtgtctatatctgttgcttcttcaatcatggacattcctgctgcggattgggatgcctgtgcgtgtgatttagatgatcctggaaattttaaccctttccttacttatgcattcctctcaagcttagaagaatcaggttctgcggtcaaggaaactggctggttaccttttcatattgttgcacgggatgagaatggacatattataggtgttgttccactttaccttaaaagccattctaggggagagtttgtgtttgatcaatcatgggcagaagcttactacaactatggccttgaatactatccaaagctccagtcttgtgtgccttttactccagtaactggtcaaagaatattacttcgaaatacatcataccgtgatcaagtttttgacgcactagtcaaaggtttgatgagcctcactaccaagatgaatgtgtcatcattacatattacgtttccgtccgaaggtgaattcagtaaactgaaggatagtgggttgttacaaagaatcgggttgcaatatcactggagaaatcggaattacaagagttttgatgagtttctgatggatttgaagcagcctaaacggaagaatatcagacaagaacgtaaaaagattcctgcccaaaatttgcaaatgaagcgacttcgtggagacgaaataaagagcagacactgggacaccttctataaattctaccgtaacacaactgataatcattggggcagaccatacttgacaagggatttctttcacctcttgggagaaaagatgggggataatgtgatgcttatagttgctgaaaaagatgataaactagttgctggcgctcttaaccttattggaggtgatacactatttggccggttatggggatgcctgccagatgcttactttcccaatttgcattttgaagcttgctattatcaggcaattgaagcagccatagagttaaacctgagtaaggtggaggcaggtgctcagggagagcacaagatccagcgtggttacctcccagtgacaacttacagctgccactacttttcaaatcctggttttgcggcagctattggaaattatcttactcatgagacggctcaggttaagcatgctattaaggtccttcgtgattccggaccatacaaggaagacatactgaaagagttcgctgctcaacaagacgacgacctgtagaatacagaagggacttaaactatttgcatactgttttatagaactaacatcttctatgtagcaacagggatacaggtcgtccaaagtgttaccaaactacgaatcccacatttggacactgctaggactgtaaatatttaacattgtaacatcagtcttacggcgttgagttgggagctatagctatactcagttgtctcgctcttacttttccccaacagaaggacttgatgcttcctgt

SEQ ID NO: 98255 - DNA, 454 bp, Zea Mays
ccaagaaggaacacgacaggcaaccctagtacaagccaagacggctggacgcacttttatagagcaaaacacactctctcactctccctgcgatctggagcggtgacagcgagcaatgcttaaagattcttcgattgtgctccttccaaaggttccacatagtgtagatgaccagaccattgaactcccttttgcgattttgcggaaagagagtctccgtcttctcccaccactctctaatgctggagatgttgctcaaatccacctgttgttgctgcagggaaaagctttcctaagcaagaactgtgttccagacctcctgtgcgaaggggcaggttaggcataaatggagtcctgattctataggtccattgcatagggcgcaagacggttggtgtggccatccacggcgtgctaggttgtctgtcgtgaggagtttattttggatgagaac

SEQ ID NO: 98256 - DNA, 453 bp, Zea Mays
atggccaaacactcgcagccagacgacccagagccggggtgcctggccgagctagcaggcgtcccagagggagccgtgtggccagcacagggccacctccgccgcgtcgccgacgacgccggtggcccagcccggcgggtccaggagcatggcctccgccatctcggcccagaggctgggcgagtccaggtccagctcgaactcctcgtcgctcccgagctcgaccaccggcgccggcccggccccgaactcgtggtcgtggtcgtagtcgtggcaccgcgctgccgccgcctgctggagcagcagcagcgccgggtcgcagcgcacgcggtctgcggcctcggccgccgcggcgcggacgtcgcgcgcgtgcgaggtcgccgggcgcggcagccaggcgacgcagcccgggaagtacgggctgaaagaatcactacacatgtcaactattga

SEQ ID NO: 98257 - DNA, 356 bp, Zea Mays
tttttttgaagaggcggtttttaactttccagttcaaagtaaaaaagatttcaacaaagaggttagacttaggtcctacgataataggagagaagattggccgaagtgcctgcatggtgaggattgcttcgtgcagatgttcgttgaaggtggaattgatggaggccagcgtttcttcagatgtccttatgcatatgtaaaaattaatttctaatcctttgttctaaataattttgttgttcagtgaaactaactataaacatttatgcaacattcattggtcaaggagaattgtgggttcactcgttgggtagatcctcgtccgatttttccgcatggggaatacatatcctacc

SEQ ID NO: 98258 - DNA, 252 bp, Zea Mays
atggtggtgcttcacaggtgcaagtatgctcagatccatattgttgctgcccttgtcacagcaagaatgttggtcctccaacgtctccaccgcacccacagcagacaacaacaatgggaggatactatggagaagagtccacacaatttggaatgtgggagcactactagagaactcttatgtatcaattgctttcagcgtgttgattatctttatcaattgcttgaagtcgtcttcaacaattgcttttaa

SEQ ID NO: 98259 - DNA, 976 bp, Zea Mays
actagagagtgtgcgacacttattacacgcagctctgggttttgacagcccgcccgcccgcccgccgcgcctcccctcgtccagtggggagctgccacattcctctacccggatcaccttgcgtgtccggctggcacctgcggccttccccctccccgcgcgttgcattggctagctccggtccgatccatcctgctggttctggcttccatgagaccctgacctgaggcgcggtacgtacggtagcagcagcctggtcaattagttagctagcccgagccccatggacaggaggatggacaggctcctcgcctcctgtataccgggcatggaggcggcggaacgggaagacgaggggctggagctcagcctctcgctgcacccgttgccgtcgtcgccgcccaggttccaggcggtcttcgcctgctgctactgccccaggaagttccgcagctcgcaggcgctcggcggccaccagaacgcgcacaaggtgcagcgcaacctggcgaggcgaggccgggaggccgcctcggcgccagccgcgccgccgccggtagccgaccagggcatcagcagggcgtccggcagcgagagcgcgccgacgccgcgctccagggcggaccacccgggcgccgatgcgtggcaccaccgccgtcaacactacctttatccgcgcccggccccggcggggggtgcacaagcctcgtccggtgcatcgagggccggcggagaggacggggaggagattattgacctgtccctcaagctatgaacttatccatccatccatgagagctagctagcggcccagcactactagcagcagttcttctgatcctcttggttctcttccattagcttattgcttagtcgtttcttcatcacgtcatttattatttcttgtttgatgatctacggtacgcgtgtgctattccttgtctcagctttgtggactcgtatgatgcatgattgagat

SEQ ID NO: 98260 - DNA, 1715 bp, Zea Mays
atgtacgcggccaagcaccggggccacacatcgcagcagcacactatcggcgaggggatgatgggtggtaccgccaatggccacgggcaccggccggcgctttcgccgcgccaagctcaagatcctgctcgtcgtcattgccagcaacctcgtctgtgtccacctcttctccggcgcgtcgctgtccgtgcacattccggcgtccgcgccgcggatccacctgtgggactcggccgcgccgctgcggggcctgaacgccacgcgcgccgcgctcgccggggcccgcgcggagctcgcggcggtgcgggcgcagtgcaacgcgtcgtcgtacctgctcgagtccgtgctcgcgggccccggcaccgtgcacgggggcacgccggaggagattgcactctgcctgcgccatgaccgcgtccagggccatttccccgtcatcctgtgcctgccgtgcatgtcgcacgacgagccgagaaaaagctcgatcgtgcagctgcttagcatggcgggggaagcggatcagaggccatttatatttacaagtaatgcacagaaaaggttgcatgatttgacaacagaaaacctctctgtccagctcccagttctcgccatggtgatcatattctggcacaccaccagttcgtcgcgttcatcgctgaccgctgagccccaccggctgcctctcggcttccacgccaacttcggcaccgacgagctcttcccggggttgggattcgcattcgcctgccgcaacttccaggaggagctggcgcggtacatgacgtacaacgtcggtggcgagtgccccgaggatgacgcgctcgcgctgcaggtggcgctcaaggggtgcgagccgctgccccggcgctgctgcaggccgagggagccggcgaggtacgcggagcctgtggtccgtcggtccgtcccgccggacgccaccgtgcgctgggcgctgtacacgtgcaggaactacagctgcctcgtgaagcgcgcgcgcgccaggggcgggccatacttctgcaaggactgcttcgacctggaggggaaggagcggcggcggtggcaagccgacaacggcgtgctggacatggtgcgctccatgaacgtgctcagcgactgggtgcaccgtgcccgacgccgtgctcgagtcgacgctcttcgacatctactaccgggtgctcactgctcaggcccggcggcgtattatttctggctcgaccacttcttctgcctcgggccgcagctcaacacaacctacgtggctacgtgcccatcttcgaccgcgtcggcttccgccggctgcggtggaaggccggccggaagctcgacctcggcgccgagaggaacgagtgatttgctgccaagttttagctggccgtaaaatccttgtcactgccgttcgtttcatttagctgccatgtttctatatgaacatctatttataaaagggaataataggctaggtttaccacgaaagaatgtaaaattgcatcgaggagtgatatagaagggattggagtgtttgctgtggcaaataaggtatcaataaagtggcatacagagaattgcaccacaaatctttgatactaaggtttgctgtcggtgatgaaaaaaaactcatcgtcactgttcactgatgttatgtttggtccgatgctgacgagctttgcctgattgcctcccgactatttatcatcaacaatgacaaaaaaaaa

SEQ ID NO: 98261 - DNA, 516 bp, Zea Mays
atggagacacggacgcagaggggcagaagagaggtagacgagagacaagaggaagaggggttggacgttggaggcaccacgccgagcagatgcagtgcatctggcgcaactagtcatcggcgcccgtgcaagttgctgcgatggtgcgcgaatataatatgcgcgaaggcggagagggggagggggcttttgcgatgggatccaggcgggggcaggggttcattcgtctcccctggccgcaacccccgcccgacgcctgacctcagtctcggacgtgcttcacgctgccatttgctcgggtttttccacgcgccagccaggaggcccccaccgctgctcactcagcagcagcctgccatgccagctccggctaagcttcctactacttctacaatttttatctttatagactgcggctgcagtaccaacagccccttcttctttgttgccatcggcatcggctctgctgcccgcggttttcttaattctgccggaaatctaggggcgatgtactag

SEQ ID NO: 98262 - DNA, 843 bp, Zea Mays
atggccagagaaatagcagccacgagcaccagggcagggaaaaacttccttgcagcagaaagggaggtcgccgccatggaaagcaaagcagcagcggcggcagaaaatggagggagggcacctgaagtgagtatgattaccaatgtgcaatcatcaaatcaatggactaactttagggacaccaaagctaaccaaatgtttgatgattaccaagatatggagaagggtaagaagttaggctcgggcaggggctacatttcttggaatgatgatatggacaaggcacttcttgacacattcgtggagtactacaacaagggtgacatatgccaaaatgggtggaagtctcatgtctacccgactgctatcaagaatgtccgagaaaagtgcaatgtggaaatcacaaagacacatcatgtcaaggacagacatttgaaaagcacacactatcatcaatgcagccttgcggggatggacaagctccgacgagcaattattgaagcctcggtgcatcacttcgacagagacgaccacgaccccattccaagggatgttatgaagctccagcagacctgtgtttgcctcaatcgccaacgtagaagagtgccctcggcgacgcgcgagtccgcggccatggcttggcccgacgagcaatttgctggtgcaaatgttgttccagcaccgatgactgccactaccatcatcgcgacacccaggcgaggattccgagcgacggggcaaagcggcgccggattttatactgaggcacagtccgcgttcaaggaggccatggccgagaatctagccgacgtcgttgcccgagatccctggcggctccactag

SEQ ID NO: 98263 - DNA, 143 bp, Zea Mays
ccgcggttgggaactactaattcgttgggtctacaacaatcctggatgggctcctaacgagctaattttcactatttttgtttgtagttttcctgtgattctagacacgtgtttgaaattttgggtctttttttgtttaaacc

SEQ ID NO: 98264 - DNA, 1385 bp, Zea Mays
gggggggaggacagtagtagtggcccatcttcgtcgcagcgccggcgctccatctttcgctccatcccttactcgcgctcggcacaccggctctcagggcggcggcgctcaggctcgggctctcaagcgacggcgtcaacggcttcccctcccgcctccggtcctccgcacaccggccggtgaccctgctcttatggcggcgagcgcgggtgagagccagggggtggaaagactcctctcctatgctgaagatctcgtggctgtcctttgcgtcagcaccgactgcgacgacaatgcacaggtcggtgccggagtgcagaggctgctgtctgcctgtcgatccgagtctgacgatctcgagatgcagctcaaaggtggttttcatgagtaaacaagttagaagctagaccctcaaccctgtccaaacctgcaaatagtatcaggaaaaaatacactcctgcaaagaaaagattgacaaagcaaaggctgaaaccattactgacgatgaactcaatgcactacaaagcaagatggaagaaaaactgcaggaagagaagcagcttcgccaagagttaagagtgttacatgatgagcttgatgacctagaaagccaaagactttctataaaagaaagaaaggacgctgtcaagaagaaaaagaaagacacacagaaagcagaacgtacgctttccatgtgtctgtcggttacaaatatcatcccaaatttggaagaccaggataaggtttcaggatgtatcctttgaatctgttaccgtttcccctatattataggagaaaaaatatgtatgggttagtttgacaactccattttttcaagagatttctattttcctaaattagtaagggaaattagttaattttcccttatgaaaatgggaatcctttggaaaaatagagttgtcaaactagccctaaacgtttcaaaaaggaagtacatactatttgctgcttagtggttgtgtttgtactcaatatcatcgtttcgtacaaagatatggatgtgtggaagtccttagctttgatcagatattgtcgaccagaacaggaagaagatagagaagtttgaattcgagaacaccacgccaccagttgagatatgcgacgagctctggaagaagatttagcgtgtttcagatcattcttgttgtaaggcggcggaaacctgtgcctgtagattgccgcggtgtggttgtcctcccaggatgcagtttgccatgttgtttgtatcgttagttcatgacgctgtactgttttgtaaggcggcggaaacctgtgtttgtatcgttagtttgccatgtcagattagctactacttcttgtgttttaaattattccaaattataagttattctaattttcctgag

SEQ ID NO: 98265 - DNA, 1147 bp, Zea Mays
gggggggaggacagtagtagtggcccatcttcgtcgcagcgccggcgctccatctttcgctccatcccttactcgcgctcggcacaccggctctcagggcggcggcgctcaggctcgggctctcaagcgacggcgtcaacggcttcccctcccgcctccggtcctccgcacaccggccggtgaccctgctgaacagtcttatggcggcgagcgcgggtgagagccagggggtggaaagactcctctcctatgctgaagatctcgtggctgtcctttgcgtcagcaccgactgcgacgacaatgcacaggtcggtgccggagtgcagaggctgctgtctgcctgtcgatccgagtctgacgatctcgagatgcagctcaaagagtatcaggaaaaaatacactcctgcaaagaaaagattgacaaagcaaaggctgaaaccattactgacgatgaactcaatgcactacaaagcaagatggaagaaaaactgcaggaagagaagcagcttcgccaagagttaagagtgttacatgatgagcttgatgacctagaaagccaaagactttctataaaagaaagaaaggacgctgtcaagaagaaaaagaaagacacacagaaagcagaacgtacgctttccatgtgtctgtcggttacaaatatcatcccaaatttggaagaccaggataaggtttcaggatatattgtcgaccagaacaggaagaagatagagaagtttgaattcgagaacaccacgccaccagttgagatatgcgacgagctctggaagaagatttagcgtgtttcagatcattcttgttgtaaggcggcggaaacctgtgcctgtagattgccgcggtgtggttgtcctcccaggatgcagtttgccatgttgtttgtatcgttagttcatgacgctgtactgttttgtaaggcggcggaaacctgtgtttgtatcgttagtttgccatgtcagattagctactacttcttgtgttttaaattattccaaattataagttattctaattttcctgagagtcaaaccatcttaggtttaaagcatctcaagtttaaccaaatttatatagaaaattgccaaaaaagcatgacatcaaattggtatattacaaaaatataattaataaa

SEQ ID NO: 98266 - DNA, 1140 bp, Zea Mays
gggggggaggacagtagtagtggcccatcttcgtcgcagcgccggcgctccatctttcgctccatcccttactcgcgctcggcacaccggctctcagggcggcggcgctcaggctcgggctctcaagcgacggcgtcaacggcttcccctcccgcctccggtcctccgcacaccggccggtgaccctgctcttatggcggcgagcgcgggtgagagccagggggtggaaagactcctctcctatgctgaagatctcgtggctgtcctttgcgtcagcaccgactgcgacgacaatgcacaggtcggtgccggagtgcagaggctgctgtctgcctgtcgatccgagtctgacgatctcgagatgcagctcaaagagtatcaggaaaaaatacactcctgcaaagaaaagattgacaaagcaaaggctgaaaccattactgacgatgaactcaatgcactacaaagcaagatggaagaaaaactgcaggaagagaagcagcttcgccaagagttaagagtgttacatgatgagcttgatgacctagaaagccaaagactttctataaaagaaagaaaggacgctgtcaagaagaaaaagaaagacacacagaaagcagaacgtacgctttccatgtgtctgtcggttacaaatatcatcccaaatttggaagaccaggataaggtttcaggatatattgtcgaccagaacaggaagaagatagagaagtttgaattcgagaacaccacgccaccagttgagatatgcgacgagctctggaagaagatttagcgtgtttcagatcattcttgttgtaaggcggcggaaacctgtgcctgtagattgccgcggtgtggttgtcctcccaggatgcagtttgccatgttgtttgtatcgttagttcatgacgctgtactgttttgtaaggcggcggaaacctgtgtttgtatcgttagtttgccatgtcagattagctactacttcttgtgttttaaattattccaaattataagttattctaattttcctgagagtcaaaccatcttaggtttaaagcatctcaagtttaaccaaatttatatagaaaattgccaaaaaagcatgacatcaaattggtatattacaaaaatataattaataaa

SEQ ID NO: 98267 - DNA, 955 bp, Zea Mays
gggggggaggacagtagtagtggcccatcttcgtcgcagcgccggcgctccatctttcgctccatcccttactcgcgctcggcacaccggctctcagggcggcggcgctcaggctcgggctctcaagcgacggcgtcaacggcttcccctcccgcctccggtcctccgcacaccggccggtgaccctgcagtatcaggaaaaaatacactcctgcaaagaaaagattgacaaagcaaaggctgaaaccattactgacgatgaactcaatgcactacaaagcaagatggaagaaaaactgcaggaagagaagcagcttcgccaagagttaagagtgttacatgatgagcttgatgacctagaaagccaaagactttctataaaagaaagaaaggacgctgtcaagaagaaaaagaaagacacacagaaagcagaacgtacgctttccatgtgtctgtcggttacaaatatcatcccaaatttggaagaccaggataaggtttcaggatatattgtcgaccagaacaggaagaagatagagaagtttgaattcgagaacaccacgccaccagttgagatatgcgacgagctctggaagaagatttagcgtgtttcagatcattcttgttgtaaggcggcggaaacctgtgcctgtagattgccgcggtgtggttgtcctcccaggatgcagtttgccatgttgtttgtatcgttagttcatgacgctgtactgttttgtaaggcggcggaaacctgtgtttgtatcgttagtttgccatgtcagattagctactacttcttgtgttttaaattattccaaattataagttattctaattttcctgagagtcaaaccatcttaggtttaaagcatctcaagtttaaccaaatttatatagaaaattgccaaaaaagcatgacatcaaattggtatattacaaaaatataattaataaa

SEQ ID NO: 98268 - DNA, 769 bp, Zea Mays
acattcactcagtcttccactcttccccacccgacgcagcggctgtcgtcaagtcggagaagcctcggtggctcggccttgggcctcggcgcacctgttccttgctgctgccactgctgagaaacttattgtcctgctaagagatggacggaaactgcttggcaccctctgctcatttgatcagtttgcaaatgttgttcttcagggtgcttgtgaacgagtgattgtgggggaacaatattgtgatgttcctcttgggctgtacgtaatccggggagagaacgttgttttaatcggagaattggatcgcgaaaaggatgaactccctgctcacatgacctgtgtttcagaagcagaaataagaaaggctgaaaaggcagaacgggaagccagagatctgaaagggacgatgaggaaacggatggagttcctggacttcgattaacaccgtcaccgcggccgttgccgctccccattgtggcggaatctttagtggcggcctgtgtgccatacatgcctggtgaccgcgccggcgcaccttggattgctggagggtttagcgaacagtttctttttaactagcagtgctgttttatactctcgtggccacagaccctttgagcgcctcctgatacagctttgtcaccactctgatcattgcctcgatgaatttatatacctgacgttttggattggatctgcgccaaaacgccatttctatgcagagagtctgtactcttatagctgagacagatttttttcctttaaa

SEQ ID NO: 98269 - DNA, 1528 bp, Zea Mays
aatatttcgaatatctggttgtttgaaataagaaaaacgcaagcctaaaaggattaggatctcctcggttccccgcgtggccgcgtatcaagtacccaaaccctttcgatctgctcaactaccaaactctgctcctccctgcttccgtcacgcgagagcactccactcccacgcgaaccctagcagtggttctccctcggggccccgctaagcagcttggttccaagctgtagaagcatctccgatcccatccgcggcgggttgaggccatcagctccggtttctgcagccggatttgggatccgcgagatgtcttggtccgcgcccgacgacatcctcctctccacctccctcgccggcttcttggacagtgagtttatgagatcgccttctgagcttgtctagtttcctagatgctgatattggtccgtaggagccgatgcgcttagatttgatttttaggggggtcgtagatcccactggcctagttttctgcttgtggaagccgtgactctaagtcattgtgcgaatttcgtaccgacgattgccttctgtgagtgggttcggatcaaaagcatgcacattattatgtgactctgcaaatccttgtagcagttgttagtaggagaagagggaaggctcttactggttacgcagttatccatatttaatacaactcatttggttttggcgaaagatactatttttcctgtaactcagtcaaattttatcttgtgactgactgacttccttcaactttgtgaaaactttcatgggtttatctgtttatgcagatagatacatatttttgtgtgtgtgtgtacggtttgtgccaatatctgaatgctaccatgtgtctgtactgaatgggattgtcttatgtttgttgatggaaatgaggaaatcttacctggagttggttgtgcctcgtggaatatggaggcagagttctgagaaacttattgtcctgctaagagatggacggaaactgcttggcaccctctgctcatttgatcagtttgcaaatgttgttcttcagggtgcttgtgaacgagtgattgtgggggaacaatattgtgatgttcctcttgggctgtacgtaatccggggagagaacgttgttttaatcggagaattggatcgcgaaaaggatgaactccctgctcacatgacctgtgtttcagaagcagaaataagaaaggctgaaaaggcagaacgggaagccagagatctgaaagggacgatgaggaaacggatggagttcctggacttcgattaacaccgtcaccgcggccgttgccgctccccattgtggcggaatctttagtggcggcctgtgtgccatacatgcctggtgaccgcgccggcgcaccttggattgctggagggtttagcgaacagtttctttttaactagcagtgctgttttatactctcgtggccacagaccctttgagcgcctcctgatacagctttgtcaccactctgatcattgcctcgatgaatttatatacctgacgttttggatt

SEQ ID NO: 98270 - DNA, 1020 bp, Zea Mays
aatatttcgaatatctggttgtttgaaataagaaaaacgcaagcctaaaaggattaggatctcctcggttccccgcgtggccgcgtatcaagtacccaaaccctttcgatctgctcaactaccaaactctgctcctccctgcttccgtcacgcgagagcactccactcccacgcgaaccctagcagtggttctccctcggggccccgctaagcagcttggttccaagctgtagaagcatctccgatcccatccgcggcgggttgaggccatcagctccggtttctgcagccggatttgggatccgcgagatgtcttggtccgcgcccgacgacatcctcctctccacctccctcgccggcttcttggacaagaaacttattgtcctgctaagagatggacggaaactgcttggcaccctctgctcatttgatcagtttgcaaatgttgttcttcagggtgcttgtgaacgagtgattgtgggggaacaatattgtgatgttcctcttgggctgtacgtaatccggggagagaacgttgttttaatcggagaattggatcgcgaaaaggatgaactccctgctcacatgacctgtgtttcagaagcagaaataagaaaggctgaaaaggcagaacgggaagccagagatctgaaagggacgatgaggaaacggatggagttcctggacttcgattaacaccgtcaccgcggccgttgccgctccccattgtggcggaatctttagtggcggcctgtgtgccatacatgcctggtgaccgcgccggcgcaccttggattgctggagggtttagcgaacagtttctttttaactagcagtgctgttttatactctcgtggccacagaccctttgagcgcctcctgatacagctttgtcaccactctgatcattgcctcgatgaatttatatacctgacgttttggattggatctgcgccaaaacgccatttctatgcagagagtctgtactcttatagctgagacagatttttttcctttaaa

SEQ ID NO: 98271 - DNA, 1043 bp, Zea Mays
aatatttcgaatatctggttgtttgaaataagaaaaacgcaagcctaaaaggattaggatctcctcggttccccgcgtggccgcgtatcaagtacccaaaccctttcgatctgctcaactaccaaactctgctcctccctgcttccgtcacgcgagagcactccactcccacgcgaaccctagcagtggttctccctcggggccccgctaagcagcttggttccaagctgtagaagcatctccgatcccatccgcggcgggttgaggccatcagctccggtttctgcagccggatttgggatccgcgagatgtcttggtccgcgcccgacgacatcctcctctccacctccctcgccggcttcttggacaagaaacttattgtcctgctaagagatggacggaaactgcttggcaccctctgctcatttgatcagtttgcaaatgttgttcttcagggtgcttgtgaacgagtgattgtgggggaacaatattgtgatgttcctcttgggctgtacgtaatccggggagagaacgttgttttaatcggagaattgatctggtatattgcattgagcaggatcgcgaaaaggatgaactccctgctcacatgacctgtgtttcagaagcagaaataagaaaggctgaaaaggcagaacgggaagccagagatctgaaagggacgatgaggaaacggatggagttcctggacttcgattaacaccgtcaccgcggccgttgccgctccccattgtggcggaatctttagtggcggcctgtgtgccatacatgcctggtgaccgcgccggcgcaccttggattgctggagggtttagcgaacagtttctttttaactagcagtgctgttttatactctcgtggccacagaccctttgagcgcctcctgatacagctttgtcaccactctgatcattgcctcgatgaatttatatacctgacgttttggattggatctgcgccaaaacgccatttctatgcagagagtctgtactcttatagctgagacagatttttttcctttaaa

SEQ ID NO: 98272 - DNA, 951 bp, Zea Mays
aatatttcgaatatctggttgtttgaaataagaaaaacgcaagcctaaaaggattaggatctcctcggttccccgcgtggccgcgtatcaagtacccaaaccctttcgatctgctcaactaccaaactctgctcctccctgcttccgtcacgcgagagcactccactcccacgcgaaccctagcagtggttctccctcggggccccgctaagcagcttggttccaagctgtagaagcatctccgatcccatccgcggcgggttgaggccatcagctccggtttctgcagccggatttgggatccgcgagatgtcttggtccgcgcccgacgacatcctcctctccacctccctcgccggcttcttggacacaaatgttgttcttcagggtgcttgtgaacgagtgattgtgggggaacaatattgtgatgttcctcttgggctgtacgtaatccggggagagaacgttgttttaatcggagaattggatcgcgaaaaggatgaactccctgctcacatgacctgtgtttcagaagcagaaataagaaaggctgaaaaggcagaacgggaagccagagatctgaaagggacgatgaggaaacggatggagttcctggacttcgattaacaccgtcaccgcggccgttgccgctccccattgtggcggaatctttagtggcggcctgtgtgccatacatgcctggtgaccgcgccggcgcaccttggattgctggagggtttagcgaacagtttctttttaactagcagtgctgttttatactctcgtggccacagaccctttgagcgcctcctgatacagctttgtcaccactctgatcattgcctcgatgaatttatatacctgacgttttggattggatctgcgccaaaacgccatttctatgcagagagtctgtactcttatagctgagacagatttttttcctttaaa

SEQ ID NO: 98273 - DNA, 792 bp, Zea Mays
tcaagcaaaatggacaagagcgttcctgtagttagcaagatcttttgctcaggagctccaacaatgctgatgataaggaggagacctgctgtggtgaacggtggcggttttgttgttactgacctcagccatagcattgtgttcatcgtagatggttgtggaacacttggatccaagggagagcttatggtcaaagatggtgaaggagaaccaatactatccatctctaaaaagggaggaattgtccaggcgctaagcacaaggaacagatggaatgggtactccatggattaccaaggaaaaaacaagctggtttttagcctaactgatccgaaatcatgcacagcacaaggtgcgccggttagagttcatgttgaacccaagaggcaatgtaaaaagtgggatttcgaaattggtggatcttttgcagatagagactgtacgatagttgattgcaccagaaaaatagtagcccagatgggtaagaaagggctgatgggaggcaaggacttctaccatgtggaagtacagtcaggatatgaccaagctttcatcattggggtgatggcaattcttgacagcatacatggagaatccactagatgctgacagcatgaattaaagaatttgctcttgtttataagagtacattaatgtccgatagcattgatcttgcaacctactttcatcttcaagtaagaaacagacgcatgctggcggcatcataatgattgtatgacccacgttgaataacatagaccagctgatgatatgagcctgactttcggtgcc

SEQ ID NO: 98274 - DNA, 809 bp, Zea Mays
ataaaacatgtaaaacaacaacaaaatgtggtccaagctgctttttaaaagtagtgacagaaaagttgaacctcttttgttcagtttctacctttttaaagcagaagcttattcaaaaagttgaccaaacacaccatacatgtacaacaacgtagagcatacatgttccaatgttacataccggaacttaatactaattcaatatacaaggattgcaattttcatggattatgaacaaagtaactaaatgtgtacattgtactacagtcaccagaaatctggatcgactgggacatggatcgttggtgtctaaaaagtccaatgaagtcatatctcttaagcagcaaaaacagagaaaggatgggaagtgtcttgacatagtaattgaaattatgaagaatgttgctgccttaaattggacatcatttgaacaaacttaaaattaattctagttctgagaccaacttaaatcctcccaaaaagacgaaaattgtgatattggaggcccagtaaacaagcaaatgtgcaactttcatgaagaaatagaagtgcttcattgacttaataattccagttccaaagacagtttgtaagctcctcaacagattgtagattatgcttagaaaactagacagtattcagtgaatgctcagcacctggtttaaaattgcaatggcacaactgtacagtcaagcttgtgtagacataagctagcaaaaactgtatagtcaggcttgtgtagacatgaagaatgcacgccaatgtgcatactgcgtactcttttcctacaaaaaaaacctatgtgggta

SEQ ID NO: 98275 - DNA, 960 bp, Zea Mays
acacttcacacccccccattccccacttgcctccgccggcgcatccctaaaccccagtttagggtttctcgcgcggcgctacgctccgctccctcctccgctccccgcccgatcgcctcttcctctacctcctcgaagcttcgactgttccacacccccacccatatcaacccctttcccctttagctccttcccactgatacgctcgccgcgtgaagcattcgttagccgagccgccgcaaccatgtcgtcgttctggggtgtggaagtgaagcccgggaagccctacactctcacccatggcgacttcgccggccgcctgcgcctcacccaggcgacgctaggggttgaggtcggcaagggggagaaggctaccggcgtgaagaggtgtgtgctacagtgcagtgccgagaacagagatcccgtttttctttgcgtcctcatgccggagcagtcggagacatgccacctggagctagaatttgaggaggaagtcaccttctcagtgattgggccaaggagcatccacctcgctggatactacatgactgatgtgtgtggggaagataggggtgacagtgattctgggagcgattcacttcaaagttcagatgaggatggtttcttggaggaggacgatgatggtaacatgacagtgaagatgatgattcagagtctgatgatgaagagatggcatacaatcagggtaggggcaaaagttcagaagggattgaagaagcaaagccgtgaaaatggtgatgagtctcaactccagcttgctgcaagaaatccacctactgaatccttggaaagtgaagatgaagatggttttcctgtatcattttctgaatcaaagaagagttctgagattgtttcaaacaagaatgggggaaaagacaaggagactagcaacaaagacctgaaaagaaaaagtggagccattagcgaccgtggtgattc

SEQ ID NO: 98276 - DNA, 2097 bp, Zea Mays
acacttcacacccccccattccccacttgcctccgccggcgcatccctaaaccccagtttagggtttctcgcgcggcgctacgctccgctccctcctccgctccccgcccgatcgcctcttcctctacctcctcgaagcttcgactgttccacacccccacccatatcaacccctttcccctttagctccttcccactgatacgctcgccgcgtgaagcattcgttagccgagccgccgcaaccatgtcgtcgttctggggtgtggaagtgaagcccgggaagccctacactctcacccatggcgacttcgccggccgcctgcgcctcacccaggcgacgctaggggttgaggtcggcaagggggagaaggctaccggcgtgaagaggtgtgtgctacagtgcagtgccgagaacagagatcccgtttttctttgcgtcctcatgccggagcagtcggagacatgccacctggagctagaatttgaggaggaagtcaccttctcagtgattgggccaaggagcatccacctcgctggatactacatgactgatgtgtgtggggaagataggggtgacagtgattctgggagcgattcacttcaaagttcagatgaggatggtttcttggaggaggacgatgatggtaacatggttatgggatattcagacagtgaagatgatgattcagagtctgatgatgaagagatggcatacaatcagggtaggggcaaaagttcagttgttattgaggaaattgaagaggatgacaaggctgctgttgctgaagtgcagaagggattgaagaagcaaagccgtgaaaatggtgatgagtctcaactccagcttgctgcaagaaatccacctactgaatccttggaaagtgaagatgaagatggttttcctgtatcattttctgaatcaaagaagagttctgagattgtttcaaacaagaatgggggaaaagacaaggagactagcaacaaagacctgaaaagaaaaagtggagccattagcgaccgtggtgattcttcagggggggtaaaagctgagattgatggggcatcaaagaaaaagaaaaagggcaaggacaaaagcactgttatggacacaggaaaagtaaacaacgaagaaaaggaggttaagctacacgattctccagctgatcctgtcagtacaaaacagaagaaaaagaaaaacaagaacaaaagtgcttctgagggtgataccagtgagcaatctgctaagaacaacaatattgataaagacaatgaggaggcaagtgcgcaggaggccaataaaaagatcaagaaaaagaaggcacatgatataagcagaagtgaaagtcaggcaggaactggacttggtgagtcagatagcaaggaaccactccaaacacgaacgtttgccaatggtatgatgattcaggaggtagagatgggcaaacctgatggtaaaaaggccagccgtgggaagaaggtttctgttagatatattggcaagctaaagaatggcactattttcgactccaacgtcagtggaagaccttttgagtttagactaggtgttgggcaggttatcagtggctgggacgttggcgtcaatggtatgcgggttggggacaaaaggagactcaccattccaccttccatggggtatgggagcaaaagagtggggcagataccacagaactcaactctcatcttcgatgtggagctggtgaacgtaaaatgaagtgagaagatccacgagaaactgcggcagtttcacaaattttgctacgcatcattttccttgggcaatgctgtttcgtaggcataggggcatgttaagtggattcatctctgtcgctatcatactttcgaactgagtttcagaaggaaaaaaactgtggactgttgccatctgggataattcctgggctgcagcattcgccatccttctcccggttccttcagggtcattttgacgttcttgtgataccctcagaaccttttgaactgatgaaatggttaaggtggagtacgtgtacgacttcacgccgattggttttttttgtatcgtttgtgatcaagccaatcaaaactgagatcttgtct

SEQ ID NO: 98277 - DNA, 3066 bp, Zea Mays
cagtcggatacgatccgcgaatgcgagctgttttgaacggcgatttgtctttttgttctccagcgcgccagccaaccttaactgctacgatcgatcgaggggaggaagtttctggagctctagttctgcccatggcgtcggcgatggagctactggggagatcgttcgcgccgggccatgccgccgcggcgccgaggcggggaggcgggccctgcttcgcggcggtcggaagggaggggagtggtgcgcacaggaggagatcgtcgtcgtcgtcgtcgctgaggtcgactgcgccggtggacgcgctggccgagcgagtcgtggcgccgccggagagggccgaggcggtcccgccggagccgagcgtggccgcgcgggccgtggtcaccgtgcggcggagtcggaaaagggacgccaagtgccgggtcgccgagcggctggacgcgtgcgccgactgggtcggccgcagcgtcctcctcgagctcatcagcaccgagaccgacccaacggcgctggtgggctggtttggggagaaggacgtgaaggcggagcgggtggtgtacaccgccgacttcaacgtcgacgggtccttcggcgagccgggcgcggtcgccgtgctcaaccggcaccagcgcgagttcttcgtcgagagcatcgtggtggagggctttccctccggccccgcgcacttcacctgctactcgtgggtgcagcccacgcgcgtgcaccgcgacccgcgcgtgttcttcaccaacaagccgtacctgccggcgcagacgccgccggggctgcgggagctccgccgcctggagctcagcgacctgaggggcgagggcgctggcaccggcggcgagcgcaggaccaccgatcgggtgtgggagtacgacgtgtacaacgacctcggcaacccggacatgggcgccgagttcgcgcgcccgatcctcggcgggcgaccagcagctgccgtacccgcgccggatgcggacgggccggcctaagaccttcacaggcaagcctccgctttttcccccccccccccccccccccccagctcactacgaccgcgcggagagcagggtggagtacccggagcccatctacgtgtcccgggacgaggagttcgaggagggcaagaacgagatgctgtcggaaggcgcgctcaaggcgctgctccacaacttcatgccgctgctggtgagctccgtgtcgccggacttccgcgacttcgccggcttccacgacgtggacaacctcttcaaggagggcctcaggctaaagcaggccctgcaggaccagctgttccagaagatccccttcgtgcgcaaggtccaggagaacagcgagggcctcctccgctacgacacgcccgacatcatcaagagagacaagtttgcttggctgcgggacgacgagttcgcgaggcaggcgctggctggcattaaccccgtcaacatcgagcgccttcaggcgttcccgccgatgagcaagctggacccggccgtgtacggcccgccggagtcggccatcacggaggagcacatcatcgggaggctcgacggaatgtcggtgcagcaggcgctggaggacaaccggctgtacatgctggactaccacgacatcttcctgccgttcctggaccggatcaacgcgcaggacgggcggaaggcctacggcacgcgcacgctcttcttcctgacgggcgcgggcacgctgaagcccatcgcgatcgagctgcgcctcccgccgatgaccgacgggtgcgcgcgcgccaagcgggtgctcacgccgcccgccgacgccaccagcaactggctgtggcagctcgccaaggcgcacgtctgctccaacgacgcgggcgtccaccagctcatcaaccactggctgaggacgcacgcgtgcatggagccgttcatcatcgctgcgcaccggcagatgagcgcgatgcaccccatcttcaagctgctgaagccgcacatgcgctacacgctcaagatcaacgcgctggcgcggcagatcctcatcaacggcgacggcgtcatcgagtccgggttcacccctggccgctactgcatggagatgagctcgttcgcgtaccgggagctctggcggctcgaccaggagggcctccccgccgatctcatcagaagaggaatggccgtggaggacccgacgaagccgcacggtctgcggctgctcatcgaggactacccgtacgccaccgacgggctgctcctctggtcggccatcacgcggtggtgcggcgcctacgtggccacgtactacccgtcggacgagtcggtgcaggccgacaccgagctgcagtcgtggtacacggaggccgtgcagacggggcacgcggacaagcgcggcgcgccgtggtggccgcgcctgacgacgcccggggacctggcgtcgctgctcacgacgctgctgtggctgacctcggcgcagcacgcggcgctcaacttcgggcagtacccgctgggcggctacatcccgaaccggccgccgctgatgcggcggctggtgcccgccgagggggacccggagcacgcgcacctggtggccgacccgcaccgcttcttcctgtcggcgctgcccggcctgacgcaggccaccacgttcatgaccgtcatcgacacgctgtccacgcactccgccgacgagcagtacctcggggagcgccccgacgaggcgtggacggccgacccggccgcgctggcggccgagcgcgagttcgcggacgaggtgcgccgcgccgaggaggagatcggccggcgcaacaccgacgcgggccgccgcaaccgctgcggcgccggcgtgctgccctatgagctcatggcacccacgtccggcccgggcatcacctgccgcggcgtccccaacagtgtcaccatttagtcttctcgcttgggcggacagcggagatgatctcgaagcgaattttttccattcattgtaatcgggcggggagaaatctaaaagcagaagcaaatggttttgggaacgtatcctgtgagcacaggtcttccgtgcgcacgtgagcattttaattgggaacaattg

SEQ ID NO: 98278 - DNA, 402 bp, Zea Mays
atggggaggctggtaatggtaggataccaacagagaggtgttttaaagctcctaccgaagaacaatggtgctgtgatggagagtaatgattgcaaggtggatgaagacactggggacgataggatttcaatgaagaacactaaggtggttgatctgcaagccacatctggccatgtgctcaacaagcttgaaatgaagaagccaaaaggaggacccctcaacaaacataagcaggatctcaggaacaagataaaacatttgcttttagataatgggtggaaaattgacataaggcagaggaaaaacaaagattatgaagactcggtctatgtttctcctaacgagactgactattggtgcagttttccaagaacagtttcaaaatatgggtcactcatctaa

SEQ ID NO: 98279 - DNA, 1821 bp, Zea Mays
ggtatcttttgttttgttcgatttacatctcgcacagacttaatctaagaactaaatcttttgtgtagtcttttgtaacaaaaaaaaaagaattgagaaggaaaaatcattttctccaactgttgaccgatggccttatcctctccctctgattttactcacacaattagttcctacgcagttccccttcagcttgatttttttcagcctcatccttccatcgctctctctctaatattttcttttgtcgtgcgtcctggtatagctcgtgctggcttctcctcgccacggtctccaccagctgcatttttccaacgccttcccttggtctgatcctcaacgtgcttggacttttcaccagggaaaatatcccacagccaatctctatcctcgtcgctcgctgtagatttttctgccgtgatttttttcctgctcgcgcgcgtcttatcttctccagccgcggtgtccatctcccctgcgtccagcagagcttcagccttatcttccaccttgggcgtctgcttcaaatgctccggctcggacgcccatctcctttgctcccggtggtggatcttctacaattccccctacagcttcctccccggccccttgttttccccatggctggagcctcttccagccgtgtgccagtccccagctccttccctgcggcgcccgctcccttctctgcttcccctgcttgtttctatggcgcgcacccatatgctctgctcgctcgtcgccgtagcccctggtcccagctctggcgcgcctgcttcctggctcgcctgcgcgtgcgttaactccctctgcccaggcgccccctcactggatcccctccatttatgaccagcgccacttcctggtccaagctccctggttcttttccctgtgcgtccaggcgtcgaagctccctgcactcacctggcgctcgcccctgacctcccatggttgtctgccccagctcggcttggccctctgttcggcgtgtttgcccctgcagagtcggcccagcctccatttttccccagcccggatctccctgctcgccttgctcctccggcgccgcggttttctgctcgcttggccggccatggtggctgtgcatgcctcctggccatggacggttttggcccaggccaccgtcgcgcccagagaaatggtgcgcgtccctgcgcccggttttcgtttctgtggcgtcgatctgtgctccgtcctggccgtcttttctgcctccaatcttggcgccgtcgcgaagctctttgttcgtcgtcatcgctcggtcgcacaacaggctgattgcgtgacgtgtgtcgcacatcctaggtccttgtcgtcgggtttcgtgcgtgctcgcgtttaccgtcgagtcgtcgaactcgtcatcctctgctcaaactccacctcaccagctcgcttcaaacacgatctcgtcgtcaagcttcgccttagccttatctcgtcggtcacgctcgccagatgttcgatcaaggacttcagccgaaggatgtcatcgttcaggcaactaccaaatcgagttgtgatgtggtgagctgattcgctatttttactatcggttttatgatcgtaaaataagacgctacgtatgcgcatacgattaagttagaaataccagtaaggcgaggtgtgcttcgaggagtttagttgctgaatatattcgaactagttctattttgtataatatagtatttcggtgacacgtaggttaaatttagtattttaaaatgtctagacaataatatggttagtattactattgacgaattataattgtttgataaaattaaattggttcttggg

SEQ ID NO: 98280 - DNA, 2184 bp, Zea Mays
gcccgtaggaaaagcggagggggcagcgagcgggtgctgcataacctgcattcagtctcagggtaccattgcatcccactcggctccacctcgcggcccatatttgatatttcggctatggcagcaaccaggcagctccgggctccggccatggcatcaccaccaaggaatgtcggtaccaggactaccagcaacccggagatcccagagttcctggtgggcccggctggccggccggtgccggccgtggggctcggcacggcatcgttcccgttcgtggaggaaaacgtcaggaccgccgtcctcgcggcactggagctcggataccgccacctcgataccgcttcgctctaccgctccgaacgtgccgtcggcgacgccgtggccgaggcagcgcggcgcgggatcgtggcgtccagggaggaggtgttcgtgacgaccaagatgtggtgctcgcagtgccacccggatctcgtgctaccttccctcaaggagagcttgcagtaagcgcttgttgagcttaacttttttgctgcttctttttatttgctttcaaataggatggtaacgctctgcggttcaaatttcggttcttgaaaggactagcaacaacaattagatctgaatcttagaaactaaatgcttcgatttcagtctgccagttttgcatttgcagtagctccaagtaccaaatacactaaaatcagtgtttttttgtggcaatcaaggttcttatctcttcatctgtaggaaccttcaaatggattatgttgatttgtacctggttcattggccgatagctgcaaagcccggcaagccacagttcccgtttaaaagggaggacatcatgcccatggacctaataggtgtatggcgggcaatggaggaatgccaccggcttggccttgctaggatgattggtgtcagcaatttcacaacaaagaagctccaagagctactggccattgctaaaatccccccgtcagtaaatcaggtctgtgcagatcatatgagttaggtggtggcaatggcagtaagccagtaacctcagttagttgtgggtctttcaggttcttgtagtccttttcttaatgattgataagcatgatatactctatataaggccccctttggacattttcacgtttcatgcgtttttgttgtaaaaaacaaactgattcgtataaaatttctatacaaattaccgtgaaatttctactgcgcaaaagaccacaaaaggaagaacaggatgttttactgtatttatttttatcgaacatgcagaatagctgtgtgcctttcttttcatcaaagaagaaagagtgtcacatggatattaatattccatatgaatatagaacattagaacttgaaggttttttaatatgtaaatagtcatcattgaacgaaaagtgggtgttttaggggataattgtttcaaattaaaaataactttgtatattgtatatcctcaagtatacctacaccatacactgacatgtgagataaccttggcttgagcaggttgaaatgaatccaatttggcagcagaaaaggttagctgagttctgcaaagacaaaggtattcatttgactgcctattctccgctagcaggccaaagcacgtctaaggtcaatccagtaatgcagtctgaggttctgcaagaggttgcaaaggctagaggaaagtcagtggctcagatttcgctgaggtggatctacgagcaaggcgctagcgtggttgtcaagagtttcggaagggataggctcaaggagaacgtggaaatcttcgattgggaactgaccaatgaagacaggcgtaagattagtcagatacctcagcacaagagggtcacagtgttggggatcctcagcccagacggcgtctccagcgtggatcttgctgagcttgatattgttgaaatgtagcagaaatctccatctatcaggttgcaaggacaaaaaatggtgattggagtagctttcatacggctacgttgaatcagttgcttagatacggccatattgaatcaagaattagaagtagaggacgatctctctacttgtcgtccggacctcattttcttaaaatgtattttcaggtgtctgaccttgtcctgaaatgccatccaggccattactttttagaatgccatttttagatctgtttgatctagcttaaat

SEQ ID NO: 98281 - DNA, 1407 bp, Zea Mays
gcccgtaggaaaagcggagggggcagcgagcgggtgctgcataacctgcattcagtctcagggtaccattgcatcccactcggctccacctcgcggcccatatttgatatttcggctatggcagcaaccaggcagctccgggctccggccatggcatcaccaccaaggaatgtcggtaccaggactaccagcaacccggagatcccagagttcctggtgggcccggctggccggccggtgccggccgtggggctcggcacggcatcgttcccgttcgtggaggaaaacgtcaggaccgccgtcctcgcggcactggagctcggataccgccacctcgataccgcttcgctctaccgctccgaacgtgccgtcggcgacgccgtggccgaggcagcgcggcgcgggatcgtggcgtccagggaggaggtgttcgtgacgaccaagatgtggtgctcgcagtgccacccggatctcgtgctaccttccctcaaggagagcttgcagaaccttcaaatggattatgttgatttgtacctggttcattggccgatagctgcaaagcccggcaagccacagttcccgtttaaaagggaggacatcatgcccatggacctaataggtgtatggcgggcaatggaggaatgccaccggcttggccttgctaggatgattggtgtcagcaatttcacaacaaagaagctccaagagctactggccattgctaaaatccccccgtcagtaaatcaggttgaaatgaatccaatttggcagcagaaaaggttagctgagttctgcaaagacaaaggtattcatttgactgcctattctccgctagcaggccaaagcacgtctaaggtcaatccagtaatgcagtctgaggttctgcaagaggttgcaaaggctagaggaaagtcagtggctcagatttcgctgaggtggatctacgagcaaggcgctagcgtggttgtcaagagtttcggaagggataggctcaaggagaacgtggaaatcttcgattgggaactgaccaatgaagacaggcgtaagattagtcagatacctcagcacaagagggtcacagtgttggggatcctcagcccagacggcgtctccagcgtggatcttgctgagcttgatattgttgaaatgtagcagaaatctccatctatcaggttgcaaggacaaaaaatggtgattggagtagctttcatacggctacgttgaatcagttgcttagatacggccatattgaatcaagaattagaagtagaggacgatctctctacttgtcgtccggacctcattttcttaaaatgtattttcaggtgtctgaccttgtcctgaaatgccatccaggccattactttttagaatgccatttttagatctgtttgatctagcttaaat

SEQ ID NO: 98282 - DNA, 1541 bp, Zea Mays
gcccgtaggaaaagcggagggggcagcgagcgggtgctgcataacctgcattcagtctcagggtaccattgcatcccactcggctccacctcgcggcccatatttgatatttcggctatggcaggtacagtatatactatatagatattgaaaacccaactttgtgatcctattagtataatagtattcattctacgttggaatttgaaaactggggcaaaaggtcattgcgccgtcgtcgtcgtcgttcgcaagcagcaaccaggcagctccgggctccggccatggcatcaccaccaaggaatgtcggtaccaggactaccagcaacccggagatcccagagttcctggtgggcccggctggccggccggtgccggccgtggggctcggcacggcatcgttcccgttcgtggaggaaaacgtcaggaccgccgtcctcgcggcactggagctcggataccgccacctcgataccgcttcgctctaccgctccgaacgtgccgtcggcgacgccgtggccgaggcagcgcggcgcgggatcgtggcgtccagggaggaggtgttcgtgacgaccaagatgtggtgctcgcagtgccacccggatctcgtgctaccttccctcaaggagagcttgcagaaccttcaaatggattatgttgatttgtacctggttcattggccgatagctgcaaagcccggcaagccacagttcccgtttaaaagggaggacatcatgcccatggacctaataggtgtatggcgggcaatggaggaatgccaccggcttggccttgctaggatgattggtgtcagcaatttcacaacaaagaagctccaagagctactggccattgctaaaatccccccgtcagtaaatcaggttgaaatgaatccaatttggcagcagaaaaggttagctgagttctgcaaagacaaaggtattcatttgactgcctattctccgctagcaggccaaagcacgtctaaggtcaatccagtaatgcagtctgaggttctgcaagaggttgcaaaggctagaggaaagtcagtggctcagatttcgctgaggtggatctacgagcaaggcgctagcgtggttgtcaagagtttcggaagggataggctcaaggagaacgtggaaatcttcgattgggaactgaccaatgaagacaggcgtaagattagtcagatacctcagcacaagagggtcacagtgttggggatcctcagcccagacggcgtctccagcgtggatcttgctgagcttgatattgttgaaatgtagcagaaatctccatctatcaggttgcaaggacaaaaaatggtgattggagtagctttcatacggctacgttgaatcagttgcttagatacggccatattgaatcaagaattagaagtagaggacgatctctctacttgtcgtccggacctcattttcttaaaatgtattttcaggtgtctgaccttgtcctgaaatgccatccaggccattactttttagaatgccatttttagatctgtttgatctagcttaaat

SEQ ID NO: 98283 - DNA, 98 bp, Zea Mays
gagcaatttatgcaaacaaattacaatacatcttcagctatcgtaagtgtagctgcattgtattcatctggaagccagaatgcaagaagaaaaaaaaa

SEQ ID NO: 98284 - DNA, 1556 bp, Zea Mays
gaagtaccgagagctcacacgtcgcctgtccacataccagcacgggctcaaggctctggctcgcgcacccctgtccctccctgttccgcaccgcacacctagactagacgcacctccaactgcagcgcgccatacttgaccgcatcagcatggcatccacggggacgacggcggcggcggtgccggaggtgaccctgcggtcgggcaacggaaagccgatgccgatggtgggcatgggcacggcgtcgttccccgtggtgcacgaggccgtcagggacgccgtgctggcggccatcgaggtggggttccgccacttcgacacggccttcctgtacggcaccgagaagccgctcggcgacgccgtggccgaggcgctgcggcgcggcctcctgaggtcccgggaggagctcttcgtcacgtccaagctgtggtgttcgcagacccacgcggacctcgtgctgccgtccctgcgggaaactctcgagaacctgcagatggagtacgtggacctgtacctgatccactggccggtgtgcctcaggccggccggcgggccgcccaagttcccgaacaggaaggaggacgcggtgccgctggacgtggcgggcgtgtggcgcgccatggaggagtgccagcggctgggcctcgccagggcgatcggcgtcagcaacttcaccaccaggcacctggacaaggtcctggccatcgccgcggtcccgcccgcggtgaaccaggtggagctgaacccggcgtggcagcagcggacgctgcgggcgtactgcgccgaccggggcgtccacgtcgccgcctactcgccgctgggagggcagaactgggacgggcggggcaacgccgtgctcgactcggaggtgctcgcggagatagccagggcgagggggaagaccgtggcacaggtgagcgttacgctagctgccggctgcgtcttctggcgtgcggtagcagtgtcgtggacgtttgccccggccggtgaaggtttggttgatcacgcgttcgtcgtctactgtctggtctgccacaccattctattcagttttgcctttgtcttcccgtattaccaggtggcgctgcgatggatacatgagcagggagtgacgtgcatcgtcaagagctacaacagggagaggctgaagcagaacctcgagatattcgactgggagctgaccgatgacgaccggctcaagatcagccacatcccgcagaggaaggttgtcgaggccagcggcttgttctcgcaggagggtgagttcacgtccgttgatccagcggaactgaatattgtggaggaataggaactggactggaaaatggcccccgcctgtcggtgttgctccgtataggaacatacgaataataaggcaacgttcgccctcggtgtttcgggggtgtattccacgatgttttccatccccgttcagttcagtaaagattgtgatcgtataatattgaggacttctttggaacggtcgagctatagtacatggttccgtaaactttgtatgaattttctgatctaaataaagtggggttttacgaac

SEQ ID NO: 98285 - DNA, 1395 bp, Zea Mays
gaagtaccgagagctcacacgtcgcctgtccacataccagcacgggctcaaggctctggctcgcgcacccctgtccctccctgttccgcaccgcacacctagactagacgcacctccaactgcagcgcgccatacttgaccgcatcagcatggcatccacggggacgacggcggcggcggtgccggaggtgaccctgcggtcgggcaacggaaagccgatgccgatggtgggcatgggcacggcgtcgttccccgtggtgcacgaggccgtcagggacgccgtgctggcggccatcgaggtggggttccgccacttcgacacggccttcctgtacggcaccgagaagccgctcggcgacgccgtggccgaggcgctgcggcgcggcctcctgaggtcccgggaggagctcttcgtcacgtccaagctgtggtgttcgcagacccacgcggacctcgtgctgccgtccctgcgggaaactctcgagaacctgcagatggagtacgtggacctgtacctgatccactggccggtgtgcctcaggccggccggcgggccgcccaagttcccgaacaggaaggaggacgcggtgccgctggacgtggcgggcgtgtggcgcgccatggaggagtgccagcggctgggcctcgccagggcgatcggcgtcagcaacttcaccaccaggcacctggacaaggtcctggccatcgccgcggtcccgcccgcggtgaaccaggtggagctgaacccggcgtggcagcagcggacgctgcgggcgtactgcgccgaccggggcgtccacgtcgccgcctactcgccgctgggagggcagaactgggacgggcggggcaacgccgtgctcgactcggaggtgctcgcggagatagccagggcgagggggaagaccgtggcacaggtggcgctgcgatggatacatgagcagggagtgacgtgcatcgtcaagagctacaacagggagaggctgaagcagaacctcgagatattcgactgggagctgaccgatgacgaccggctcaagatcagccacatcccgcagaggaaggttgtcgaggccagcggcttgttctcgcaggagggtgagttcacgtccgttgatccagcggaactgaatattgtggaggaataggaactggactggaaaatggcccccgcctgtcggtgttgctccgtataggaacatacgaataataaggcaacgttcgccctcggtgtttcgggggtgtattccacgatgttttccatccccgttcagttcagtaaagattgtgatcgtataatattgaggacttctttggaacggtcgagctatagtacatggttccgtaaactttgtatgaattttctgatctaaataaagtggggttttacgaacaact

SEQ ID NO: 98286 - DNA, 501 bp, Zea Mays
atggcgccatgtctcccagccggcctcctctacccaacgccaccccttcctttccccaggcgcagaaagctctcccccacgcagtccagctccaggccagacccaattcgcccaacccctgctcgcccagagctttttcgccccaaatccggccatccctgccttgccgtggagttcctcgagcagccccacctggccaccatcctccccagccgaaccctttctccatggccgccaatcgtcctactcctttcccctggtgtgctcgacgcctggtgcttcgatctcgacggcttcccctgcgagcgacacctctgctcggctccctctccctgcagcgagctcctctgtcggcgccggcccacagcagcagggagcctcccatggtgtttgtttccccaacgctcgccccatcaatagccgtcgacctcgcgcagcagcagcgacgccctccgttgcgtcgcgctcgccaagtcgggcctcacgccgtcgctctgcgca

SEQ ID NO: 98287 - DNA, 3239 bp, Zea Mays
ttcacaaacccaccggaggcacagaaatttcccagcgaaggaaaaatccagtccgaaatccagcgctccaaatccgttcgtccccaaggcgctcccccgaacccgtcccgaatcccgcaaatccccgctgaaattccccaatcctccgtgctcgccgccgccctgcgaccggtcccgcccgcctcgtgtcggagccgctgccgcggatttccgcccgagggtttcgtctcgctctcgctctctccgccctactgccgccacagattggcgcgaccgacccttcatcgagggccttcttccgcccgcgaggccggggctcctcccgcggaaattcactctcgtccagaagcggcggcgctctcctcttcatcgccgcccccgcgctcttctggtactcgagtggcgtggggtggagatccaccagggcgtggatccattcctcttcgttcggtggtttttatccttcaggcgcggaatatcaatctatagaggtgcacgaggactttatatatccccatattttcgggggttcaactgaacccccatgccccacgctaagtccgcccctggtggtggtggactggattggtggacagtgctgattttgtcgcgggcatggagcgaagtgagccctcgctgaagccagaatggctgctgcggcccacagtacctgccacaacctataagccggcgactttgccccacacagatgatcacggcagaggtgcttcgtcaagaaaccgttcatcaggacgagatcgtgatcggagctcccaacattcctcatctcggagaggttcaagctctagtggtccaaggcggaatgatcgagatggtatagggaaatcaagaggctatggtaattttggaaagcacaacaaggaaaggatacaagagaaggacctggatttccgtgaccgggagagtaggttggttcagtcagacgatcctttacgtgatggctttgagtcatttagctcatgcagatccgaaaaggacaggcttaaccgtactcgttcaaaggtggccatatcaaatcgggcagtaggagtaagtttagacaatggtaatgtatctaaaaaagataatggtgtcatctcttttgagcgggaattcccacaccttgattctgaggacaaaaatggaaagcaagacataggtcgagttccatctcctggaattagcaccccaattcagaacataccactggtagtatctgatggctggaattcagtgcttgcgatgttaggggatccaaacattaactctgtttcctcttcctcaacacatgctggttctagtaaacagactgaagtttccaactctgggagtgcgttaagcatggctgaaacagtgatgcagtcgccattaaagatttctaccacacctcagttatcgattgatgcccagaagattgaagaaagaactatgaggcagtgcattctaagacctcttacaccatcatcaaacaaaatacctgcatctagttctttggataagttattaaaatccaaaggtgcaagagctggagagtctaatggtcctatcaaggttgctccacaactgtcaacacagccatctagcaactctgttcgcactccagtcaaaactgagctcgtaaagcaatctcaatcaggcagccttcaagtccttagtcgcgagcagaatggtgctgtaaatactgctgccaaagacagcaccagcaatcctgtgagccctgttctgggtcgatcttcttcaatggaaccgatgagaaagtctattgtcagcccaaagcttaaggttggcactaatggtcgttctttgcatccgctgcaaggttcatttgctgacagaaaagcaagtgcaaaagacaagtacaagttttttgagatgttgcggagtaagtctgtaaatggttcgagcgctgctattgagtctccatcaagcctgactgatgatcagcagaactctaatcttgatttgcctttcaagtttattgaaaatgggagcagttcctgtgaagaagcaaattcttgtgagggatcacagcgacacttgtcggacaatgagaccattccaccttcagaatctcatgatgttttagatgaaggatctctgggtattcaagttgaggacaaggatgtcagctcttcacaagtacttggtggcacacaagatttatcttctaagaagccccaggaagacaatgttaatattgtgcccatcgtacctgtctatgtaaatgatggtttaatgatgcccaattctgttgatgatgaagcaagtttgccgttagaggaaaccaatcctgccgaagtgttacagcacattggagcaggggaggagaatccctgtcctgctcaagagttcgagtccattggagcaggtggggaggaagagttgaacctcctaagatctatgggctgggatgagaacgaagatgttcagcctcttcagcaggaggagattgctgattgtctaaagcagaacgtcaggctgcagcagaagcttcaagaatgcaagggctgatcgcagaatcaatggagcaacgtcactgtgcctcaccacactgagggggtgtttgatacctgggctaaagtttagtccaggttttggatgccaaatgggaggactaaacatgagctgattataaaactaattacataaacagtggctaattcgcgaaacaaatctatttggcctaattagtctactattagcacttgtttactgtagcaaaacatgagctaattatagattaattatgcttgataaattgtctcgtgaattagcaaaaacctgtacaattagctctataattagatcatgttcagttctcctaattggcatccaaaacccagaccaaaccttagtcccggggatgatccaaacacatgtggagctgggttttgggaccttccggtcaaccgatcagagaatgattgtctagcttagcaaatggagagttttgtttttgttaatgcttgttcagcattgtggggggaggttccatggtagagctgataattttcccccattgataagaggttttagggtttttcttcctcattttcccagaaggaatacaccaaatagaagccttgtctggtgtcggaggcacgtagtgtgtgttgctctgaaagaagaataggttgcctttcttttggtcgccatctttttttcttttgaaaaggaagggaaaaataacgatcgagcttaacatggaaaaggtgcacaggaaataccttggtcttcaa

SEQ ID NO: 98288 - DNA, 1676 bp, Zea Mays
accaagcacacgcgacgcgcgctgtgccttctctctcgctgctgccgagctccagactccaaggcaaagcctacaaacacatggagccgtcgtcagcggcggcacggttgcttctgctggtggccgtggcggcggtggccgcggccagtggcgccaccacgggcgcgctggccgcgacgccgtcgccccgccccaaccccaagctcaggggcctgcgcgtgcgcctgacgcacgtggacgcgcacggcaactactcgaggctgcagctgctgcagcgggcggcgcgccggagccaccaccgcatgtcgcggctcgtggcgcgggccaccggcgcggcgtcgaccagcagcagcaaggcggccgccgccggggacgggtcaggaggaaaggacctccaggtgcctgtccacgcgggcaacggcgagttcctcatggacctgtcggtcggcacgcccgcgctgccgtacgcggccatcgtggacacgggcagcgacctggtgtggacgcagtgcaagccgtgcgtggagtgcttcaaccagaccacgcccgtgttcgacccggccgcgtcctccacctacgccgcgctgccgtgctccagcgccttgtgcgccgacctgcccacctccacctgcgcgtcctcgtcctcgtcgtcgtccgcgtccagcccgtgcggctacacctacacctacggcgacgcctcgtcgacgcagggcgtgctggccaccgagaccttcacgctggcgaggcagaaggtcccgggcgtcgcgttcggctgcggggacaccaacgagggcgacggcttcacgcagggcgccgggctcgtggggctcggccgcgggccgctctcgctcgtgtcccagctcggcatcgaccgcttctcctactgcctcacctccctcgacgacgccgccggccgcagcccgctcctcctgggctccgccgccggcatctcggcgagcgccgccaccgcgcccgcgcagaccaccccgctggtgaagaacccgagccagccgtccttctactacgtgtccctcacggggctcaccgtcggctccaccaggctcgcgctcccgagctcggccttcgcgatccaggacgacggcacgggcggcgtcatcgtcgactccggcacctccatcacgtacctggagctgcgcgcctaccgcgcgctgcggaaggcgttcgtggcgcacatgtcgctgcccacggtggacgcctccgagatcgggctggacctctgcttccagggccccgccggggccgtcgaccaggacgtgcaggtgcaggtgcccaagctggtgctccacttcgacggcggcgccgacctcgacctccccgccgagaactacatggtgctcgactccgcctccggcgcgctctgcctcacggtcatggcgtcgcggggcctctccattatcggcaacttccagcagcagaacttccagttcgtgtacgacgtcgccggggacacgctctcgttcgcgcccgcggagtgcaacaagttgtgacgtgtgccgcgccgtgccgggtgtacgtgtatgcgtgtaggcgaaggcgattcgtattggattggatgggccggttgggtcttcatgtgacgacgcccgggtggttaccggtcagcgatcaatatgttgacgtgcggagtatatatcatgttcatcgtcacgcgctgt

SEQ ID NO: 98289 - DNA, 495 bp, Zea Mays
atggcccgctcgaccacacccctgaccggatccgccctgcgcatgctcgccagaatcgccgtaggcactctctaccccgacgcccgccacccaaaccctagaagccccacccgcttccttgtcgcccccaaacgcagcggatccggtcgcggccacggcgggcggatccggccgaagatcctgccgcccccaaacgcagtggatccggtcgcggccacggcgggcggatccggaagcagggcgagggtccggcgtgaaaaggagccgacgaatccacctacccacattcgggctccagcgccaccccgtgccatcgggctgcgtccgctaaccacctctgggatggaggcggaggaaggcgtgatggcgacggacttcttctggtcgtacacggacgagctgcacgcgtcgcgccgccgggagatcctggccaagtacccgcagattaaggagctcttccgcccggatccgtgggccttcctcaaggtgttgtga

SEQ ID NO: 98290 - DNA, 521 bp, Zea Mays
caaaccctcaataagtatctgcgtccactttgttttaggagcaaggtgtaattatctgtattttccttttggtataacacatcaatcttttcttttattcgatttatggcagatcataatgcctagagagaacttgctgaaacatatgtttccttacaaatgtataagcaagctgcattttgttatgaggagctaatattagcccaaccaactattccactctagcatagcgattttacattgcttaatgtatttttatttttccgaataatctgttgtgcaatgtcaaatttcagaaaaaatagatgcaggtcatgacttctgatatactaccatctttgtttacttttctagctgattgttgaacttgcatcagttgttataattataacaaatttagtaaaaattattatctgagccattagtctacccttcaacatgtgtaggtatagttatgttcctttgtcattagctttagctaaaacgcagacaaatcacagttgcagttttgtgtgcttgta

SEQ ID NO: 98291 - DNA, 366 bp, Zea Mays
atgaccgacctgaagctgatcatcaagcgggcctacatttcctcccacgacgagtggttcatgaacgggataaattctttcaggtttttcatgacatataaaggcctgttgatggtcaccgatgacctcctcctgcaaggcctaagaaatgcaagtcgcttagtgcctttggtatggttcatgcagaggatggtgatgttgttgccgagggacaacaacagggaagctgacatgcgaacagtgagcgagagaacgaattctagagttgcctggttcagcatcctgtcattaggagtctgcgttgccatctctgtgctgcagctgtggcaccttcaagggttcttccggaagaagaagctcatttaa

SEQ ID NO: 98292 - DNA, 588 bp, Zea Mays
atggcgttgctctccgccacttcgcccgccaaggcgcacctctcggcgctcctctcctgccacgacgagccgcagcagcaccaacacgcgctcccggtcccgcacccgcgctgcttcggcggcggcaaggccaggcggcgcgcgcggggcaggtgcgcggcgtcaatgcggccgcccgacgcgtccgtcgctcccgcgtccgcgcccgcgggcgaggcgcggcggaagaagaagccccgggtgctggtggccggcggcggcatcggcgggctggtgttcgcgctggcggcgcggcgcaaggggtacgacgtgacggtgttcgagcgcgacatgagcgcggtgcgcggggagggccagtaccgcgggcccatccagatccagagcaacgcgctggccgcgctggaggccatcgacatgtccgtcgccgaggaggtcatgcgcgtcgggtgcgtcaccggcgaccgcatcaacggcctcgtcgacggcatgtccggctcctggtacgcccttctcctggctgcaacgttcacttccttcctctgtttctgcgtgcgctgtggttgcgtcgcgcctttgcatctgccgtga

SEQ ID NO: 98293 - DNA, 454 bp, Zea Mays
acatcaagtttgatacgtttactcctgcagctgagcgggggctcccggtcacaagggtcattagccgcatgacgctgcaacagatccttgctcgagcagttggcgatgacgctatattgaatggaagccatgtagtcgattttacagatgatggcagtaaggttactgccatattggaggacggtaggatatttgaaggtgaccttttggttggtgccgatggaatatggtcaaaggtgaggaagacactattcgggcactcagatgccacctattcaggttacacctgctacactggaattgcagattttgtgccgcctgatatcgatacggttgggtaccgggtatttctgggccacaaacagtacttcgtctcttcggatgtcggtgccggtaaaatgcaatggtatgcttttcacaaggaagaggctggtggcactgaccctgagaacgg

SEQ ID NO: 98294 - DNA, 1303 bp, Zea Mays
caaccttgtacttgtttctgtaggatggttaccagctggccgtagaactagagaatgcctggcaagagagtgtcaagactggaactcctatggacatagtttcctccttgagacgttatgagaaagagagaagggtgcgtgttgctgttatacatggactggcaagaatggcagcaatcatggctaccacctatagaccgtatttgggtgttggtctaggacctttatcgtttttgaccaagttgcggataccacaccctggaagggttggtggcagattcttcatcaagtatggaatgcctgctatgctgagctgggtgcttggtggcaatagctcaaagctagaaggaagacctttaagctgccgactttctgacaaggcacatgacgagctttatcggtggtttgacgatgacgatgcgctggaacaagctatgggtggagaatggtacctcttcgcaacaagtgaagcaaacaacaatagcttgcagcagcccattcgtttaattagggatgagcagaggtcactctctgttggcagccggtcagatgctaatgactcagcttcttccctatcattgccctttccacagatatcagaaaggcatgctactatcacgtgcaagaataaggctttctatctgactgatctcgggagtgaacatggtacctggattaccgacaatgaaggtagacgttaccgcgtgccaccaaacttcccggttcgtttccatccttccgatgtcattgagtttggttccgataagaaggctatgttccgggtgaaggtgctgaacacgctcccatacgaatcagcaagaagtgggaagcagcaggggctgcagcaagagcaagtcctccaggcagcatgaatggagacaccagtcaccatcccatcatcagcgacactgtactgtatagcaatcgggagatacacgatactccaacgcgtaaaaaagcgtaaaagatacgtcaaaacagatgtgatttttgcatccatgcagatgcgaaacaggattttgaatcctagcacctaacggatttaaatgatgaagtttcagttctacgagaggaactgagttgtacgatagggataacttagctgttgtcggactgtgtacattgttggtatcatcacccaaaatattgtacatctagaagccatattgtaattacggcacgtatacagtaacactttgatcatgtaatacagtatatagttgtttacggcacgtatactttgatcatgtaatacagtatatctggcgctgagtcagatagggtatgatttgttcttccacca

SEQ ID NO: 98295 - DNA, 408 bp, Zea Mays
gcgacgaagcgccccgggggttggacaacctggccgtacccagaagggtgatggtgtgcgtggccgagggggacgtcctttcgatggcgcgggaagctgtacgcagaggcggtggcgcgggcgaggggcaccgaaaaggacgtggagctattcgaatccgaaggggtcgggcatgtgttctacctgctggagcccgtgcaggagaaggccaaggagctattggacaagatcgcgacgtttgtcaggacggaatgaggagggatgcattggtggtggtggtccggtggacactgtcacactggacatcatgtatcgttaacgtactactactactacatactccattcgttcttttttatttgtcgttgtttagtttaaaaattaataagtatgcgacaaatattcgag

SEQ ID NO: 98296 - DNA, 819 bp, Zea Mays
cacaccccagccacgagctccctctcttttccgccctccacccctcgcgagctctccacccctccacacgaccctcctcggcggcggcggcggcgatgcagatggcggcgaccaccaccgagtcccaggcggccgtgccgcctcaacaccctcacgcccacccccacgcgcccccgcagcatgctcacccgcaccaccacatgccgcagccacggtgggtcgtcatcccgtacccgccgccgccgcccatggtggccgcgccaccaccgccgccgcagtttgccaagcacttcgctgctgggccgcccccgccgccccaagctggtgctgggcgccgcacgccgaccccgccctcgtctggatccggcgggaacgggtgcgaagaaaataaaaccatttgggtcggtgacctccagtactggatggatgaaaactacctacataactgcttcgggcccagcggcgaggtggttacaataaaagttatccgcaataggcaaacaggacagtcagaggggtatggatttgttgagttcttttctcatgcatcagcagagaaagctcttcagaattttactggtcatgtgatgccaaacactgaccggccatttaaattgaactgggcatcgtatagcatgggtgaaaagcgatctgaagtggcttctgatcactcgatatttgttggcgatctagctgctgatgtcactgatgaaatgctgctggagcttttctccagcaagtaccgctcggtgaaaggagctaaagttattattgatgcaaacacaggccgttccaggggctatggatttgtcaggtttg

SEQ ID NO: 98297 - DNA, 1714 bp, Zea Mays
cctaggggactaagttgccaaatcatctgtttcatcctcctgggtcctaactagtttttttagtacttctcaagttctgatgatatttaaaactgaattactgaaacacatgttttatggttgtaactataaaacacttcttgtaattgactagtggaatgtaagcctgatttatatggctacagtgttctggaaaaaaaaatctgattctcaactctagcaccagtctactaaggactcattcccttgacctgctgatacggttgctacttgtctgatgctctttttagctcagggatttcatgtagttgatgcatctagatacatttggaccatgaatcctgtggttgtcacaagcccgcaaggctagatatcctggattctgttcacctctgaccacagagccatgttttctccgatttaccgctctgcgatctatctatgtgtactctgtttttcaggaccaaatatgtgtagcctgttgaaattcctgaatagtgattctggctcctcgactcctggtcattcagatggtgattcttctaacagaacggtatatgttggtgggcttgaccccaatgtcagtgaagatgaactgagaaaagcctttgccaaatatgatcttgcctctgtgaaaattcctctaggaaagcaatgtggctttgttcaatttgttagcagaactgatgctgaagaagcactacaaggattaaatggatcactcattggaaagcaggcagttcgcctttcatgggtccgcagcccatcgcataagcagtctaggggtgactccgtcaacaggaggaacaacatgtactatggcacaccattctacggcggatatggctatgcctccccggtgccacacccaaacatgtacgctgcagcgtatggcacgtacccgctatatggcaaccagcagctagtgagctagagagctcccctccgacgtgtcccctctgacgggaaacaaaggttttggtccggtgagcatagtagcgtcaggtgagaaggtgcctttataaggctgtcctaagaagtgggcgagatatgttgttgcatcgttatcgttatggtgcctgtaactgttgtgtgtgccgtgtgcgtccggaagaattggatggaatggaactcgtggcttgttgtagtacatcagagagtcatgttattctttcaagaaattttgacttggtaataaattaaactattgtttgtgcgtccattttccccttttgattgtggttgccaatcattttcatgctattggttacatgtaatttgtatttttgtaatacatatatcttaatgcatgatagaagaccttgggtacaaattatattaccatataaactaaactatcggtaacgatgtagaatgaaggcagtatatttttcaaggctcgagggaccgtgacgtctataggtgtgaattaggtaactgtaaaaaatgctttcctctaatttttgtctagtcaaaatctatacaataaataatcaatttagagggtgtttgaatacaatagagataatagttagctgctaaaattagctgatgacatccaaaaagtctagctaatagctaaactattaaatattttttagcaaattagctaatagtagctagctaatttcactagcaatttttagccaactaactataactaactatcatatctagtgcattcaaatatcccttagatgccaactaagatttt

SEQ ID NO: 98298 - DNA, 505 bp, Zea Mays
aaaagcttttctcccttgttctcgagctctagtcccagtccactacaaaggtgctggagtcctggtattcttgctggtgtgcatcctctctttcagccaccaattttgctttactccagagctgaatgccaacctcttgtttgtggtgaccaaacccaaccgttcttcacctccccgtggacaaggcttcccacaagtattcttgaccgtgtactacttgttccatgctcgacaaagaattcctagaagaagaagatgaaattcaagaagtggtttcggaagaggagtctgcttcagtgcttgctcatcaagtgatgggagccatctaactgggtatttaatagagggatttggaacctcttcattgcaataaggcaagccccggtgcatttaccccttccttgtatttttaaaagatttttatacactttaagtctagtgaaatgtgcattaagtttataggagttgcttggaaactattggatgcattgcctaccttgatatc

SEQ ID NO: 98299 - DNA, 1777 bp, Zea Mays
aaaagcttttctcccttgttctcgagctctagtcccagtccactacaaaggtgctggagtcctggtattcttgctggtgtgcatcctctctttcagccaccaattttgctttactccagagctgaatgccaacctcttgtttgtggtgaccaaacccaaccgttcttcacctccccgtggacaaggcttcccacaagtattcttgaccgtgtactacttgttccatgctcgacaaagaattcctagaagaagaagatgaaattcaagaagtggtttcggaagaggagtctgcttcagtgcttgctcatcaagtgatgggagccatctaactgggtatttaatagagggatttggaacctcttcattgcaataaggcaagccccggtgcatttaccccttccttgtatttttaaaagatttttatacactttaagtctagtgaaatgtgcattaagtttataggagttgcttggaaactattggatgcattgcctaccttgatatccatacctttatagatacttctgatgaagtatcaaaatacaatttacaaaaatgcttagccctgcttagatcttgtggatagaggttgtcttttgcattaatgcctagctcaggggatatcctgaggaaggatggcttatacctgcaagaatattttcattgggagcatgatgggatcttactgcaaagttccctataatgctcttttcatcctaaggaacacaaacaattctaaggatggaagtacttaaatcgggacttgggctaggaacatgtgatgttctacccaggttaattaaggattggatgcgtatgtaggcctgtatgatcaaggactatcttaactggccacgatatgggacagggtaagcttgaacccgactattccatacatgaaaagacaatcgcgcactgtgagtggagagatggcaagagtggcacgtaccctcctggcaaagtaccgcctaaaagcggtggtgtgctctcgggtggcgcggacctgttcacgttgtggaggatttgtgggaacggctgacatatgcaagggttaagtgctacatatgtcgtgtggttagagatcctcagctgagtaaatcgatttggatcgccgttatatccccggagagtggagacttgatctccgacctgcaacctaagtcaggatgtaaacattatgaataaaaatgatgttgtattgatgagatggtgaaattagactagatgcaaccagagtctattaatatttaatctgacgttaaaatattgaaagtaaggactcactatagtaagttatttctgcaaaagtatctaagttgattcttgctaaagccttttccttgattcctatttaaccagcatatccttgagagtcatttttcttagtcggctaagacttgcgaaagtacacttcgtactcagggttttcgaacccatgttgttgtaggtgatgaggagtactctaggtgttcctaaggctggagggtgtttccagttctggaggaagattagttaggcttatgtttaagctttggagggttcctaccttcctgatattgtaataagttatgcactttgagtatatcaggacttgtaataaatgtaactgttcctatgtaataaccttccgttttagaaataaaaagaatattttgtaaagtcttccgctattatctccgaagtgtgtgtatcgaatgtgattactgtaatatgcatgtatggtgggagatccttgggatgatgagttcaagttgttgaactcgtgatagccttgtta

SEQ ID NO: 98300 - DNA, 1431 bp, Zea Mays
atggcgatctgtgataggtcatcgggccgccaagcgattcttcctgcgggagcggatcttccctgttcgttgagcggacgatcttcgatggcgcagagggtcatcttctccgcgaaagttcgtgaaagtagttcaatcttgattttctatgatctgttcactgaacttgatgactactgtactcaggttattctggctcctcgactcctggtcattcagatggtgattcttctaacagaacgaactgatgctgaagaagcactacaaggattaaatggatcactcattggaaagcaggcagttcgcctttcatgggtccgcagcccatcgcataagcaggtgtatgtcatcccaaattttttgtcacccttgtatacgactggaggatacaaaaatattgtggaccttgatatagtagcacagttccgaatggcatcctcgaaagaagataccatgaagtctttggttaaagtacttgtcgactgtgccgaggatgccacaaaatcccttcgtggattagtagatcatgcattagaccacatgcatgacgaagagatattagctagaaccctctttgccatgaaagaaaaacttgatttgcttcaccaagatgccttagaggctaaagtccaagcttttcctgaaattgctaagtacgagggggatgacataagtgttgaaccgacatctccttcgacccctccaacagttactgaaccatctgtcgacgaagaggagttctactgcccggatgcgatgtcaaatccctcaaatgcccaacaatttccaccaccaccccctttatggccaacgggctacatgcaccagaatcctgtcgattgcaacatcatgggaaacattaattttcctagtcctggtcaaggtccaactacaatgtgggctccaattcagccagggaatactagttcccaatctaccatgatccctgcttcgcaatctgcactctattggaatcactacatgaattttgtgaggaaccctctaggttcagttggaacatcgaaggcagctactttgttcgctcatgaggagaacaaaccattccattatatgcactgctggcatcaattgaagggggaaccgaaatgggagagcatatgtcaaggacactcgtttagaggattacatgcaagatcaataccatcttcggggtgtccatcagtggaagcacctgagactgacagtggatccgctgggttgacaggaaaaaggccccgtggccgtgattatagtaaagctgagagaaagaaaggtgcatcttcttcgtctcctgaatacttaagccgattacaagaaattactgagaaacaaatacagaggtccatagaaaagggggaaaaaaagaaaagagcactgaagaagacagggagatacagaagaagagattggaattggaagcccaaaagttaa

SEQ ID NO: 98301 - DNA, 266 bp, Zea Mays
gatccataggggaggaatccccaaaccgagtttgttggttgttgttcaactctccacttattatcttcccgaatacactaacttgatcaatctgctgcataattctctttttacctttagactaaaaaccagttacctgaaaattgtaaccttgattgcaactagcttaccgcagttgtaaggaactaccgagtactgacaatttgttcctacaatcctaatggaaagaaaaggtaaaatatggctgcatcttgcagtgcatttta

SEQ ID NO: 98302 - DNA, 592 bp, Zea Mays
cacgttgcgactgccggagcaagtgtgggatcaggtgctctggtctcgccgcctgtgccacgccactagcctcgtcaacctctcggacatgtgctccgagtccgaggaggggagctcccgaggtggacggcgtgtagcaggagcaggaagcgtcggcaacggcgggagcagccacagcgggcgccgatggtagtcgttcctggccaggacggtctcttgggcgcgaggcggcgacggctcggtgcagaaagggtgggatgggtctacaaggcggggaagggatgactgcgagtccagcgagaagggcgcggcctcggcgctacctgcgggccagtcgtgattgagatgtactgttggcggcggcgccaccgcgcccggaatgccgtgtttacgagttgtgtgctttcccttttccgttacgtatttgtttattgttaggaatattacgtgattgtggcctgatttccgctaagctttattttacttttgcaaagctcgattcgtttaatccgtagatttagcgggactgacaacggacgacgagagaagggattaaaagaaccacggggattctcacttctctttgattttg

SEQ ID NO: 98303 - DNA, 864 bp, Zea Mays
acttggtactagataacatgaaagagtagcttcgacgtagaagaaactttggcgcccttcaaatcccatggccgcactcggttcttctgtcacatccagaggcttggcactccatacctccgtgtgtgtggtttttcttcatcgtcgccacgggaatccagtgatcccggccgcaccgtctcgtccccagcgaagtcttgcgagtgggttaacaacgagttcttcaggcatgaacaatgccttccctattatcaaaggaactacacgaattcctgcggttggtcctggccctgcaaatccgccaggaggaaacctaccgatacccagcagcatgcctccgtgggccaagtgggtggccggggccgtcatacttgcgatacctatctacaggaggttcagaactttagaagacaagatagagaagacggcagaggtggccatcgaggtggtcgacacggtggcggaggcggcggagaaggtcgccggcgaggtcgccggcgcgtttcccggcaacgacggtctcagggaagcggcctcgaagattaagacggtcgcggatgagatcgaggaagacgccgagaaagccgaggccctaatcgagaaggttgacgagatcaagaaagaggttgattcaattgtggatcctataatcgacaaggttgtcaaggacaaagaaatatagagacaggtggtgaactgaagatgtaaacatttgttgggctggtctggttaggaatggatccggatatttattcagatgttaaattactttcgattgcaaacaaatatgatatataatttgttatgtaaatttatattggtgattttagtattaagcttatcaagattcataaaatttaaata

SEQ ID NO: 98304 - DNA, 2173 bp, Zea Mays
aactctgatccgaaaacttctcatttcttgtgtattcagacgaaaagaacagggctacaaagcagtatatcgacggggagagaaggggaaaaacaaaagaatttagagtgtgtgcactggcgctaaattattcggcttgtagaagcttttcctccggaacagatcgccgaacttgcggagtatcggcctcttcttgcgcttcacgtggtcgaagtccaactcgtcgtccaggtccaccgccgccgcgtccgccgcggacttgaggtcggcgacgttgctgagcgacgcgaacacccgctccttggggttctggctccccatccgcgccgactgcgagaacctccggctgcccgccggcgtccgcggcttgtctgcatgcaccaaccgctgcggcggcgtcggcccgttgctgctgccgtttagcacgcgctggtcgaagccgcggtccggcgcggcggcggacgcgggcgtgctgcacgccgtcgtcgtcgtggtggcggcgaggagggtgttgagctccttgaggctgccctgcgcggcggcctcgctgaccctgacgcagtcgtactcctggcggaggctccgcagcgcgctctccttatccgcgacggcgtcgttgaggcgcgcgttgtcggccctggcgagctcgagcgagtcccggacagcgctggcctcggccacggcctgcttgaggacgtcccggaggcgcgcgttctcgtcgcggatgacgcgctgcgactcgaccagcttggtgttgtcccgccgcgcccgccctgcctcctcctcggccgcgcgcacgcagtcgaggagcacgcgctccttgtcgccccacgccgccgcgcactcgtcggcctcgagcctggaccggtcgcgctcggcggacgcggcggccagggccgcgcgcagccgccggacctcggcgctggccgcctccacctcggcctgcgcctcggagagccaggccttcacctgcttggcctccatggtcacgtcggcgagcgccacggagacgtcctccagcgccttgcggctcctctcctcgccctgcgtcgccgcccgcagctcgccgcgcagggccctgatctcgtcgtccgcgccgccgaacatgaggtccttgacgctccgcggctgctccgcgccgccgccgccgccgccacgccgggaggacgcggacgcggactcgagggtcttgttagcctgctgcagcgtggcgatctccagcctggcctcctcgagcgagatcttggtctgctccagctgcttggtctggtatatcagcgactccagcatcttgcgctccgactccttggacttgtccacctcccgctccagaagctgcaccttctccgcgacacccttggcggcgccgtcctcgctgtgctgcctcagctcctcgagctccctcacggcccgcgccttctcctcccgctcccgccggagctcctcctccagctgcgccacccgctgctgcatggcgcccacgccgccaacgccgcgccgcctctgccgaacagcaggccaggagccgccgcggttagaaacaacgagttaataataatgtcgttaataaatatatgcccgcgcccctgatcggtgatcactccattccaaagccgtcggcttcgtgcgtactgcgtaacgtagcgcgagagatgggctgggaacaaaagtcagggcagggcaggaggcaggacagtacctccggtgacgggaacgccttgttggaaccgccggcggcgggtgagcggctgcgctggaggcgaggggacggcttgcggtctctggaaacggacgaggcggtggcggtacccctgagcccggcctcgaaggagccggatctgcgaggcggatcccagagctcatgaaaccgtatcgacggactaaatagtcaaacaagaaaagaacgcacagggagtggcaacggcgagatccccgaccccgaccccaagccgagctggaaaagaaggatctatagacgtgcgtggccgtggcgtgggcgcgcgggcggggccgccactgcaatgcaaacccagccaaggcagtcagggtctcggctgaactctcacctcggcctggcggacagcatctcgggcaacgcggcgggcggcgcggactccgaggccgggaaaagaaatcagtgtcagagggggaaccgaatagaaggaggtcctgc

SEQ ID NO: 98305 - DNA, 1138 bp, Zea Mays
cactttgatccgagacgacctttctttgattaaaacaaatgcggattagcagatttaggggcttaggaattgatcctagccaccctagaatctaacactgctgagttctgacctgcgttgcggattcgaagtccgtgggggcttgcaagagaatcgagcagtttggtgagggaatgagggcgctcacctaacgactgctcacgcggaccggcggcagtactcgtcattgtcagcagtacaaatacctcacttgctaacccatcgcatcgccgagctgttcggtgacgagtggtagctagctagctagctactactgtagtaggtaaagcctgcggcgctcgagcgagcaggaaggcaaaggcaagcatggccgggggtggcttcgccgtggctgatggcccgtccgtcgactacggcggccaggtgaccttctcggtcgtcgtgacctgcctcatggcggcctccggcggcctcatcttcggctacgacatcggcatctcggggggcgtgacggcgatggagtcgttcctgtcggccttcttcccgggggtgctgcgcaggatggccgcggcgcggcgggacgagtactgcgtctacgacagccacgtcctcacggcgttcacctcgtcgctgtacctggccgggctggccgcctctctcgtcgccagccgcgtcaccagggcgatcggcaggcaggccgtcatgctcgcgggcggcgcgctcttcttcgccggcgccgccgtcaacgccgccgccgtcaacgtcgctatgctcatcgtcggacgcatgctgctgggcttcggcatcggctttaccaaccaggtcttgtcggcacctccatccgatccgattgtttttccttgttaattaacacaagtactgataccccctcctaataacaattaataaatggaaagaatttggcattagttcatccctatgaatagggataaaggaaggaaagaataaataaataacctttttgtattgtattgtcctactcttctatcctcgggagaggtatacttaaaaaagaataaagggttaattcgttcttgatagccatttccttaacaagtgaatgggaacatactttagaccggaatctaaaaaaagtactgcttgatcatttccacca

SEQ ID NO: 98306 - DNA, 1860 bp, Zea Mays
gagctgttcggtgacgagtggtagctagctagctagctactactgtagtaggtaaagcctgcggcgctcgagcgagcaggaaggcaaaggcaagcatggccgggggtggcttcgccgtggctgatggcccgtccgtcgactacggcggccaggtgaccttctcggtcgtcgtgacctgcctcatggcggcctccggcggcctcatcttcggctacgacatcggcatctcggggggcgtgacggcgatggagtcgttcctgtcggccttcttcccgggggtgctgcgcaggatggccgcggcgcggcgggacgagtactgcgtctacgacagccacgtcctcacggcgttcacctcgtcgctgtacctggccgggctggccgcctctctcgtcgccagccgcgtcaccagggcgatcggcaggcaggccgtcatgctcgcgggcggcgcgctcttcttcgccggcgccgccgtcaacgccgccgccgtcaacgtcgctatgctcatcgtcggacgcatgctgctgggcttcggcatcggctttaccaaccaggcggcgccggtgtacctggcggagacggcgccggccaagtggcggggcgccttcacgacggggttccagctcttcctcagcatcggcaacctggcggcgaacctggtgaactacggcacctcgcgcatcccggcgtgggggtggcgcctctcgctgggcctggccgcggcgcccgccgccgtcatcctcgcgggggcgctgctcatcccggacacgcccagcagcctcctcgtgcgcgggcgcgcggaggaggcccgcgccgcgctgcggcgcgtcaggggcgccaaggcggacgtggacgcggagctggaggacgtggcccgcgccgtggaggccgcgcgcgcgcacgagcagggcgcgttccgcaggatcctccggcgggagcaccggcaccacctggccgtggccgtggcggtcccgctgttccagcagctcacgggggtcatcgtcatcgccttcttctcgcccgtgctgttccagacggccgggttcggcagcaacgccgcgctcatgggcgccgtcatcctcggcgccgtcaacctcgcctccacgctcctgtccatcgtcacggtcgaccggtacggccggcggccgctgttcctcaccggcggcttcgtcatgatcatctgccaggtcgcggtcgcgtggatcatggggtcccagatcggggccgacggcgggtccgcgatggccaggccctactccctcgcggtgctggcgctgacgtgcgtcttctcggcggcgttcggctggtcgtggggcccgctgacctgggtgatccctggcgagatattccccgtggagatccggtcggcggggcagggcgtcagcgtggccgtcaacctgggcgccacgttcctgctcacgcagacgttcctctccatgctgtgcacgctcaagtacgccaccttcatctactacgcggcctgggtagccgtcatgaccgccttcgtcgtggcgttcctgccggagaccaagggggtaccgctcgaggccatgggcgccatctgggagcgccactggtactggagacggttcgtgcagccttctgttgcggaggacccctgatgagtgatgagtgactgatgcggccttctgttgtggacgtgacacgcttccggacgttgtgtgtgtcaatggttgcagtgtggtcgtcgtctgaggaagagttgtctgtggacgaaggctgaaagccaatgcgtgtgccctgtccgtggtttttctaatacaggaatacgtcatgcaaagttgttaaatgttaaccgaacgttcgcagtgatatcgatgttatatttaagttttaacaata

SEQ ID NO: 98307 - DNA, 257 bp, Zea Mays
ctgcagatgacttgagctgtctactgggaccatttcatgcagagacaagccacaaataagatacaaacaaacaagaaaatggtcaattataattgttctcaggaagcggaaagcggtgttataaatccaaacaaattcatgaaacacaacatgcttcctgtgcttggctgattgtacctttttagtatactactaatctgcaatttttgtagcttataagtgtatagagaaaattggcctttttctgctttccaaaa

SEQ ID NO: 98308 - DNA, 874 bp, Zea Mays
cagcctagtcaaatagtttttttttttctcgcacggtcgcacggagggagtatcagtctaccacgctaaacaggaagccggagcaagcgtgtacagtaccggaatccagcaccatggcgggatcagcgttgctcaacgctctcgtcctccgcgcgccatccccgtcgctctcgtcctcgtctaagcgccgcagcgccggcgcctttgtgtcctcgaacccaccgcgcttcccatccctgcgttctgagcgccgcgtcgcccttccgcgggcggcggcgggcggtgaccccgaggacgagtgggtgccggagcctgagggtgggtccgctgtcacggggaccgcggtggctgaggcgccggaggcgggagaggtcgcagagctcaaggcgcagctaaaggatgcgctgtacggcacagagcggggcctgcgggcgtccagcgagtcgcgggccaaggtgttggagctcatcacgcagctcgagacgcgcaaccccacgccggcgcctaccgaagcgctgacgctcctcaacggcaagtggatcctcgcgtacacatcattttcccaactgttcccactgttggagtttggaaagctgccagcgctggtgaaggtggaggaaatatcacagaccattgattccaagaacttcacagtgcaaaactgtatcaagttttcaggacctttggctacaacctcagtttccaccaatgcaaaatttgaaattagaagccccaagcgcgtgcaggtgagattctgtaatctaagtatccatttttcatctatgactgaaagcagtttaccatgactattttagacactcatgcattgatgttcttaaatattaattccacgatgattcacaaattgctctct

SEQ ID NO: 98309 - DNA, 1254 bp, Zea Mays
cagcctagtcaaatagtttttttttttctcgcacggtcgcacggagggagtatcagtctaccacgctaaacaggaagccggagcaagcgtgtacagtaccggaatccagcaccatggcgggatcagcgttgctcaacgctctcgtcctccgcgcgccatccccgtcgctctcgtcctcgtctaagcgccgcagcgccggcgcctttgtgtcctcgaacccaccgcgcttcccatccctgcgttctgagcgccgcgtcgcccttccgcgggcggcggcgggcggtgaccccgaggacgagtgggtgccggagcctgagggtgggtccgctgtcacggggaccgcggtggctgaggcgccggaggcgggagaggtcgcagagctcaaggcgcagctaaaggatgcgctgtacggcacagagcggggcctgcgggcgtccagcgagtcgcgggccaaggtgttggagctcatcacgcagctcgagacgcgcaaccccacgccggcgcctaccgaagcgctgacgctcctcaacggcaagtggatcctcgcgtacacatcattttcccaactgttcccactgttggagtttggaaagctgccagcgctggtgaaggtggaggaaatatcacagaccattgattccaagaacttcacagtgcaaaactgtatcaagttttcaggacctttggctacaacctcagtttccaccaatgcaaaatttgaaattagaagccccaagcgcgtgcagatcaaatttgatgaaggcattgttgggacaccacagttgaccgactccgttgtgctaccggagaagtttgaagtatttggacagaacatcgacctgagtccactgaaaggcatattttcttcgatcgaaaatgcagcatcctcggttgcaaagaccatatctggccagcctccactgaaaataccgatcagggcaaacaacgccgaatcgtggttgcttacgacctaccttgacgaagaggtcaggatctccagaggcgaaggcggcggcatctttgtgctgttcaaggagggaagtactcttctaaactgagatcgaaatcctggtcgttgaagatgaaccttggagtagttatactgcttatgctttccttttcttatagtagtatactccgtcccaaagtaagtcagtttctagaatcacataaagccaaactatcttaagtttgatcaattttatagaaaaggtaacgtcatctatgaagatatatttcatgacgtgttactga

SEQ ID NO: 98310 - DNA, 2699 bp, Zea Mays
ctgccctgctcagctcatcagaacacagaaggcaggccacagcccgcaggtaggtagtccaccgaaacaaaacaccaccccgtctctcctcttcccagcggtttcctgatccccccacctcgttcgccgaggccgcagcgagcccgcccgtcctccgtccccgcgggagattgtgcgaccgcagagtttggatgctcctgcctatgcaagcaagatgtcaaccaccagagatattgtttagtgctgggcaagttatgcaattttggatcataaattacacagggacaagataattatggaccgcgcagacacatcaggctttgtcagtggtggttgctttggtactacactcctgctgatattcttccattttgtctattctacgatccatgtctgaaagaccctcaggaaccctgcagctgtctgggcagaaatatcatcaggcccctgttctttgagatctctggtgttttatctcattttgttttccaccattgttatattgtctcaactgtgatggataacggcttcatggacatccctcatccgcctctggtgaatgacccctttgtgttagtgggatgcccagcgccagcctccacgatggagaacatgggccaaagcacaatctgtatggatggcctgaacccagcaatggttagttgcagccatgttaatggaaacacacatataatgaacggcttaacagcaagagatgatggcagcaggttactccttggtttgggcccaacaccgaatttttattctgcagtgtccacgggctcaaaacaagctcagagattgtctggccagagttcaacttccattgattcagggatgctgaagcttggccttcagacggatgacagggaagcaattcaatatctgcaacaagcaccgaatggagcactccattctttagatattgttgacgaggcttcaacatctgctgctgtaaggaacatgggtggttacatgccatccctactctttgctccctgctccaattctattgccaatgagacacaagtagaaaaccaagattctctagacctcacgcacagcaccagcaacagtcagcaccttcaacatgacctccagctcagccccgaaccttctgcaacgaccgagtcatcatttggtatgagttctgatgttgtcactgcaacaactacatcagagcgtagccattcccgacatcctaagaaatgcaggtttaagggatgttccaaaggtgcaagaggagcatcaggattgtgtattgctcacggaggtgggcagagatgtcataaacctggatgccataaaggtgccgagagcagctccgcgtactgcaaagcccacggtggcggtcgtcggtgtgaggagcttggttgtaccaaaagcgcggaaggaaaaacagattattgcatcgctcatggtggaggctgccgctgccaacatcctggctgtcctaaagctgcccggggtaagtctgggcggtgcatcaagcacggtggtgggaagaggtgctcggttaaaggttgcatcaggagcgctgaggggaaggctgggctgtgcatttctcatggcggcggccgacggtgccagtatcctgattgcggcaagggggctcagggcagcacattgtactgcaaggggcatggtggcggcaagaggtgcatctttgatggttgcagcaaaggcgcagagggtagcacacctctgtgcaaagcacacggtggtgggaaacgatgcatgtttgaaggaggcggcgtctgtgcaaaaagcgtgcacggggctactgaatactgcgtggtgcatggaggagggaagcgctgttccgtgcccggctgcaccaaaagtgcccgtggccgcactgactgctgtgtgaagcacggtggcggcaagcggtgcaaggttgacagctgtggcaagagcgcccaggggagcacgcacttctgcaaagcccatggcggagggaagcggtgcacatggagcacaggctgcgaaaagttctcccgtggcaagagtggcttctgtgcagcacatggtaccttgatggccaggcagcgagaagaagaggtggtgaagaatgtagggagcatgattggaccaggtctcttcagcggcattgtggcgtcatctgccaccgcagcaagcagcatgacgaacgagcactcggcctctggtgtcagcaccgcttccgactgtgacggcacggtgaggagccaatcaatgattcctccgctggtgctggttcctcgctctatgatgccttcatggtcgactgagcctgtagatggaggcagagagggaggtcatgttgttcctgaggggagggtccatggtggtggcctactgtcacttctcggtggcagcttcagggacgccgacgtggaaaagctttgaagattttgtcagtttgtttgtacataaacaggccgcgttcccgcctatagaattgttattgtgccttttcttgtctagataaacatttcaaccttcatgtaccggttaaatcaatactggtttagtccattgtaaagtggtgactgtcaattgtcgtgaacacttttagcttgttggttcggttcggttgtagtctgtctgtttgtgcgtattcttaagaaactcgtctggactttctattgcaaattgtcgaatgtcaattttctgaaatctggaatttttcagcatataggtccaggttagtctgt

SEQ ID NO: 98311 - DNA, 96 bp, Zea Mays
ccttaaaacagctcctcaatcaaccaaatatggacctccccttaaagtttgatcgaaattacccgcaattgccattggagaaaaacataacgagcc

SEQ ID NO: 98312 - DNA, 3032 bp, Zea Mays
gaaagtcactggtgatccatccggggagggcggcggtcgcctcctcttcccctgcggccgagctcgccagtcgcctgaacttgtctcgcccgctgccgatctcctctctccgctcgtcgcgccgcaacctggagaggggaccgcgctcggtcgactgccacctggggagcgggtgggcggcgtccgccctctgcactccccggtgtccccgcgaccggttccggcgcggccggcacacaggttcgcagggtttgaaaacttcttgtatgctcacgcgttcggcgctgattgttgaaagtagctttgggactctgaggacctaaattctaatcaattgtgaaatctgaaaggtgtagctatttgtacttctggaggtgtgggaagaaatggaatgcaacaaagatgaggcccaaagggcgaagggtattgcaaagaagaagtttgaagcaggggacttgcagggtgccaggaaattcgccctcaaggctcagactctctttcctgcgcttgagggcgttgatcaaatgatcgccacctttgatatctatcttgcttcagaagggaaggttgctggggagaaggactggtactctatcctttccgttcccatgaacgcaaacgatgaaaagatcaagaaacagtacaggaagttggttcttcagttccaccctgataaaaacaagtcagtgggcgctgagggtgctttccagatggttcaagaggcatacacggtgctatccgatagaaccaagcgagctgtatatgaccaaaagaggaatgtgaggacattccaacagaggacagcacaatcaggtaaagcaagcacggtccctggtgcatccaatggcttctataatttcgcagctaatgctgctactgcctccaagcggacagtaaacaagcaaacagtgggatcagcaacacatgccccatctgcaccttcaactgctactcgtgcacctgtggcaaagcctgatacattttggacctcatgcaacaaatgcaagatgaactatgagtacctcagggtgtatttgaataaccatcttcgctgccctagttgccgtcagccattcctagcaaaagaagtacaaaagccaccagcagggaacgtggtacaagattcaaacatcagtggtgctaatcaaaacacaaccactaatagaaatttgcggtggggtccattttcaagggctgctggtgcagctagtgccactgcatcgtctgctgctgctgctcaagctgctaatgtagttcatcagacatatgaaaaagttaggagggagagggaggaggcacaagcagcggcaacaagggaagaggctcttcgccggaagtacaatcctctaaagaggcatgcaagcatgtcagggaatgctaatcttggaccaggtgatgcaacatctggaaagaagacaaggactatgactaaagatgctgaagttggttcttcatccaccatatccagtccaggagcaaatttttttagagtgcctggtgtgaatatatccttttccaacaacattggggcctatgagtttcaaggcgttgatggtggccccaattggaaacccaggcctctgatccgcttaagtttagtcaagaccttctctcagatggatcttaggggtcttttgctggaaaaaacgaaaactgagcttaaaaacaagctaacagtaataaaaagtaaaacatcccaagttgctagtgaaaaagcgagcaagaaaattgcggtcaaggaaaatggtggggataatgaagctcttggaccagaagatcctacagctaataaagattctcatgattcagaacagattggttctaatactagcacagatgctgaaaatgaagatgatgaccccttatcttataatgttcctgatccagatttccatgattttgacaagaatcgcactgaggaatgtttccaaagtgatcaaatttgggctacatatgatgatgaagatggaatgcctcgttattatgcatttattcagaaagttctttccttgaaaccattcaagctcagaataagctatctcacatcaagggcaaatagcgaatttgggccttcgaattgggtttcttctggcttcataaagacttgtggtgatttcaggattggtaaatatgaaagctgtgatatagtcaacatgttctctcaccagatgaaatgggataaagggccgcgtgggcttatcaaaatttatccacagaaaggtgatatctgggctgtttatcggaattggtcctctgactgggatgaagatactccagataatgtgctccatgcctacaatgtggttgaggtactggatgcctatgatgaagtccatggcatctccataattcccttagtcaaggttactggatttcgaacagtatttcagcgccatcaggatccaaatgctaccatgaagattcctaaagaagagatgtttcggttttcacacctagtgcctttttacaggatgtcaggcgaagaagctgcaaatgtccccaaagatagttatgagcttgatccagctgctatttctaaagaactgcttcaggggatcacggaagcagtggagccaaatggaacctaaggcagttgatgatgcctgccttggttaacctgccattttgaagtaatcgagcaaaaagatattaacacttgctagttttatagatttccttctgcttttgactatcacctttgcatagaagagatacaatggggccagtcattcaggagtcagctgcttagcagcttctggtgtaattagcaggctctgatatgaattttgctgtgatatgttacttagggcttgtttagatgcatgtggattggaggggattgaagtgacatataatcccttactagtccatgcccctcaatcccatgcatccaaaccagcccttagcaactctagatgtgggtgtactaacgcgaagctcaagcagtttttatggtcagtgttgacacctgttatctgtcttatcttgagagtggatctgttgctttttttgcgaattcaaatgctaattga

SEQ ID NO: 98313 - DNA, 117 bp, Zea Mays
aatgtttgggtaactttattttggtcagctaagcatatggtaaaaatttggggctgtttggaagccagtttctcaggaagctttgtagggtccaaaatagaaaggttaaatccttaa

SEQ ID NO: 98314 - DNA, 2799 bp, Zea Mays
tccacccctgttaacaggtttcaagtttcacaattttaattaacatttgtttcctcctgggcagggtttgaaaacttctcatatgctcatgcgttcggcgctgattgttgaaagtagctttgggactccgaggacctaaattctaatcaattgtgaaatctgaaaggtgtagctatttgtacttctggaggtgtgggaagaaatggaatgcaacaaagatgaggcccaaagggcgaagggtattgcaaagaagaagtttgaagcaggggacttgcagggtgccaggaaattcgccctcaaggctcagactctctttcctgcgcttgagggcgttgatcaaatgatcgccatctttgatatctatcttgcttcagaagggaaggttgctggggagaaggactggtactctatcctttctgttcccttgaacgcaaacgatgaaaagatcaagaaacagtacaagaagttggttcttcagttccaccctgataaaaacaagtcagtgggcgctgagggtgctttccagatggttcaagaggcatacacagtgctatcggatagaaccaagcgagctgtatatgaccaaaagaggaatgtgaggacattccaacagaggacagcacaatcaggtaaagcaagcacggtccctggtgcatccaatggcttctataattttgcagctaatgctgctactgcctccaagtggacagtaaacaagcaaacagtgggatcagcaacacatgccccatctgcaccttcaactgctactcgtgcacctgtggcaaagcctgatacattttggacctcatgcaacaaatgcaagatgaactatgagtacctcagggtgtatttgaataaccatcttcgctgccctagttgccgtcagccattcctagcaaaagaagtacaaaagccaccagcagggaacgtggtacaagattcaaacatcagtggtgctaatcaaaacacaaccactaatagaaatttgcagtggggtccattttcaagggctgctggtgcagctagtgccactgcatcgtctgctgctgctgctcaagctgctaatgtagttcatcagacatatgaaaaagttaggagggagagggaggaagcacaagcagcggcaagaagggaagaggctcttcgccggaagtacaatcctctaaagaggcatgcaagcatgtcagggaatgttaatcttggaccaggtgatgcaacatctggaaagaagacaaggactatgactaaagatgctgaagttggttcttcatccaccatatccagtccaggagcaaatttttttagagtgcctggtgtgaatatatccttttccaacaacattggggcctatgagtttcaaggcgatgatggtggccccagttggaaacccaggcctctgatccacttaagtttagccaagaccttctctcagatggatcttaggggtcttttgctggaaaaaacgaaaactgagcttaaaaacaagctaacagtaataaaaagtaaaacatcccaagttgctagtgaaaaagcgagcaagaaaattgcggtcaaggaaaatggtggggataatgaagctcttggaccagaagatcctacagctattaaagattctcatgattcagaacagactggttctaatactagcacagatgctgaaaatgaagatgatgaccacttatcttataatgttcctgatccagatttccatgattttgacaagaatcgcactgaggaatgtttccaaagtgatcaaatttgggctacatatgatgatgaagatggaatgcctcgttattatgcatttattcagaaagttctttccttgaaaccattcaagctcagaataagctatctcacatcaagagcaaatagtgaatttgggcctttgaattgggtttcttctggcttcataaagacttgtggtgatttcaggattggtaaatatgaaagctgtgatatagtcaacatgttctctcaccagatgaaatgggataaagggccgcgcgggcttatcaaaatttatccacagaaaggtgatatctgggctgtttatcggaattggtcctctgactgggatgaagatactccagataatgtgctccatgcctacaatgtggttgaggtactggacgcctatgatgaagaccatggcatctccataattcccttagttaaggttactggatttcgaacagtatttcagcgccatcaggatccaaatgctaccatgaagattcctaaagaagagatgtttcggttttcacacctagtgcctttttacaggatgtcaggcgaagaagctgcaaatgtccccaaagatagttatgagcttgatccagctgctatttctaaagaactgcttcaggggatcacggaagcagtggagccaaatggaacctaaggcagttgatgatgcctgccttggttaacctgccattttgaagtaatcgagcaaaaaaatattaacgcttgctagttttatagatttccttctgcttttgactatcacctttgcatagaagagatacaatggggccagtcattcaggagtcagctgcttagcagcttctggtgtaattagcaggctctgatatgaattttgctgtgatatgttacttagggcttgtttggatgtacgtggattggaggggatcgaagcggcatataatcccttactagtccattcccctcaatcccatgcatccaaaccagcccttagcaactctagatgtgggtgtactaacgcgaagctcaagcagtttttatggtcaaagaaacgataaaaaaataataaaa

SEQ ID NO: 98315 - DNA, 1648 bp, Zea Mays
acgttttcaaccgccactacagagcttctgtgtactagtgtgcagctcctcccctgggtgctgagtgctgactcgctcccgtgcttctgctagccatcgttggccgcccccgccgcgccaatggcgacgaggcgcgagctgtccctcgcgctgctgtgcgtgtgcctcgcggcctgcgcgctggcccccggccccgcggacgccagcaagatggtcggggtgtacgagctcaggaagggggatttctccgtcaggctcaccaactggggcgccagggtgatgtccgtcgtcctcccagatcgcaaagggaatttggctgatgtcgtccttggcagagacaccgtcgctgaatacgtcaacgatacctcttacttcgggccgataacggggcgcatagcacagcgagttgcccggggccggttcgtcctcgacggcaaggtctaccacatgcacaggaacgacggcaggaacacgatccacggcggcgacagagggttcagccggagcatctggacggtgaaggagtacgtcgccggcggcgaatcgccgcacatgaccttctactaccgcagcttcgacggagagcaaggcctgccggggaacgtggacgcgtacgtgacgtaccgcgtgtcgggcgcctacacgctgggcgtgcacatgaacgcgacggcgctggacagggcgacgccggtgggcctgctgctgcacgtgtactggaacctgggcggggagggcagcggcgacgtgctgggccacacgctccggatccgcgcgtcgcggcacgccgtgctggacgacgagctcctgccgtcgtcggggcgcgtggagcccgtggccggcacgcccctggacttccgcgcgcccgcggcgatcggctcgcgcatccgccgggtcgtcgtcatggggggccgcgccgtcgggtacgacaccaactacgtcgtcgacggcgaagggatgcggccggtggcgcaggcccgggaccccgcgtccggccgggcgctggagctgtgggccaaccagcccaccctgcagctctacacggggaactccctcaaccgcaccgccggcaagggcggcagggtgtacgacaggtgtacaggcacgacatgctctacaagttctccttctaggtgcgtcgtcgttaggtttgatgaagtgtgcgtaattaagcacgaggaagtcatgtcatgcgtccgttggttttgatcggaagaaaaagactatgcatgctattattttaatttgcttccgacgagcagcagggcagggcaggcagacagacaggcgttcgatcttcgtcttcagttcgtcggcggtgaggtccgcaccgtgccgctagtagtagtagcctttgcatcagcaccttttggaggcgtcgtcggggtgtgggccttctccctcgccaggtcggctttggcctctgaaccctgctgcaagcagacagggtacgtacacaacaagattgtggacgtacgtatcatcagtgacgcatggcacacaacaacaccaagctgcaattgccatatgtaattggtggtgtgtgtgagtcgtcgttcaggtttgatgatcatgcatgtacgggtgtaccagctgtacctcggtgaaaatcttcaagacctcttctggggacttggtttccaagatcgtc

SEQ ID NO: 98316 - DNA, 1754 bp, Zea Mays
acgttttcaaccgccactacagagcttctgtgtactagtgtgcagctcctcccctgggtgctgagtgctgactcgctcccgtgcttctgctagccatcgttggccgcccccgccgcgccaatggcgacgaggcgcgagctgtccctcgcgctgctgtgcgtgtgcctcgcggcctgcgcgctggcccccggccccgcggacgccagcaagatggtcggggtgtacgagctcaggaagggggatttctccgtcaggctcaccaactggggcgccagggtgatgtccgtcgtcctcccagatcgcaaagggaatttggctgatgtcgtccttggcagagacaccgtcgctgaatacgtcaacgatacctcttacttcgggccgataacggggcgcatagcacagcgagttgcccggggccggttcgtcctcgacggcaaggtctaccacatgcacaggaacgacggcaggaacacgatccacggcggcgacagagggttcagccggagcatctggacggtgaaggagtacgtcgccggcggcgaatcgccgcacatgaccttctactaccgcagcttcgacggagagcaaggcctgccggggaacgtggacgcgtacgtgacgtaccgcgtgtcgggcgcctacacgctgggcgtgcacatgaacgcgacggcgctggacagggcgacgccggtgggcctgctgctgcacgtgtactggaacctgggcggggagggcagcggcgacgtgctgggccacacgctccggatccgcgcgtcgcggcacgccgtgctggacgacgagctcctgccgtcgtcggggcgcgtggagcccgtggccggcacgcccctggacttccgcgcgcccgcggcgatcggctcgcgcatccgccgggtcgtcgtcatggggggccgcgccgtcgggtacgacaccaactacgtcgtcgacggcgaagggatgcggccggtggcgcaggcccgggaccccgcgtccggccgggcgctggagctgtgggccaaccagcccaccctgcagctctacacggggaactccctcaaccgcaccgccggcaagggcggcagggtgtacgacaggtacgctggcttctgcctcgagaccatgggctacgtggacgccgtcaaccaccccgagttcccgtcgctgacactcaggcccggacaggtgtacaggcacgacatgctctacaagttctccttctaggtgcgtcgtcgttaggtttgatgaagtgtgcgtaattaagcacgaggaagtcatgtcatgcgtccgttggttttgatcggaagaaaaagactatgcatgctattattttaatttgcttccgacgagcagcagggcagggcaggcagacagacaggcgttcgatcttcgtcttcagttcgtcggcggtgaggtccgcaccgtgccgctagtagtagtagcctttgcatcagcaccttttggaggcgtcgtcggggtgtgggccttctccctcgccaggtcggctttggcctctgaaccctgctgcaagcagacagggtacgtacacaacaagattgtggacgtacgtatcatcagtgacgcatggcacacaacaacaccaagctgcaattgccatatgtaattggtggtgtgtgtgagtcgtcgttcaggtttgatgatcatgcatgtacgggtgtaccagctgtacctcggtgaaaatcttcaagacctcttctggggacttggtttccaagatcgtcaaagcttgcttctgcacc

SEQ ID NO: 98317 - DNA, 835 bp, Zea Mays
catttggcccaaatgaagtatttgtttcgagaagcaatccagattaagagggtacttctacatgacgagaaaagcctgtgcatgtatgctgatatggaaatcatacttgtaatggatgttgtggaatacacaagtcctgatcactctccatccatggcaatttgtgatgctttttactcgaagcttttgacatttttggatgctcatcaaaaggtcccagccaaagagcaagttgatgcactatcaacggaattgtttgcgctttcaactgtcacaggtccattcaagatcaatggagtaccgatccgtcgtgtcaaccagacctatgtcattgctacatcaaccaaggttgacatctctggtgttgatgtctcgaagtttgatgacaagtactttgccagggagaaaaagcagaaggtgaagaagaccggtggtgagctttttgagacagagaaggaggcgtccaagtcgctgcctgatttcaaaaaggatgaccagaaggccgtggatgctgctctgatcaaggctattaaggctgtcccagagctgaaggcctatcttggcgctcggttctcccttagggatggtgacaagccccacgagatgctgatgcagatatggtgagaatgtgttagaggttaagaagaatcctaacaggatatgtttagtttgtcgtggcatctataattgcagtatatgcagaactaagaaaggatggttccctactggttctgtatataggaaggcggtcggacttgggtacaaatctgtagcacactttctaattgccaagcataataacaaacaattgcccactgatatagtgaacaacgcg

SEQ ID NO: 98318 - DNA, 252 bp, Zea Mays
gaggaggtgaaccaggtgttctgcgacaatgcggccaacgagctccagggcatcccaaggtctacgatgtgccactcgtgtccatcgacttcaggtgctccaacatctcctacaccatcgacacctctgtcactatggtcatgggagatgagtcagatggcaatggggtcccaatccccgattccccatggggaatttctctaatagggctagttttgcaaccccattttcccttggaaaaatggagttgca

SEQ ID NO: 98319 - DNA, 1531 bp, Zea Mays
cagaacactacgagactacctccttctctccaagtcgttgtcttcttcggttcttcctagcgtctccccgttcttctctccgtagtagctaacagtatagtgtggcctcgcatggagactttccctcctcgctggccccgcatctggcccggattaaccgccttgggctccctccccagattgccccacccaccgtcagcctcgtcaggtatgtctcgtgttccctaaccttgacgcttctcccttctcggcgcctgcttcgttggttgccttcagcggacgccgccgattcggctctcctgttcggcgccctccccagattgccccacccaccgtcagcctcgtcagggtcctcccaggacaaaccatgctccggagacagaggcggcagagctggggcaggagcagagccatcacagaaattcttgtctccagataaccagaatacttcagcttccatagttccacttacacagttgtaacaatctagcctgtaatggcttgtaacagtacagtgagttgggagttgggacacctctgatgtttagagctccaatggtcctgtgggagggatatatttttgttttcatattgtttagccatggggtgccagggtctacgttctaccttggtttggttctctccttttctcctatctgtcaacacatagtcgtctattacttataaaaaaccacattttcccattttgatccctttatgaacaatgctggaaatcaaattctattcattttggaaaataattacatatttattcgtcgtagctatattccattgttttattaggtgctcaaaaattgtgttgaccggacacatgctattttggcctatgtgctatccattgctatgttttatcggtagggttttccatgcttagataacttcctaatttctcattttttgtaaataaataaatacttggagattcttggtcaaaggaatgttggacacctgctagccaatgtgcagccgcgagaggtctcagacagataagatggtcgacggcatggacttcgaggagctctgcagcgacttcgaatgcataagcagcccctacgtggagtccataatgaggcaggtcgcgcgggacatctttgagcttcgcgaggataaccgcgcattcagctgctacgccgtccccgtgaagtatgaggtgttcctctgctatgtgaaatcttttacattttgtacattaattggctctttcaggcttttggtttgagtcctcttagatcgatatttcactttggattttgcacttgaaaacttgcaggcggttacactatgttgccacggttatcagtttctatgcgtttttatcatttatgttatatgacattttcatgacacgtatgtagagcatttgatagggcgtttttttctagtatcttgtaactcaccctcgtctttatttttttccccaggctccttcctgatgataatttataatgataaatcgaggaaactccaataagtttccttcctttttttcctttcgtttttctcccttctc

SEQ ID NO: 98320 - DNA, 1513 bp, Zea Mays
cagaacactacgagactacctccttctctccaagtcgttgtcttcttcggttcttcctagcgtctccccgttcttctctccgtagtagctaacagtatagtgtggcctcgcatggagactttccctcctcgctggccccgcatctggcccggattaaccgccttgggctccctccccagattgccccacccaccgtcagcctcgtcagggtcctcccaggacaaaccatgctccggagacagaggcggcagagctggggcaggagcagagccatcacagaaattcttgtctccaggtatgttgaagtttcaacaacttggtttataaattaacatgattttaaaaaatcacagtgactcctcttgcagattttgtaaaatgtttttttctctactgcactgcctatcatttgctgcaatttgaggattataacattctagacacactaaaatctatcatctatcataaacagtagctatttccccctctgttctttgtgtctctgattgtgtggtaccagctactttggcatacatttgttttttgctttaatcttctgttcagcttctaattcagaaatctttacttcagataaccagaatacttcagcttccatagttccacttacacagttgtaacaatctagcctgtaatggcttgtaacagtacagtgagttgggagttgggacacctctgatgtttagagctccaatggtcctgtgggagggatatatttttgttttcatattgtttagccatggggtgccagggtctacgttctaccttggtttggttctctccttttctcctatctgtcaacacatagtcgtctattacttataaaaaaccacattttcccattttgatccctttatgaacaatgctggaaatcaaattctattcattttggaaaataattacatatttattcgtcgtagctatattccattgttttattaggtgctcaaaaattgtgttgaccggacacatgctattttggcctatgtgctatccattgctatgttttatcggtagggttttccatgcttagataacttcctaatttctcattttttgtaaataaataaatacttggagattcttggtcaaaggaatgttggacacctgctagccaatgtgcagccgcgagaggtctcagacagataagatggtcgacggcatggacttcgaggagctctgcagcgacttcgaatgcataagcagcccctacgtggagtccataatgaggcaggtcgcgcgggacatctttgagcttcgcgaggataaccgcgcattcagctgctacgccgtccccgtgaagtatgaggctccttcctgatgataatttataatgataaatcgaggaaactccaataagtttccttcctttttttcctttcgtttttctcccttctctgatttttcagtgtggagggactggacttccgacaaaggaaatcacaacattgtatatgattgacttgtaatatgttagtaaatatgtctgtacgtt

SEQ ID NO: 98321 - DNA, 1755 bp, Zea Mays
cagaacactacgagactacctccttctctccaagtcgttgtcttcttcggttcttcctagcgtctccccgttcttctctccgtagtagctaacagtatagtgtggcctcgcatggagactttccctcctcgctggccccgcatctggcccggattaaccgccttgggctccctccccagattgccccacccaccgtcagcctcgtcaggtatgtctcgtgttccctaaccttgacgcttctcccttctcggcgcctgcttcgttggttgccttcagcggacgccgccgattcggctctcctgttcggcgccctccccagattgccccacccaccgtcagcctcgtcagggtcctcccaggacaaaccatgctccggagacagaggcggcagagctggggcaggagcagagccatcacagaaattcttgtctccaggtatgttgaagtttcaacaacttggtttataaattaacatgattttaaaaaatcacagtgactcctcttgcagattttgtaaaatgtttttttctctactgcactgcctatcatttgctgcaatttgaggattataacattctagacacactaaaatctatcatctatcataaacagtagctatttccccctctgttctttgtgtctctgattgtgtggtaccagctactttggcatacatttgttttttgctttaatcttctgttcagcttctaattcagaaatctttacttcagataaccagaatacttcagcttccatagttccacttacacagttgtaacaatctagcctgtaatggcttgtaacagtacagtgagttgggagttgggacacctctgatgtttagagctccaatggtcctgtgggagggatatatttttgttttcatattgtttagccatggggtgccagggtctacgttctaccttggtttggttctctccttttctcctatctgtcaacacatagtcgtctattacttataaaaaaccacattttcccattttgatccctttatgaacaatgctggaaatcaaattctattcattttggaaaataattacatatttattcgtcgtagctatattccattgttttattaggtgctcaaaaattgtgttgaccggacacatgctattttggcctatgtgctatccattgctatgttttatcggtagggttttccatgcttagataacttcctaatttctcattttttgtaaataaataaatacttggagattcttggtcaaaggaatgttggacacctgctagccaatgtgcaggtaacaggaacctgaacaaaatggccttgcagtcttttttttttgactgtgtatatctttttcatgtggagtccattaaaaatccatgcataagcagccgcgagaggtctcagacagataagatggtcgacggcatggacttcgaggagctctgcagcgacttcgaatgcataagcagcccctacgtggagtccataatgaggcaggtcgcgcgggacatctttgagcttcgcgaggataaccgcgcattcagctgctacgccgtccccgtgaagtatgaggctccttcctgatgataatttataatgataaatcgaggaaactccaataagtttccttcctttttttcctttcgtttttctcccttctctgatttttcagtgtggagggactggacttccgacaaaggaaatcacaacattgtatatgattgacttgtaatatgttagtaaatatgtctgtacgttatgac

SEQ ID NO: 98322 - DNA, 821 bp, Zea Mays
cagaacactacgagactacctccttctctccaagtcgttgtcttcttcggttcttcctagcgtctccccgttcttctctccgtagtagctaacagtatagtgtggcctcgcatggagactttccctcctcgctggccccgcatctggcccggattaaccgccttgggctccctccccagattgccccacccaccgtcagcctcgtcaggtatgtctcgtgttccctaaccttgacgcttctcccttctcggcgcctgcttcgttggttgccttcagcggacgccgccgattcggctctcctgttcggcgccctccccagattgccccacccaccgtcagcctcgtcagggtcctcccaggacaaaccatgctccggagacagaggcggcagagctggggcaggagcagagccatcacagaaattcttgtctccagccgcgagaggtctcagacagataagatggtcgacggcatggacttcgaggagctctgcagcgacttcgaatgcataagcagcccctacgtggagtccataatgaggcaggtcgcgcgggacatctttgagcttcgcgaggataaccgcgcattcagctgctacgccgtccccgtgaagtatgaggctccttcctgatgataatttataatgataaatcgaggaaactccaataagtttccttcctttttttcctttcgtttttctcccttctctgatttttcagtgtggagggactggacttccgacaaaggaaatcacaacattgtatatgattgacttgtaatatgttagtaaatatgtctgtacgttatgacaagagatataa

SEQ ID NO: 98323 - DNA, 847 bp, Zea Mays
cagaacactacgagactacctccttctctccaagtcgttgtcttcttcggttcttcctagcgtctccccgttcttctctccgtagtagctaacagtatagtgtggcctcgcatggagactttccctcctcgctggccccgcatctggcccggattaaccgccttgggctccctccccagattgccccacccaccgtcagcctcgtcaggtatgtctcgtgttccctaaccttgacgcttctcccttctcggcgcctgcttcgttggttgccttcagcggacgccgccgattcggctctcctgttcggcgccctccccagattgccccacccaccgtcagcctcgtcagggtcctcccaggacaaaccatgctccggagacagaggcggcagagctggggcaggagcagagccatcacagaaattcttgtctccagtccattaaaaatccatgcataagcagccgcgagaggtctcagacagataagatggtcgacggcatggacttcgaggagctctgcagcgacttcgaatgcataagcagcccctacgtggagtccataatgaggcaggtcgcgcgggacatctttgagcttcgcgaggataaccgcgcattcagctgctacgccgtccccgtgaagtatgaggctccttcctgatgataatttataatgataaatcgaggaaactccaataagtttccttcctttttttcctttcgtttttctcccttctctgatttttcagtgtggagggactggacttccgacaaaggaaatcacaacattgtatatgattgacttgtaatatgttagtaaatatgtctgtacgttatgacaagagatataa

SEQ ID NO: 98324 - DNA, 823 bp, Zea Mays
cagaacactacgagactacctccttctctccaagtcgttgtcttcttcggttcttcctagcgtctccccgttcttctctccgtagtagctaacagtatagtgtggcctcgcatggagactttccctcctcgctggccccgcatctggcccggattaaccgccttgggctccctccccagattgccccacccaccgtcagcctcgtcaggtatgtctcgtgttccctaaccttgacgcttctcccttctcggcgcctgcttcgttggttgccttcagcggacgccgccgattcggctctcctgttcggcgccctccccagattgccccacccaccgtcagcctcgtcagggtcctcccaggacaaaccatgctccggagacagaggcggcagagctggggcaggagcagagccatcacagaaattcttgtctccagccgcgagaggtctcagacagataagatggtcgacggcatggacttcgaggagctctgcagcgacttcgaatgcataagcagcccctacgtggagtccataatgaggcaggtcgcgcgggacatctttgagcttcgcgaggataaccgcgcattcagctgctacgccgtccccgtgaagctccttcctgatgataatttataatgataaatcgaggaaactccaataagtttccttcctttttttcctttcgtttttctcccttctctgatttttcagtgtggagggactggacttccgacaaaggaaatcacaacattgtatatgattgacttgtaatatgttagtaaatatgtctgtacgttatgacaagagatataacttgtttta

SEQ ID NO: 98325 - DNA, 1517 bp, Zea Mays
acagaacactctatgagactacttccttctctccaagtcgttgtcttcttcctagcgtctccccgttcttctctccgtagtagctaacagtatagtgtgggcgtgtggccccgcatggagactttccctcctcgctggccccgcatctggcccggattaaccgccttcggctcccttcccagattgccccacccaccgtcagcctcgtcagggtcctcccaggacaaaccatgctccggagacagaggcggcagagctggggcaggagcagagccatcacagaaattcttgtctccaggtatgttgaagtttcaacaacttggtttataaattaacatgattttaaaaaatcacagtgactcctcttgcagattttgtaaaatgttttttttctctagtgcactgcctatcatttgctgcaatttgaggatgataacattctagacacactaaaatctatcatctatcataaacagtagctatttccccctctgttctttgtgtctctgattgtgtggtaccagctactttggcatacatttgttttttgctttaatcttctgttcagcttctaattcagaaatctttacttcagataaccagaatacttcagcttccatagttccacttccacagttgtaacaatctagcctgtaatggcttgtaacagtacagtgagttgggacacctctgatgtttagagctccaatggtcctgtgggagggatatatttttgttttcatagtgtttagccatggggtgccagggtctacgttctaccttggtttggttctctccttttctcctatctgtcaacacatagtcgtctattacttataaaaaaccacattttcccattttgatccctttatgaacaatgctggaaatcaaattctattcattttggaaaataattacatatttattcgtcgtagctatattccattgttttattaggtgctcaaaaattgtgttgaccggacacatgctattttggcctatgtgctatccatttctatgttttatcggtagggttttccatgcttagataacttcctaatttctcattttttttgtaaataaataaatacttggagattcttggtcaaaggaatgttggacacctgctagccaatgtgcagccgcgagaggtctcagacagataagatggtcgacggcatggacttcgaggagctctgcagcgacttcgaatgcataagcagcccctacgtggagtccataatgaggcaggtcgcgcgggacatctttgagcttcgcgaggataaccgcgcattcagctgctacgccgtccccgtgaagtatgaggctccttcctgatgataatttataattataaatcgaggaaactccaataagtttccttcctttttttcctttcgtttttctcccttctctgatttttcactgtggagggactggacttccgacaaaggaaatcacaacattgtatatgattgacttgtaatatgttagtaaatatatctgtacgttatgac

SEQ ID NO: 98326 - DNA, 730 bp, Zea Mays
acagaacactctatgagactacttccttctctccaagtcgttgtcttcttcctagcgtctccccgttcttctctccgtagtagctaacagtatagtgtgggcgtgtggccccgcatggagactttccctcctcgctggccccgcatctggcccggattaaccgccttcggctcccttcccagattgccccacccaccgtcagcctcgtcagggtcctcccaggacaaaccatgctccggagacagaggcggcagagctggggcaggagcagagccatcacagaaattcttgtctccagattcttggtcaaaggaatgttggacacctgctagccaatgtgcagccgcgagaggtctcagacagataagatggtcgacggcatggacttcgaggagctctgcagcgacttcgaatgcataagcagcccctacgtggagtccataatgaggcaggtcgcgcgggacatctttgagcttcgcgaggataaccgcgcattcagctgctacgccgtccccgtgaagctccttcctgatgataatttataattataaatcgaggaaactccaataagtttccttcctttttttcctttcgtttttctcccttctctgatttttcactgtggagggactggacttccgacaaaggaaatcacaacattgtatatgattgacttgtaatatgttagtaaatatatctgtacgttatgacaagagatataacttgtttt

SEQ ID NO: 98327 - DNA, 832 bp, Zea Mays
acagaacactctatgagactacttccttctctccaagtcgttgtcttcttcctagcgtctccccgttcttctctccgtagtagctaacagtatagtgtgggcgtgtggccccgcatggagactttccctcctcgctggccccgcatctggcccggattaaccgccttcggctcccttcccagattgccccacccaccgtcagcctcgtcagggtcctcccaggacaaaccatgctccggagacagaggcggcagagctggggcaggagcagagccatcacagaaattcttgtctccagattcttggtcaaaggaatgttggacacctgctagccaatgtgcaggtaacaggaacctgaacaaaatggccttgcagtctttttttttactgtgtatatctttttcatgtggagtccattaaaaatccatgcataagcagccgcgagaggtctcagacagataagatggtcgacggcatggacttcgaggagctctgcagcgacttcgaatgcataagcagcccctacgtggagtccataatgaggcaggtcgcgcgggacatctttgagcttcgcgaggataaccgcgcattcagctgctacgccgtccccgtgaagtatgaggctccttcctgatgataatttataattataaatcgaggaaactccaataagtttccttcctttttttcctttcgtttttctcccttctctgatttttcactgtggagggactggacttccgacaaaggaaatcacaacattgtatatgattgacttgtaatatgttagtaaatatatctgtacgttatgacaagagatataacttgtttt

SEQ ID NO: 98328 - DNA, 736 bp, Zea Mays
cacaatcaggattcgtgtaccaataattattaattagcgtaagaaggcaagaactctgctgatctgcagtctgctgttcttcaagtagcataaactaagatacatcgatttcgacagagtagacccttcagccagcaacaaccatccgtgtcgtacataaaagtcactacgctattacagtatttttccaagaacctgacgagcacagcggcagctgcgggactgaactagcgagcagaaatacaggcagcggagcgatgacgcctcctcatgcatggctggctgacgcgcaccagagattcagagggaaatgaatccttccttgacgaagagggcgaagaggatgacgacgaagcccgccgcgacgctctgcgtgctggtcaccaccgtctgctggtacgccagcagcgtcacggcggcgcccaggcacccgatcagaaacccgctcaggttccggtccatgccgccgccgcttgttgcctcccgtcctcgctcccagttgctctttggcttctttgctcggatgctattgcgtgtggagacgacgaaacgaaggatttgggagttgggttggggatggccggatggggataaaaagccgcaaggtcaacggctgcggcgttggtctggtgaggggccacggagtcagcttatgaaggacccggaaggtcgggctaagtctgggaagcgtcggttcgggatgtctaggtcacttgacaatttcttgctgctctaa

SEQ ID NO: 98329 - DNA, 612 bp, Zea Mays
atgacgaaggacgtggtgatcgagcacggggagagctccaaggcgcctctggtggcgccggtggcggcgggcggcgtcagccgcgccgtgtccgtcgccgacgtcttcctcaggttccttgccatcgtcgccaccatcggcagcgccgtctccatgggcaccaccaaccagacgctccccttcttcacgcagttcatccagttcgaggccaagtacagcgacctcccgtccttcacgttcttcgtggcggcgaacgcggtggcgtgcacgtacctcgtgctgtccatcccgctgtccatcgtgcacgtcgtcaggcccagcgcccgctacagccgtctggtcctcgtcttcttcgacgcggctatgctggccctgctgacggccggcgcgtcggccgccgcggcgatcgtgtacctggcgcacaagggcaacgtgcgcgccaactggttcgccatctgccagcagttcgactccttctgcgaacgcatctcgggctccctcatcggctccttcgccgccatggtcctgctcatagtcctcatcttcctatctgccttggcgctcgccagacgccactgatgatgatgaagccccccatctatcagccgccct

SEQ ID NO: 98330 - DNA, 910 bp, Zea Mays
ggtcgtccggagcttcagtcgggaagagaatagcaaggaagataaggaggctctcgccgtctcgcacaggctcgttgttcctcttatccgcggaggaagaaccttggcccgacaccatgctcccaatggccgtccaccccaccaccacgccggccttgtccccgcgcgcccgcgtctcgccgcacaggcctcccatctcctccctggcggacccctcgtcctccccctgccatcgcatcgtcagtttcaaaagcaggaggctgccacttcgctctctccacatcgccgctgccgctgccgccggggcagaggaagaagaggcgcaactaggtggaagtgtgaacgcggtcgacgaggaggaagcggagaataaggtggtggtgcccgagagacaggacccgatgctggtactcaagttcatctggatggagaagaacatcggcatagcactcgaccagctggttcctggctatggcagcatcccgttgagcccgtactacttctggccgcggaaggacgcgtgggaggagcttagagccaagttggaagagaaagagtggatctcgcagaagcagatgatcatccttctcaaccaggccaccgatatcatcaacctctggcagcagggtggtgggaacctgtcgacatgagtccctccccgccctgttctttcaaccgtgcaaagcttgcgttttgttggtttcactacaggctctctctgttgttaatgttaaaagtatggtacatggccttgtagatcggttcaaactgttctcaggtatggccttttccatggaaatcatcttgtgatttatcttagttattatgtgtatcagtcgtccaccccccccccccccccccccccccccccccgggaaaatcaagaaacatatccttttcggtgtggtta

SEQ ID NO: 98331 - DNA, 1567 bp, Zea Mays
ttgtcgatggctccgctcctccgcctgcgcctgcccggtgggccagatagcccacatgcaccgcgcagtattagggctgccacggtggcgccgacacgcgtcgatatctcattggagtgcaggactcggaggcagcccatttctaggcagcgccgtctcttcgcgcaccccccaattcgaacgacggagcacgacgcacgcagagccgcagagatccgtcacactgcaagttttgaaaactgaactgtaagatggcatcagcagagctttcccgtgaggaaaatgtgtacatggcgaagctcgccgagcaggcagagaggtacgaggaaatggttgagttcatggagaaggtagcgaaaactgttgactcggaggagctcactgtggaggagcgcaacctcctgtctgttgcatacaagaacgtcattggagcccgccgtgcctcatggcgcatcatctcctccatcgagcagaaggaggagggtcgaggcaatgaggaccgtgtaacactcatcaaggactaccgtggcaagattgaaactgagctcaccaagatctgtgatggcatcctcaagcttctcgaatctcaccttgtgccgtcttccaccgctcccgagtccaaggtcttctatctcaagatgaagggtgactactacagataccttgctgagttcaagactggagctgagagaaaggacgctgctgagaacaccatggtggcatacaaggctgcccaggacattgctttggctgagcttgctccaactcaccctattaggcttggactggcactcaacttctcagtgttctactatgagattctcaactcacccgatcgcgcctgcagtcttgcaaagcaggcttttgacgaggccatctcggaactggacaccctgagcgaggagtcctacaaggacagcactttgatcatgcagctccttcgtgataacttgaccctatggacttctgacatctcggaggaccctgcggaagagatcagggaggcgcccaagcacgactcgagcgaggggcagtaaagccggctttacgtgcctagaagctagtacctagtgtttgctgctgtctaatgacactatgcaatgtgatctggaccctggtttcttgggtgcgacgcttgtagcagccgtgttatgattatttgtcgggaaaatttgggggctccccatatgagatgctgccgggcaagacctcggcatcccacctcgtttcaggcgggggacgctggagcgtggtccggttgtgttgggaagccccttaaactgttgtcgcttgcattttaaccttttcatcgccgttcagtggtcctaaatctatggctcgtctcagtggtctagtatatgttttcttggttctctcttgattcctcacacggtgagtgggaccgttcgcatttgtctgtcccatcccatcttaacggtgaatgtgttttgtttggtgtctcgttctgatgtgaatttgcagcatctcgatttcatcttcaataagatagtattatataaatactgtcctttcagattagactattaaaaatatattctaacaaatc

SEQ ID NO: 98332 - DNA, 1377 bp, Zea Mays
gacgcttgcttgcttttgcgtccgatttgtaatctaaacatctcgtttccgcacgggtttggtgcgcgtctacttgtggttgggcctctttcgatcgagtaggctcgaggacggggatccatgcccgcttgacctgacgtgatacgcgtactacggatccgtcaaagcctgtactccagacgaaccagtcgattctgtgtaatcatgcatattaagcggcagtttttaccgcttgaaggtcgtcgtagttaggtgctcagatctggcgcttttcaaggttagaggaagtgattgaagctaggagacatgatttcagctaggtttagtttgtggttcattggagacaaaattcgccaagcagatactgtagtacacgttgaattttcgtgatttatactgagaattgtgctttccatctggaaattccccatctgaatatggctagctagagatcgtggctagctagtagctctccgtgccacggatcaataaagtgttaatcgtgcgatgaagttagctcaccgcttgtcctctcaacactgcagatccgtcacactgcaagttttgaaaactgaactgtaagatggcatcagcagagctttcccgtgaggaaaatgtgtacatggcgaagctcgccgagcaggcagagaggtacgaggaaatggttgagttcatggagaaggtagcgaaaactgttgactcggaggagctcactgtggaggagcgcaacctcctgtctgttgcatacaagaacgtcattggagcccgccgtgcctcatggcgcatcatctcctccatcgagcagaaggaggagggtcgaggcaatgaggaccgtgtaacactcatcaaggactaccgtggcaagattgaaactgagctcaccaagatctgtgatggcatcctcaagcttctcgaatctcaccttgtgccgtcttccaccgctcccgagtccaaggtcttctatctcaagatgaagggtgactactacaggtattatgattgtatgaatcccagtaagacttccacatttgctatgagaattgtgtttttgcttgactgattcagttgtcgtgattagataccttgctgagttcaagactggagctgagagaaaggacgctgctgagaacaccatggtggcatacaaggctgcccaggtcacctttttttgtttcattaaatattcattgtgcaattttgtttgtgaaccattatgcttgtagctttttttcacatcatgtttcattacaagtttgctgaaaagggtttgtggtgcattcaggacattgctttggctgagcttgctccaactcaccctattaggcttggactggcactcaacttctcagtgttctactatgagattctcaactcacc

SEQ ID NO: 98333 - DNA, 162 bp, Zea Mays
ggttggaccgttgaaacaatccagggcatcatcgccagcatgaaaggtgactatgaatatcgcgttgacgattacttcatcaaaaatgccgagctctccaaagaacgccgcgatatctccaaaaagctgaaagctatgggctaaatgaaaaacggcgaagcg

SEQ ID NO: 98334 - DNA, 110 bp, Zea Mays
gatctaatattattggttactcttcacgttacaaatacgtgaaacaaacaacagcaaaacacttaaggccttgtttggttattcccattatacatggattggatgagatt

SEQ ID NO: 98335 - DNA, 373 bp, Zea Mays
gttgccgatggaggggagcactttgtcgtcgtactcgagtccgagggaggagaagttgtgcgggcgcgtgcggatgtcgaagatgaagggcttctgcagccagggcacgaggaaatgggtgccctcgccgacggtctccgggagcaccccgcggaaacggtcgaagatgacggcgcgctcgccgccgtcgacggtgtagagcgacgcggaggcgagcgaggccgcggctccgagccccgcagccaccttcgcgatgttggtcaggaacgacaccgccgcgggaccgccggccatggttgtttcggtgggatccgggagcgcggcggcgcggggacgaaaaccctagcgagggaggggatcgggtctggctggc

SEQ ID NO: 98336 - DNA, 1357 bp, Zea Mays
ccggccggtgccaagcatcgacattgcccacggccacgggagatattagacccacagcccagcggcactgccgttcatcagagctccctatttccaagcgcgtcacctccgatcagagctccctatttccaagcgcttcacctccgatctctctctctccctccagtctccacgcaccgtcgctcgccgtgctcccgctcacccacgcagttctcggctccgtcctacgaacgaacccagccccagatttcttccagtcccaaacgactcgaccggatccatcctttcccgcgtttattcatttcaattcagattttggggggtggtgctttcttccttgtcctaatttggtcaaaatgggcagcaacaagaacggcgtttccggtgccgctaactcgaacgcggtcaacggcgcctcccctgcctgtgtgcccggcgtcgtgtgcttcctcgtcggctccgcgttcggcgccatggccgtgctccacgcatcctggctggcggaggtcggcggcgagtgggcatccgcggcgcggtgggctgctcgacctgccggatcgatcggcgcccaccgcctgctcgtcacgatctcgcttctgttcctggccgccagcgtctggcgcctcgccaagcgctccgccgctgtggaggcgcgcgtcggcagcacggactcgaaccgatgtcctgataagccggtctcggggtcggggtcgcagtcgcagtcgcaggctgacagggaggaagatgacaatgttggagagaccatcgattcagaagaaggctatgtgcagcatctgaggaggaggctcaagaaggagatgaaactgaagactgatgcgctcgacgacctggacaatgagaggtctgcttttttcttactcatgaccaagaatgagtacctggaaaaagggaaggcgcaggtactgcagaatcaggaagagatgattcattacctggaaaatgagaagcggctggtagagagggaggcgccgcagtcccagaaaatgatgcaggagcagcagaaggctatgatcgagtcacttaagtcgatgatcaagatgtctggaatgcaacccaaggacagcagagataagaagtagctaactcttggttattggtagttcaatagaacagcaagccaagaaagccaaacagggattgcccatgttttgaaaactcggatgctcctttaccatgcatagctcttcacgagaaatatctaaaatctacctatagatataccatctcttgaaacctatctaggtacttatctaatatgagcaacacatgtacttgatcgctctacctttacaaatgctcattgctagtattatttgtgggctattgttcttgtgac

SEQ ID NO: 98337 - DNA, 1157 bp, Zea Mays
gtatgcagctttcttcagttttaccgcagccctggttcccaaaacgcctgacgccgcctcaccaacaaacaactacctcgcctgaacagccttcgccatcccgtacgccgccgccgaagcgagcgctccaatgacagcggtctggacggcactggcgaacggccggttccccgtgaagcggcccttgacgtagccgaagaaaagcagcgcggccagcgtgactccgacggatgtgagcatggcatcctgcgcggcggagacgagcacgtagggcaggagagggaccagcccgccgaccacgtaggacagtgcgatcgtgaaggcgctctgcagagcccttctgggatccggtctctccagtcccagctcgaacctggacacacatttttccccggcctgctggttagctgaagaaaacaaaaccatctgccttccgtcggtcggttgtttatgactgataacattatgtaacagttgatcatactacctcatcatgaagtctagccaagcttgagggttccgcctgagcccggcgacgacagggccgtactcctgcggctcgagcccataccgtgacatgatctctccaatctcagcggcctctggaaacggacgatcgatcaatcaaggattttcaaggcaccaaaaaaacggctatgagaaatgctactgcttagttaatgtgtgtgtaccggtgtctgggacggtgatgatctcctcctgctcccttctcatctcccgcttgtagtggtccgcctcgctctgggccgcaagttaccctccgagtcccatggagatggcgccggcggcgacctcggcgaggccggcggtgaggacgagcgaggagggcgcgctggcgccggagagccccgcggcgagggcgaagggcacggtgaggccgtcggacacccccatgatgacgtcccgcaccacttcccccgccgtgaaatgccgctcccggtggctcggccgcttctccagcatcggctgcccccacgtcgcgccgtcgccgtccatagatcgcccggtagggagggaagcgcgtgcgtggtgaacgggctacgcagatgcagtgcacgcttgattggggtttcgggtggaagtggaacgccgcgtggaactgctagtgcgttctgaatcctgaatctcctccgcct

SEQ ID NO: 98338 - DNA, 101 bp, Zea Mays
agcccattttattttatgaagccgagtactttgaccagcaacagcaaatatgcattcctgcggcaccaacggaatgcagcaccaacatagaaacgcctaag

SEQ ID NO: 98339 - DNA, 106 bp, Zea Mays
atgaacaaggtatccttgttttgtactcatgaaaaatacaccactgtgtcaaatggtactaaacacccaaacagacaaatagctcttatagtgtttctatactaaa

SEQ ID NO: 98340 - DNA, 1481 bp, Zea Mays
gtgattagcaaaaccggccgtttggttggggacagaccacggctaccgaacagccgggttccacgaccaacccaaccgcgggggaaaggggaaaaccccacggcccggagcaacccttgggaaagtcgtcgacgccgttgagttcgaggcgaccggcggctcgccgccccgccacagcgccgctgcgatttcttctgatccctgtggctcagcgcggagggttaaatggcaaatagagcaagatggatgatgaagtacgaaaagggtcttgttgatatacttcatgagaacaatacttcacattatcgtacccaaaacggttggagaacggaggggtggaggaaaatcgttagggatttcaatgtaaggtaccccgaagcaaagtttagtaaaatgcaaatccaggaacatgagactcaattgaagaaagattataagttgataaaatctatcctccaacgtgatggtgtctcatgggaccagagtgcatccatggttagaacaacagatgaaatctgggatgatataatcgaggatatgcccaaggcacggaagtaccaaagtaagagctttccattgctcgactcactagaactgttatttgatggtgagcacctccatccacctcaccgggcacacatgcatagccacactacctacagctggaaaaggctgagaagagctgtgctatgtgctgataccttttgttttactaaaacaaatatgttactgtgataggtccaattcctgaagggggacagaaatcgccttccagcgtacctcagaatgttggtgaaaatgttgacgatggaggcaacaataccagcacagtcccaggtttgtctgaaagacctagtggaacgtttaacacaagcgttactgaggcatggaataatatcagcctactccagcaaacagcattaggacctcaaggcatagatgatctcgacacgctgcaaaaacgcggcgaagaggtgctggaacggctacagcatggcgcggaccgaaggctaccgagagctgatgaccaggcgcagtcgagttcttgtgtagaactgcagagggacaggcgcaagaagcggaaggccccggacgtccagcagatgatggagacctatttgaatttcaggatgaagcaagctcacgtcaaagaacaaagagcgaaggacgctggccagttcacgatttcaggctgtatcaaggctctgcacaccatggccgatgtgtcagacgaggtcaaggtgttagcctctgatgttttcaaggacgctgagaacagggagatctttctctcctatgaacccaggctgcgcagcttgtggctgaagagggaagttggcaagctactctcctgatagtggtgttttgtttgttacctgtgtcagtgagtcagtctgacattcgattctggagggagctattgaaggtctaggcttcattcacaaactctattaaaccatctccgtcagtttgagagaaca

SEQ ID NO: 98341 - DNA, 1276 bp, Zea Mays
gtgattagcaaaaccggccgtttggttggggacagaccacggctaccgaacagccgggttccacgaccaacccaaccgcgggggaaaggggaaaaccccacggcccggagcaacccttgggaaagtcgtcgacgccgttgagttcgaggcgaccggcggctcgccgccccgccacagcgccgctgcgatttcttctgatccctgtggctcagcgcggagggttaaatggcaaatagagcaagatggatgatgaagtacgaaaagggtcttgttgatatacttcatgagaacaatacttcacattatcgtacccaaaacggttggagaacggaggggtggaggaaaatcgttagggatttcaatgtaaggtaccccgaagcaaagtttagtaaaatgcaaatccaggaacatgagactcaattgaagaaagattataagttgataaaatctatcctccaacgtgatggtgtctcatgggaccagagtgcatccatggttagaacaacagatgaaatctgggatgatataatcgaggatatgcccaaggcacggaagtaccaaagtaagagctttccattgctcgactcactagaactgttatttgatggtccaattcctgaagggggacagaaatcgccttccagcgtacctcagaatgttggtgaaaatgttgacgatggaggcaacaataccagcacagtcccagcaaacagcattaggacctcaaggcatagatgatctcgacacgctgcaaaaacgcggcgaagaggtgctggaacggctacagcatggcgcggaccgaaggctaccgagagctgatgaccaggcgcagtcgagttcttgtgtagaactgcagagggacaggcgcaagaagcggaaggccccggacgtccagcagatgatggagacctatttgaatttcaggatgaagcaagctcacgtcaaagaacaaagagcgaaggacgctggccagttcacgatttcaggctgtatcaaggctctgcacaccatggccgatgtgtcagacgaggtcaaggtgttagcctctgatgttttcaaggacgctgagaacagggagatctttctctcctatgaacccaggctgcgcagcttgtggctgaagagggaagttggcaagctactctcctgatagtggtgttttgtttgttacctgtgtcagtgagtcagtctgacattcgattctggagggagctattgaaggtctaggcttcattcacaaactctattaaaccatctccgtcagtttgagagaaca

SEQ ID NO: 98342 - DNA, 1451 bp, Zea Mays
gtgattagcaaaaccggccgtttggttggggacagaccacggctaccgaacagccgggttccacgaccaacccaaccgcgggggaaaggggaaaaccccacggcccggagcaacccttgggaaagtcgtcgacgccgttgagttcgaggcgaccggcggctcgccgccccgccacagcgccgctgcgatttcttctgatccctgtggctcagcgcggagggttaaatggcaaatagagcaagatggatgatgaagtacgaaaagggtcttgttgatatacttcatgagaacaatacttcacattatcgtacccaaaacggttggagaacggaggggtggaggaaaatcgttagggatttcaatgtaaggtaccccgaagcaaagtttagtaaaatgcaaatccaggaacatgagactcaattgaagaaagattataagttgataaaatctatcctccaacgtgatggtgtctcatgggaccagagtgcatccatggttagaacaacagatgaaatctgggatgatataatcgaggatatgcccaaggcacggaagtaccaaagtaagagctttccattgctcgactcactagaactgttatttgatggtccaattcctgaagggggacagaaatcgccttccagcgtacctcagaatgttggtgaaaatgttgacgatggaggcaacaataccagcacagtcccaggtttgtctgaaagacctagtggaacgtttaacacaagcgttactgaggcatggaataatatcagcctactccagcaaacagcattaggacctcaaggcatagatgatctcgacacgctgcaaaaacgcggcgaagaggtgctggaacggctacagcatggcgcggaccgaaggctaccgagagctgatgaccaggcgcagtcgagttcttgtgtagaactgcagagggacaggcgcaagaagcggaaggccccggacgtccagcagatgatggagacctatttgaatttcaggatgaagcaagctcacgtcaaagaacaaagagcgaaggacgctggccagttcacgatttcaggctgtatcaaggctctgcacaccatggccgatgtgtcagacgaggtcaaggtgttagcctctgatgttttcaaggacgctgagaacagggagatctttctctcctatgaacccaggctgcgcagcttgtggctgaagagggaagttggcaagctactctcctgatagtggtgttttgtttgttacctgtgtcagtgagtcagtctgacattcgattctggagggagctattgaaggtctaggcttcattcacaaactctattaaaccatctccgtcagtttgagagaacactcccctttttcctaaaacctgccatatataggggaattaggtgaaaagagccgctccagcatatcctatctcaatcatctttttctatatttttcaatcc

SEQ ID NO: 98343 - DNA, 1508 bp, Zea Mays
gtcgcgcaccacccgcagttaatccgagccgtctatcgcgcttctacacggccgaccttctgtgacagttcgggcaccgacgtccgtctccgtacttccggctgtgtgcgaactgcgaacgcgtgatcgggaccctccgcaaacgcgacgcgaaggtcagcacggacaactctatccctccgccgcgaccctgaccccccacctcgtcggcgatgagtttctcttccaacggcgggaagaagccggctcccggcggcggccgcaggggtcccgccatccgcacgctcgctgacataagccgtgggcccgccggcttcccaggtgccggaggcggcgacagcggcagcgacgacgacgagccacaggaatactacaccggtggcgagaagagtggaatgcttgttcaagatccaacaagaagaaatgatgtggatgcgatatttgaacaagccagacaagcgggtatcaaaggaatgcctcctcctcttggtggcgagtcttccagctctaggagctttacagggactggccgacttcttacaggggagacaatatcatctgctgcacctcaggaaccagtaccaattcgagtacgccacaatatacatttgtggaacaatggctttagtgtggatgatggtccactgagatactacgacgatcctgaaaatgcagagttccttgagagccttaagatgtcaaagtgccccaaggagctggtgcctactgatggagaacatgttgatgcgtctgttattagaaggatggaagattacagggaacctgtaaggcctcgatcagctttccagggtgttggaagaacccttggtggtggaccttccccagatgagagcgcaacagctgctcctgcatcagcggcccctgctgcttcgaggtccgctggcgttgtcgtggatgactcccagccatttacgtccatacagctgaggctggctgacggcactcgcatggtcgcccggttcaacatgcaccacaccgtgggagacatcaggtcctttatagacgcagctcggcctggagctgcaaggccttatcagctgcagacgggtttccctcccaagcagctggctgacccaacgcagaccgtggagcaagctgggcttgcaaactctgttatcatgcagaagatgtaaatgcttcggctggcaacctggggagctcggatgcatcgtactgcatcttctgaaaaccgtaatattatggttgatcatgttatcagatactgctctggtgcatcattctcattcatggttacttacagtagcatctggtgcctcgttgggagcacaggagtttataattcatctaggaactgaagtatgctttctgatttacggcagagcgccgaatcgatggttatgtatgtctggttataaccaaccattgcatcactatttttcatttttaatattggtgttacgatatttcgtgttgccatggccgcttccttcaaattgaagcgcgactcgcaagtcgcagcataatta

SEQ ID NO: 98344 - DNA, 979 bp, Zea Mays
cttaggcataaagatttgtcgagctattattaagttcttcttacttaagtctatagtaacaggacatcacagtatcttttgaatgggacatgtaaacatgaatagttgaatgccttcatcgttctcacactaactgtatgccgtttcgggttttcagagccttaagatgtcaaagtgccccaaggagctggtgcctactgatggagaacatgttgatgcgtctgttattagaaggatggaagattacagggaacctgtaaggcctcgatcagctttccagggtgttggaagaacccttggtggtggaccttccccagatgagagcgcaacagctgctcctgcatcagcggcccctgctgcttcgaggtccgctggcgttgtcgtggatgactcccagccatttacgtccatacagctgaggctggctgacggcactcgcatggtcgcccggttcaacatgcaccacaccgtgggagacatcaggtcctttatagacgcagctcggcctggagctgcaaggccttatcagctgcagacgggtttccctcccaagcagctggctgacccaacgcagaccgtggagcaagctgggcttgcaaactctgttatcatgcagaagatgtaaatgcttcggctggcaacctggggagctcggatgcatcgtactgcatcttctgaaaaccgtaatattatggttgatcatgttatcagatactgctctggtgcatcattctcattcatggttacttacagtagcatctggtgcctcgttgggagcacaggagtttataattcatctaggaactgaagtatgctttctgatttacggcagagcgccgaatcgatggttatgtatgtctggttataaccaaccattgcatcactatttttcatttttaatattggtgttacgatatttcgtgttgccatggccgcttccttcaaattgaagcgcgactcgcaagtcgcagcataatta

SEQ ID NO: 98345 - DNA, 1628 bp, Zea Mays
aaagcgaaaaatgcccgcccgcacctgcgtgcgtgtgctgtgtgggcatgggcagcgtcaccaaagcgaggctcctctcgtcccaagcgccggttaactccgtctcagcgcacgcggcacgcccctaatcttcattcccccgaaaccctagccggtccttggccttgtcccggtcgcgccgctcccgtcgcctcttccgcggaagccgtcctctgcgcgtcggcggcggtggagatggcctcctcgtcggcatcttcgaggcaccaggtcaccatcaccctcggccgcagcggtcaggttgttaaaaggaggactatatctgatgatattaacggcgatgaaatgccattgtcggggaaaaaacgatctgtgagggataggttaggaagtaatgtgtctgattctgatttttatggaagccagcagaggaacaaaaggcaacagacagaaattaatagctcacatggagatgatggttcagatcgcttggttggcaaggatgatctgagactgaaactcatgaggaaaggctcgtttcagaggagcaatggtggtgcagaacagaatacaatggatctccgtgaaaagctttcccgaaatcataagaagttgccaagatatgattctagaggccatgctgcagaatcaagggctagttatgatatgagagatgagccaccagagttaaggtccagatatttttcaagggaggatgtcctagggtcaaggaactcttctgttgtaagtcgagttccttattcaagaactgcggatgacttgttaaaatcgaacccttcaagaaaatcttacccctcatggacagacgatggtttgaggcacagatcacctgaaaggattttaagtgttcgtagtgatgtgtctccaccagtaggttatgatcagattaggtccatgccaccacttagatctgccggttcctcaagacctcaaagttttattacaagaggtgctcctgatacgccaaggagtcaaccatatgctggcaaagccaccatttctgttgatacagtacagagaactaatgggatcactccatctagtgcacctttgcctaaggtccctgttatggctgaagccccgcttacagttactggattgttgaattcgttgggtcttgagaagtatattgttctctttcaggctgaggaggtggatatggctgcattgaggcaaatgggggagagtgacctcaaagacatgggggtacctatgggcccgaggaagaagattctccttgcagttggccctcagtcgaaacaacggcaaatatgagcaacatggtgtgggacttgcgagcatttgttggcaactgaaaatattggtgcaagaacgccagatagcagatattgtatatcaatccatattgtctgtctcaatccactcttttgttgctgatggcgttgtttcgtgccgtagttgacaccatgtaaagtctattcagccagctgttaatctaggttctatcattcagtctgcctgcccactgttattgtttcgaaacgggtggatacgtgtggtttactcgtgacgattagtttggaatggatgctacgttcgattcttttgtgtcacaagacgccgagcctttaagaaggccctatttatct

SEQ ID NO: 98346 - DNA, 872 bp, Zea Mays
cttgcctttttcttatataaagtgtaattgactgcttatccctgtggttccactctcactttgcaggcaacagacagaaattaatagctcacatggagatgatggttcagatcgcttggttggcaaggatgatctgagactgaaactcatgaggaaaggctcgtttcagaggagcaatggtggtgcagaacagaatacaatggatctccgtgaaaagctttcccgaaatcataagaagttgccaagatatgattctagaggccatgctgcagaatcaagggctagttatgatatgagagatgagccaccagagttaaggtccagatatttttcaagggaggatgtcctagggtcaaggaactcttctgttgctgaagccccgcttacagttactggattgttgaattcgttgggtcttgagaagtatattgttctctttcaggctgaggaggtggatatggctgcattgaggcaaatgggggagagtgacctcaaagacatgggggtacctatgggcccgaggaagaagattctccttgcagttggccctcagtcgaaacaacggcaaatatgagcaacatggtgtgggacttgcgagcatttgttggcaactgaaaatattggtgcaagaacgccagatagcagatattgtatatcaatccatattgtctgtctcaatccactcttttgttgctgatggcgttgtttcgtgccgtagttgacaccatgtaaagtctattcagccagctgttaatctaggttctatcattcagtctgcctgcccactgttattgtttcgaaacgggtggatacgtgtggtttactcgtgacgattagtttggaatggatgctacgttcgattcttttgtgtc

SEQ ID NO: 98347 - DNA, 875 bp, Zea Mays
tcataagctttctccaagttaatgaaaaccatgtgtagattctttttttggtccatgtaatgctccattacttgtcttattaagaaaatggcttacatggttgacctttcgtgcatgaaaccaatttggttcatagagatcctcattatttctctcagatggtactcgataactctctcccattgcttcatgtaatcttttaacatttgttaagtttgctcattgttatctaagaatctaggttccacatctgaattataataacttctgcagtcttagaattttattagttatatatggttatgaattcctataccggtgttcatagaatcatacttgaagtttaataacattgctctatgcaactttgcaggctgaagccccgcttacagttactggattgttgaattcgttgggtcttgagaagtatattgttctctttcaggctgaggaggtggatatggctgcattgaggcaaatgggggagagtgacctcaaagacatgggggtacctatgggcccgaggaagaagattctccttgcagttggccctcagtcgaaacaacggcaaatatgagcaacatggtgtgggacttgcgagcatttgttggcaactgaaaatattggtgcaagaacgccagatagcagatattgtatatcaatccatattgtctgtctcaatccactcttttgttgctgatggcgttgtttcgtgccgtagttgacaccatgtaaagtctattcagccagctgttaatctaggttctatcattcagtctgcctgcccactgttattgtttcgaaacgggtggatacgtgtggtttactcgtgacgattagtttggaatggatgctacgttcgattcttttgtgtc

SEQ ID NO: 98348 - DNA, 432 bp, Zea Mays
cggcgtcggcggggcggtagaaccccacgagcaccgcggcgtgcggagcgagcccgcggcggtcgtggaggtacctgcggatgacgaacgtgaggagctgcgcgtaccgctgggccggggcccagcgcacggtctcggagaaggaggaggcgaggaggcggacgagcgcctcggccacggcgtcgtcgtcggggccgcgcgagagggcgcgcacagtgaggaggccgtgcgggaaggcgtgctcgtagcggaaggccgcgagctcgtcgagctgcgagagcgcgcgcggcgataggaagacaccggggccggggccggggccgaggccgtttccgtccgaggcgggtgtggcggttggaggggcgaggcggatgtggcgcggcggggggcaaggggagcagaagaggagagcgggcgacgccgccatgggag

SEQ ID NO: 98349 - DNA, 711 bp, Zea Mays
atgcccccgtcgatctatcgtctgtgtcccccttcctccctgggtctccctctcatcctctatcgcggtctgctcctcggcaagatccacggccgggtctcctcctcggcgagatccacggccgggcaagcccatcctgcccacgctgctctccatggaatagcggtcccagcagatctcctctcccccgcggtccactcccccaacgagctgctctccatggaacaccggggtcgcggtctcctactcggcgagatccatggctggcgtcctctgctgctgagcccacctcccgcctctctgatcgaggctctactcgattcggtgcttcgttgtgtccatggggggttttcagctgggcctctggagcttttgtgcagtgaggaggtcagcgctgggactcagattcatggtgctcctaatgcacggaagcaaagtctccaggctgcaaagtctgcgaactcaggccatgggggaaaaatcatacaaaatcctcatagccacagaacatcactaaatggagatgagatgtcatgtataggtacaatatttctgacatgtcttgaccttctgacagagtacattaccacagagaagtgtgtagtggtcagggaagacaaaagactgctgaccgtcctttttccagatggccgtgatggtcgcacctttaccttgaaggtacacatgagaatgtatggtgagaagacttaa

SEQ ID NO: 98350 - DNA, 1719 bp, Zea Mays
gcagtggccacgtatcgctcagacgggcagcctggcctgtgggccttggtaggattccgcctcatctacctgcacttgcacttgcagttgcagcactgcagcaatcacagacagacacgagcaagtgtgagtgaggaggtttgcctgcccatctccatcggccatcgctgcctccccagtccccacatccgcacacatttttacccctcgcggcggccccaccgaccgccggggcgcagcggcgtcgccgcgggcaacgccgtcacgtcacgtgcatcacgacaatctcctcctccgcctcgtcttcctgccaggccgcgggagcaccagcccagcggcagatcagtcgaggcgggcgattccagggtttagagaggagcggagatggtgaaggtcatccaggggcgcccggccgagatggggttccggatgccggcggagtgggagccgcacgagcagtgctggatgggatggcctgagcgtccagataactggagggagaatgctggtccagctcaagaggtatttgctagaactgcaattgccatttcaaagtttgaacccgtcacgttatgtgcaagtgccaagcagtaccccaaagtccacgagctgatggaacatcaaaccaacatcagggtcgttgagatgagcatgaacgattcctggttccgcgacatgggccccacttttgtcacctgtaaaggggattcaggaattgcagaacaaacaatagcaggaattgattggcaattcaatgcctggggaggaatctatgacgactggagtcttgacagcgatgttgccaagaaaatagtcgagatcgagaggatccctaggtttccccaaaaaattatccttgagggtggaagcattcatgtagatggagaaggtacatgcattacaacggaagaatgcttgctgaatcctaataggaaccccaacatgaccaaactagagatagagaatgagctgaaggattttcttggagtctcgaaggtcatctggatacctcgtggactttatggcgacgaggatacaaacggccacgttgacaacatgtgctgcttcatcaaacccggtgtgatcctgctgtcgtggaccgacgacgagaaggattatcagtacgaacggtcggtcgaggcgctgtctgttctctcccagtccgtcgacgcgaaagggcggcagctccaagtggtgaagatccacgtccccgggcctctgtacatgacagaggaagaggcacagggcgttgtttcatcgggacattctgtgccgaggccagcgggcacgagattggccgcctcgtacgtcaacttctacatcgccaatggtgggatcatagcgccttccttcggcgacaggtgggacgaggaggcgtatgcggttctccagaaggcattccccgatcacgaggttgtatatctttgttttttgttccacctccgaactttaaggctgctcacaatcgcattgtgtgcggttgaacacttgttagaggttagaagatggtgtgatgaatgctgtggttggcacgcgcaggtggtgatggtcgaaggcggacgggagatcgcgctgggaggtgggaacattcactgcatcacgcagcagcagcccgtgcgcccgtcctagctgaaaccggcgtcgacgcgaggggcgatgaagagcttgcgagtagtattgttttgtatgctgctcctgtcgttatcacgctcaccaata

SEQ ID NO: 98351 - DNA, 1796 bp, Zea Mays
gcagtggccacgtatcgctcagacgggcagcctggcctgtgggccttggtaggattccgcctcatctacctgcacttgcacttgcagttgcagcactgcagcaatcacagacagacacgagcaagtgtgagtgaggaggtttgcctgcccatctccatcggccatcgctgcctccccagtccccacatccgcacacatttttacccctcgcggcggccccaccgaccgccggggcgcagcggcgtcgccgcgggcaacgccgtcacgtcacgtgcatcacgacaatctcctcctccgcctcgtcttcctgccaggccgcgggagcaccagcccagcggcagatcagtcgaggcgggcgattccagggtttagagaggagcggagatggtgaaggtcatccaggggcgcccggccgagatggggttccggatgccggcggagtgggagccgcacgagcagtgctggatgggatggcctgagcgtccagataactggagggagaatgctggtccagctcaagaggtatttgctagaactgcaattgccatttcaaagtttgaacccgtcacgttatgtgcaagtgccaagcagtaccccaaagtccacgagctgatggaacatcaaaccaacatcagggtcgttgagatgagcatgaacgattcctggttccgcgacatgggccccacttttgtcacctgtaaaggggattcaggaattgcagaacaaacaatagcaggaattgattggcaattcaatgcctggggaggaatctatgacgactggagtcttgacagcgatgttgccaagaaaatagtcgagatcgagaggatccctaggtttccccaaaaaattatccttgagggtggaagcattcatgtagatggagaaggtacatgcattacaacggaagaatgcttgctgaatcctaataggaaccccaacatgaccaaactagagatagagaatgagctgaaggattttcttggagtctcgaaggtcatctggatacctcgtggactttatggcgacgaggatacaaacggccacgttgacaacatgtgctgcttcatcaaacccggtgtgatcctgctgtcgtggaccgacgacgagaaggattatcagtacgaacggtcggtcgaggcgctgtctgttctctcccagtccgtcgacgcgaaagggcggcagctccaagtggtgaagatccacgtccccgggcctctgtacatgacagaggaagaggcacagggcgttgtttcatcgggacattctgtgccgaggccagcgggcacgagattggccgcctcgtacgtcaacttctacatcgccaatggtgggatcatagcgccttccttcggcgacaggtgggacgaggaggcgtatgcggttctccagaaggcattccccgatcacgaggtggtgatggtcgaaggcggacgggagatcgcgctgggaggtgggaacattcactgcatcacgcagcagcagcccgtgcgcccgtcctagctgaaaccggcgtcgacgcgaggggcgatgaagagcttgcgagtagtattgttttgtatgctgctcctgtcgttatcacgctcaccaatacgctcgcgaaataagccacgccagcagttcgttgacacatactgtatgagtactattatactatacggcacaaacggccaaacgccacacaggcgtggatcaaaattgtactagttcctgtctacaattcgtggcctttatcatcctgattggctgcccgtatattatttatcttaagtcatctatattcttatcttaagtca

SEQ ID NO: 98352 - DNA, 357 bp, Zea Mays
atgagctgcatcagaagaactagtgcaataatgagtagtctcgctgtaagcatcttgctcatcgtctccttgctcactcttcacctccccatcgcatgtggtcgtcgccacgttgtcgtgctaaatccaagcgataatgggatgatgaacagcagaggaaagaaggttagttccaccgtgggagcggcggcggcggcggcgacgacgcggacggtgaagatgcgcgcggcagtcaagcacgggtacgcggtcgccgaggtgtacgagatgctgaggagggactacgcgtccaaggcgaggcgccgccggccgatcaacaacggcgccacgccgctgcaggtgaacaagaagccctag

SEQ ID NO: 98353 - DNA, 534 bp, Zea Mays
atggcggggagctctgcctcgctcccttcagcgacacatgcgctctcgtctccgtgctgggggacattgtatgatgctgctacgacagcttacgggcaggtctgcgcgcagtttcatagctgggcgatcaggaaggatgttggtgctggcatgtacactcttccaaccagggagcagttgataatctgcttgcaaacctggttggcttactcacttcttgtcgatggattggcttttgctggacaggccatacttgcaagtgcatttgctcgtaaggaccatccgaaggccactgccacagcttctcgtatcttgcagctggctttggtcttgggacttctcctaagcatacttcctggtgttggtctgcgcatagggtctagattatttacatccgatcagggtgtactgcatcatatctacataggaataccgcccagcactctagacaacctcttcctgaactcaaaccaagagcttcatgtacaccgtcatctacactgcaagaatgcagagaggggaattgtagtgtag

SEQ ID NO: 98354 - DNA, 1388 bp, Zea Mays
gccgtcagccccagccgaaggaacattaacaaaccgcccgccgcttccttcacgtaatctcgcgtctcctccgccgcccccgtcttctcctcccctcttgctaaagcaaagcaacctgcaacccgcaattattcctcccccgcacgcgaaatccgcccgcagctcttcgtccccggaggaccaagcctgcgcaccagagatgtcgtacgcctacctgttcaagtacatcatcatcggcgacacaggcgtcggcaagtcgtgcctgctgctgcagttcaccgacaagcgattccagcccgtccacgacctcaccatcggcgtcgagttcggggcccggatgatcaccatcgacaacaagcccatcaagctccagatttgggacacggctggtcaagagtcattcagatccataactagatcatactacagaggcgctgctggtgctcttttggtttatgacataactaggagggagactttcaaccaccttgcaagctggctggaggatgcgagacagcacgccaatgctaacatgacaataatgcttgttgggaacaagtgcgatctgtctcacaggcgtgcggtgagctatgaggaaggcgagcagtttgcaaaagaacatggtcttatcttcatggaagcctctgcgaagaccgcacagaatgtcgaggaggcatttgttaagactgctggagcaatctacaagaagattcaagatggtgttttcgatgtatctaatgagtcctatggaatcaaagttggatatgcaatccctgggcaatctggaggtgctggtagctcgtcttctcaaggtggtggctgctgcagctaatctgctaacgccgttaacaaatgcatatctgtcgtgtgtcacataccagctgcgctgtgaaaaatagttattgctgctccagggtgccttgttatttgacgcaccaatggatcctgtgcctgatcgacttgagagattcagtttatttacgtcaggtgtttataaactccctgtaaatcactagattcttcactgttttccgtcattaggcactcaacaatcgtgtgtccgtttgcatgtgtaaataaggcacatctacatattgtttgatatgatattaatttgtcctgttcgaatatgttggcaagtttcgtaaaatatgcgtcttcaatacatgcccaaagaaaaaatgttaggacaccttttgtgtgtgcttcgatgattgcatcttgctggttttgtagttaaatggcatcaagcggagaggttgagaagagagaaaaaaataaaagtaaaataaaagaaggggaaaaagaaataagatgcagagagagagagataaaaggaaagaaaaacaaggtttgcagctattgtacctcgttgttatatatatata

SEQ ID NO: 98355 - DNA, 806 bp, Zea Mays
cagcggcggcggcagctgccgagccccatcccccgatccaaagcacctcaaaccaccgctctgcccagatccacccagctactgcggtgagcccgtggggacggtggcggtggcgacggagcggttccctcgggaggtgagctcggaggcgttattccactgcgtccgcctaggcccggtccacgagactggcaccgaggtggcgtaccagaccagcgtcaaaatcgccggccacgtcttcaagggcatcctgcacgacgtcggcccggacccatcatcgtcggtcgctgcgagcgacgactacttccgccacgccaccgacgggtcctccccgggcacggtgggcgaaggcagcgtcgcgggggcgggcccgtctcgtcattggctgtggtcatggacccgtacccgacgccaacgcccgaaccgtacgacggctcacatttcttccacggccatccgaggtacgttgaaaataaatattggatctcaaaaatggcattctagatctatctaccatttcgcttacacattatggctatctcacattcatgggttgcaagatatggacgacatgattttctccatattaggaaagctggaagagccttttgaactcacttttttttgctaacaatggtgttatggtgaaacatagttttgcgtgtatgtaccaacaactaaaatataaatacgacattatcatagttgagtacaggaataattattcttatatcttattgtaaaatctaaaacagttctcctgtagatggttagcttgcattttacgctacaattacctcagatca

SEQ ID NO: 98356 - DNA, 740 bp, Zea Mays
gacactgttagaaagagtgttataaaccactgtgattagcctaacgcacctattaatctcactggacttcctatttcatctacatgtacacaccgtgtaataaatcataatgttccctccctccctaaaaaaacaaaggcttccaatcggcgaaacaaagcactgctggcgtcgcggtccagatgtcactttcgaggagtgcgctggaactactactgctggcggctggccagaccagagcccgcaccccggccagggccaggtgtcgtctgcgctttcgccggctacaaaacgccaagtcgtctacggacactgccactgccagccacacgagtttggtccggtccagctgtagagttgtcgccacggggttcgcgacccttccggtgttccagttggcggcgctcgacgcctcgactcctctcctcgagcctttctccgtctcctatccgctgcgcgtgtcgagctccacagaggatgcgcatgcgggtgatgagtttgagtttcctcatacgagcaagcaaatgctaaggcaatttaccagtctagctggcttggccatctcctgtagtcctgtgctggacagtcaacagcctcaggaacgtagtacaattttggagagtttcaggtttatttactcctaattcactccatccactagttcattagagttggtggttgtcaggggatttggcacaagttcaatcggaaaacaaaattagacagacgaccatctcttc

SEQ ID NO: 98357 - DNA, 2565 bp, Zea Mays
aaagagagacggaggcaagtaatggcaggaggaaccttcttttcctgactccctgtggctgcagagtgcccatcatttgtccctgatccttgtgcttcgttcctgttgcgctttccttgggccatcggtagactgagccgtcgcgaagccttcccgttcccacaaggggtgtggcgtggagcgagcctcgccaccactgggctcctccggcgacctcctccctccagtcacaggttgagcaatccaagctgagatggaaggccatgtagcaatggggtggaaggatcctaatccaggccaagaatcttccatggtcttccaatccagagctgttcggccagacaccgtagaggggcacagcaacgaggacgttgaagccggatttgagaagcatggcttgtcagccgccttaaactcgcctcagcacgaaggccgatcactgccactgaccccacagtttggccagaactccagtcctggaagcagcctcgccgagaggatgcaggcaagagccggattcaaggtgccgaagctgaacatgcctttcagcacggtagctggagatgatagttcagtgccaggagctccatcgccctacctcacgatcccgcctggcttgagcccagcaacgctgctggagtcacctgtcttcatttcgaatgccctgggacaagcctcaccaaccacggggaagctattcttgtttggtagcacaaatgacaacgatcctattcgacctggaggccctccagttggagatggcactgatgctttttctttcaagcccttagatctgaaatcctcacactacactgctgaagtaatgaaggaacaaaatacgcagtcttctgtgaagactgaagctaagactcaggcagtccaagaggctaatttgctgggccaactgaaccagcagaatcacgatgggcagacaaacatgaatagtgacggtgctcgtgactccaagctcagccgtcttgcgtctggcaccggtgcaggcaatgaacacgcatcacccccggattacggccagagagccgaggaagctgatgcgagggaagactacccggcggcaatggccgttacagcgccagcggaggacgggtacagctggaggaagtacgggcagaagcaggtgaagcacagcgagtacccgcgcagctacttcaagtgcacgcatcccaactgcctggtgaagaagaaggttgagcgctcgcacgaggggcacgtcacggagatcatctacaagggaacgcacaaccacccgaagcccacgcagagccgccggccaggcgcaggcgcgcacccgttgggcggcggtgcgcaggcggacgcagccgacaacctgcaggggtcacaggcaaacgcggcggaagccaaccaggcgtggcgtgcgggtgtccaggatggcgtggacgcgacgtcgcccccgtcggttcccggtgagctctgtgactcggcggcgtcgatgcaggtcgactgcgcggcccggtttgggtcccccgagggcgcggacgtgacgtctgccgtgtctgacgaggtggacggggacgacagggtgactctgactcatggcggtgccaacgcggcggagggcgacgaactggaatctaaacgaagagctgaccgtctgtctggttatttcaggaagctggagtcatacgccattgacatgagcactgcgtcgagagctgttcgcgagcctcgagtggtgatccaaacgacgagcgaggtggacatcctcgatgacggctaccgctggcgcaagtacgggcagaaggtcgtcaagggcaacccgaatccaaggagctactacaagtgcacgcaaccgggctgcacggtgcggaagcacgtggagcgcgcgtcgcacgacctcaaggccgtgatcaccacgtacgagggcaagcacaaccacgaggttcccgccgcgaggaacagcggccacccgagcgccgcggcggcgccaggcgcgggtggcccgcgcaggcaggagcacccgtccgtgcacgacggcctgatgagacagcacctgggcggctgcggcgtgccgttcggcctgccgccgccgccgccgccgccaagggacccgctggcgccgatgcgcaactacccgacgtacggcttcactgcccttggcgccggctccacgtcactgccgagcctgccgatgctcccggtgttggcgccgtcctccctgcaccagcacccgctgctgaggcaccggcaggcggtgcaggctgccggtctcgcgtggcgcccaaggccgacgtgaaggtagagggcagcgttgccggcggcgggatcccgtcggtgtaccagcagatgatccgctgcgggctgcgtctgccccaccagatgtagatacttaaaagtggagaggattagagtgattctcaagttcgtttcttaccattcctgttagtatgagttcgtgataagtattatagcgtggaaactgacgcccgctgcattcgttttttttcacccttctgttccacttcattttttcccgtatttatttatttactacccttcctcaatgatattcggttcttcttgttcagc

SEQ ID NO: 98358 - DNA, 150 bp, Zea Mays
atgtgccaccgctatcataattcagggatggctttcatatttctcagcctttcaaaacagaaagtcacggccataggctcatcttgcatagaacaatgcaatatgagtcgcttacaccttgatcatagccttttctttgtgaatacataa

SEQ ID NO: 98359 - DNA, 109 bp, Zea Mays
caggcctttgcagctttatgctgatgggggttaccagctgagaattaggcgtcttgagggtacccctgattatggtccccgacacccatatagactcgcgggtataaaa

SEQ ID NO: 98360 - DNA, 1021 bp, Zea Mays
tctcctccctttccttccgcgcgcagtcgcaaatgcctggcattcagtgaactcgcctcggtctcgcctacggcactgcgatcttcttcgacgcctgcatcgcgacatgaagtgcgccgtcgtcgtcgcgtcgctggcggccgtgatgtccgtgctcgtgctacacgccggcgcgcatcggccgctcgtcgagccgtcccacgcaaacgcaacgacgccgcagatgacggacacatggccgcctaccccacaggccaaccgcgccaacctcaccgcgatcctggtcctcgacgggcccttccgcaccttcctcgggtacctgcagcagaccaacctcgtggaggtgttccagaaccaggcgtacctaacggaccagggcatcaccatcttcgtccccgtcgacagggccttcgccgccgtcaagccgccggtgctgtcgcgtctctccacgcagcagctcaagaacctgatgatgtaccactcgctgcccaagcactacgagctcgcggacttcgagcggctgagccagaccaggccggtgacgacgctcgccggcagcctgtacacggtgaacatgacgtacgacgcgggcacagtccacgtgcactcttcatgggccgacgccaagatcgtcgggagcgtgtccgtggacgcccccatggcgatctacgagctcgaccgggtgctgctaccggactcgatcttccgcgcccagccgcccgtcgcggcgctcccagacgtgcccgccgcgccgcctccaagcaacggggacgccgctcagcccgtgacggagccggagccggttgtaacgccgcagtacggctcgccggcagtggcggacgccccagtctcggcgtgcgccgacgaccacggtcggttcgcgtgctatgtggtcgccgcggcactcggcgcagtagcgctgctcgcattgtgaaaaactgtgatagaggtgctttatgctttagtgcgacagtttctggttttcttacccttaaaatataaatcttttatacttagcatc

SEQ ID NO: 98361 - DNA, 117 bp, Zea Mays
attaacttcccatcctctactttttatctcccgcatcagtttcccctatattttacccctatatcccactacaaccataaaatattatctcctatacctacttttcatatactaccg

SEQ ID NO: 98362 - DNA, 2600 bp, Zea Mays
gcaaagcaaccaagtactactaacacgcgcgcggccgcacggccgcaccgcaccgcaccgcacaatcgaccgtccccgcgacggtccagactgcagagagaccagaccccaacgccgctcgcgttcgggcgcggcccttcccccgccgccctcaccaccctccctccccgccgcttccgccccgtaggacgcggccacgttcgccgcctcaaactgttggtgctgtggctggggcgagaggagcggcggcgctagggtttcccatggacggcggcgaggatcggacgttcaaggcgaactttaccggcgagggggtgacgatgctgcaggaccgcgtcaaggagaagctcagggagctcatgggcgactactccgacgacacccttgccgagtatgttgtagtgttgctaaggaatgggagacgcaaggatgaggctgcaaaggagctacaggtttttttaggcgatgacaatgatgcatttgtatcctggttatgggaccatctgtcctcaaatctgcacctttatgttcatgctaaatctgcctcttctaaggatgatgttaaaagcactcacagtgctgccagaggattgcctgttcacagtgtgacaagcagcatgcaagttaatcatgaacctgaagctgaaacccagaagacagtggtgactcataaaaaaagagattggggtcatcaaaaaagagattggggaacaattgatcgaggtcaatcagaagcagttcctcttagaagcgttgtagccaatgtttctcatgtggatgaaaaggattttcacaaatcacatgcagatgaaaaggcttttcataaatcacattctctaagacgaacccgctcgcctgacatgcataaccacagaaagaggagcagagaggcagatgtgcagtctaccaagaggtcatcccacccagttgttagtgcaccacgtcggcttcttcagtttgctgttcgtgatgctgtcagaactgtgcagccagttacttctagttctgaatcagattccaagcgtattcgttctgtagtgtcaacattggcatcagattccacacttgatatcactcatattaggttacagaaaacaaattcagatttgagagtaccaggtgccacagcagcactaagagctgcagctgaggctgctggagatgctctcaaggatagcttttctagaagtgtttttagtagattgggcagaatgcccacaataaattctactgaacaatcaccttatcacagagaacaagatctcaaaggcaaagaatatgggaatatagataatatacaagcagaaaatcaagttgaatttgacgaaagaaatcaacatggtggcagcgatgtttacatgcgcgatcagagaacagaggaagctactggttttattcccaatattgatgagtatgatcagaacagtgcagttaggtctaatggattgggttctcgccaaagcgcattgcctgctagtggaggtaaagagtcattagtactggggtatgtaagaggagcttctgaaataagaagcagaagattgatagcccaggggccacatgctggttcaggaccaagaccatctgaaaagacccaaaatgtttctggtaacactaacatgcagaagcttccaattcatgtaactggagatgccgttgcatttgatcatcaagtgccaatggagaaggttgctgatgcaaggaaatcacatgtgaagaccgcacaggctaatgatgtatccatgatgactgataagtccaaagatttgatacagccgagttcaatgctgcaggcacagaaggcttctggtgctgctggatcaaatactacaggccaacctgaaggtggccctgattctagaactgtctttgttagtaatgtacattttggttcatcaaaagatgctctttctcgtcacttcaataagtttggagcggtcttaaagacccatattgtgactgatggtgtcactgctcagcatatattgagtttttgcacaaagaatcagcagaacaggcattaaccctgaacgggacatcatttatgtcacgcattttgaaggtcgttcggaaaagctccactgaagtaacccagctgcctgtcttgccccgtgcttcttggggatcaccatttgcttcaaggctcattagaactgcatacccaaggccgaactatcccggtgcaattcgtgggcgactatcactcaggggtgctgcccggagtttacagtggaagcgtggtgttgctgattcaggagatgttggaaaacctagtccaactgcacctgggaatcagttggtcaccccggccacacgaaacttcacctacacacgcacggagccaaaaacaaatgcgggagcgatggcatgactgatcagctgtagcatgccgcagcgtcgcagaaagagatcgtgattgatgactgtttcgtagtccattcagctgcttttggtaaatatttaagtagctgcagatcttagtttgtagcaggctggtttttgtggacctcaaccttgagtaatattctgtgaggttttctgtgctgatttttcaccgtcagcacacccgttgttctgctggctgttcggagttcgtggat

SEQ ID NO: 98363 - DNA, 2674 bp, Zea Mays
gcaaagcaaccaagtactactaacacgcgcgcggccgcacggccgcaccgcaccgcaccgcacaatcgaccgtccccgcgacggtccagactgcagagagaccagaccccaacgccgctcgcgttcgggcgcggcccttcccccgccgccctcaccaccctccctccccgccgcttccgccccgtaggacgcggccacgttcgccgcctcaaactgttggtgctgtggctggggcgagaggagcggcggcgctagggtttcccatggacggcggcgaggatcggacgttcaaggcgaactttaccggcgagggggtgacgatgctgcaggaccgcgtcaaggagaagctcagggagctcatgggcgactactccgacgacacccttgccgagtatgttgtagtgttgctaaggaatgggagacgcaaggatgaggctgcaaaggagctacaggtttttttaggcgatgacaatgatgcatttgtatcctggttatgggaccatctgtcctcaaatctgcacctttatgttcatgctaaatctgcctcttctaaggatgatgttaaaagcactcacagtgctgccagaggattgcctgttcacagtgtgacaagcagcatgcaagttaatcatgaacctgaagctgaaacccagaagacagtggtgactcataaaaaaagagattggggtcatcaaaaaagagattggggaacaattgatcgaggtcaatcagaagcagttcctcttagaagcgttgtagccaatgtttctcatgtggatgaaaaggattttcacaaatcacatgcagatgaaaaggcttttcataaatcacattctctaagacgaacccgctcgcctgacatgcataaccacagaaagaggagcagagaggcagatgtgcagtctaccaagaggtcatcccacccagttgttagtgcaccacgtcggcttcttcagtttgctgttcgtgatgctgtcagaactgtgcagccagttacttctagttctgaatcagattccaagcgtattcgttctgtagtgtcaacattggcatcagattccacacttgatatcactcatattaggttacagaaaacaaattcagatttgagagtaccaggtgccacagcagcactaagagctgcagctgaggctgctggagatgctctcaaggatagcttttctagaagtgtttttagtagattgggcagaatgcccacaataaattctactgaacaatcaccttatcacagagaacaagatctcaaaggcaaagaatatgggaatatagataatatacaagcagaaaatcaagttgaatttgacgaaagaaatcaacatggtggcagcgatgtttacatgcgcgatcagagaacagaggaagctactggttttattcccaatattgatgagtatgatcagaacagtgcagttaggtctaatggattgggttctcgccaaagcgcattgcctgctagtggaggtaaagagtcattagtactggggtatgtaagaggagcttctgaaataagaagcagaagattgatagcccaggggccacatgctggttcaggaccaagaccatctgaaaagacccaaaatgtttctggtaacactaacatgcagaagcttccaattcatgtaactggagatgccgttgcatttgatcatcaagtgccaatggagaaggttgctgatgcaaggaaatcacatgtgaagaccgcacaggctaatgatgtatccatgatgactgataagtccaaagatttgatacagccgagttcaatgctgcaggcacagaaggcttctggtgctgctggatcaaatactacaggccaacctgaaggtggccctgattctagaactgtctttgttagtaatgtacattttggttcatcaaaagatgctctttctcgtcacttcaataagtttggagcggtcttaaagacccatattgtgactgatggtgtcactggtcagtcaactggctcagcatatattgagtttttgcacaaagaatcagcagaacaggcattaaccctgaacgggacatcatttatgtcacgcattttgaaggtcgttcggaaaagctccactgaagtaacccagctgcctgtcttgccccgtgcttcttggggatcaccatttgcttcaaggctcattagaactgcatacccaaggccgaactatcccggtgcaattcgtgggcgactatcactcaggggtgctgcccggagtttacagtggaagcgtggtgttgctgattcaggagatgttggaaaacctagtccaactgcacctgggaatcagttggtcaccccggccacacgaaacttcacctacacacgcacggagccaaaaacaaatgcgggagcgatggcatgactgatcagctgtagcatgccgcagcgtcgcagaaagagatcgtgattgatgactgtttcgtagtccattcagctgcttttggtaaatatttaagtagctgcagatcttagtttgtagcaggctggtttttgtggacctcaaccttgagtaatattctgtgaggttttctgtgctgatttttcaccgtcagcacacccgttgttctgctggctgttcggagttcgtggatagagggtaaaatatataaaaagtagttttaaatgaaaatacgaacgcgataggtaggttgc

SEQ ID NO: 98364 - DNA, 2251 bp, Zea Mays
aacacctctggtgtgtccggagtggaggttaaagtacttggagtatgttgtagtgttgctaaggaatgggagacgcaaggatgaggctgcaaaggagctacaggtttttttaggcgatgacaatgatgcatttgtatcctggttatgggaccatctgtcctcaaatctgcacctttatgttcatgctaaatctgcctcttctaaggatgatgttaaaagcactcacagtgctgccagaggattgcctgttcacagtgtgacaagcagcatgcaagttaatcatgaacctgaagctgaaacccagaagacagtggtgactcataaaaaaagagattggggtcatcaaaaaagagattggggaacaattgatcgaggtcaatcagaagcagttcctcttagaagcgttgtagccaatgtttctcatgtggatgaaaaggattttcacaaatcacatgcagatgaaaaggcttttcataaatcacattctctaagacgaacccgctcgcctgacatgcataaccacagaaagaggagcagagaggcagatgtgcagtctaccaagaggtcatcccacccagttgttagtgcaccacgtcggcttcttcagtttgctgttcgtgatgctgtcagaactgtgcagccagttacttctagttctgaatcagattccaagcgtattcgttctgtagtgtcaacattggcatcagattccacacttgatatcactcatattaggttacagaaaacaaattcagatttgagagtaccaggtgccacagcagcactaagagctgcagctgaggctgctggagatgctctcaaggatagcttttctagaagtgtttttagtagattgggcagaatgcccacaataaattctactgaacaatcaccttatcacagagaacaagatctcaaaggcaaagaatatgggaatatagataatatacaagcagaaaatcaagttgaatttgacgaaagaaatcaacatggtggcagcgatgtttacatgcgcgatcagagaacagaggaagctactggttttattcccaatattgatgagtatgatcagaacagtgcagttaggtctaatggattgggttctcgccaaagcgcattgcctgctagtggaggtaaagagtcattagtactggggtatgtaagaggagcttctgaaataagaagcagaagattgatagcccaggggccacatgctggttcaggaccaagaccatctgaaaagacccaaaatgtttctggtaacactaacatgcagaagcttccaattcatgtaactggagatgccgttgcatttgatcatcaagtgccaatggagaaggttgctgatgcaaggaaatcacatgtgaagaccgcacaggctaatgatgtatccatgatgactgataagtccaaagatttgatacagccgagttcaatgctgcaggcacagaaggcttctggtgctgctggatcaaatactacaggccaacctgaaggtggccctgattctagaactgtctttgttagtaatgtacattttggttcatcaaaagatgctctttctcgtcacttcaataagtttggagcggtcttaaagacccatattgtgactgatggtgtcactgctcagcatatattgagtttttgcacaaagaatcagcagaacaggcattaaccctgaacgggacatcatttatgtcacgcattttgaaggtcgttcggaaaagctccactgaagtaacccagctgcctgtcttgccccgtgcttcttggggatcaccatttgcttcaaggctcattagaactgcatacccaaggccgaactatcccggtgcaattcgtgggcgactatcactcaggggtgctgcccggagtttacagtggaagcgtggtgttgctgattcaggagatgttggaaaacctagtccaactgcacctgggaatcagttggtcaccccggccacacgaaacttcacctacacacgcacggagccaaaaacaaatgcgggagcgatggcatgactgatcagctgtagcatgccgcagcgtcgcagaaagagatcgtgattgatgactgtttcgtagtccattcagctgcttttggtaaatatttaagtagctgcagatcttagtttgtagcaggctggtttttgtggacctcaaccttgagtaatattctgtgaggttttctgtgctgatttttcaccgtcagcacacccgttgttctgctggctgttcggagttcgtggat

SEQ ID NO: 98365 - DNA, 2325 bp, Zea Mays
aacacctctggtgtgtccggagtggaggttaaagtacttggagtatgttgtagtgttgctaaggaatgggagacgcaaggatgaggctgcaaaggagctacaggtttttttaggcgatgacaatgatgcatttgtatcctggttatgggaccatctgtcctcaaatctgcacctttatgttcatgctaaatctgcctcttctaaggatgatgttaaaagcactcacagtgctgccagaggattgcctgttcacagtgtgacaagcagcatgcaagttaatcatgaacctgaagctgaaacccagaagacagtggtgactcataaaaaaagagattggggtcatcaaaaaagagattggggaacaattgatcgaggtcaatcagaagcagttcctcttagaagcgttgtagccaatgtttctcatgtggatgaaaaggattttcacaaatcacatgcagatgaaaaggcttttcataaatcacattctctaagacgaacccgctcgcctgacatgcataaccacagaaagaggagcagagaggcagatgtgcagtctaccaagaggtcatcccacccagttgttagtgcaccacgtcggcttcttcagtttgctgttcgtgatgctgtcagaactgtgcagccagttacttctagttctgaatcagattccaagcgtattcgttctgtagtgtcaacattggcatcagattccacacttgatatcactcatattaggttacagaaaacaaattcagatttgagagtaccaggtgccacagcagcactaagagctgcagctgaggctgctggagatgctctcaaggatagcttttctagaagtgtttttagtagattgggcagaatgcccacaataaattctactgaacaatcaccttatcacagagaacaagatctcaaaggcaaagaatatgggaatatagataatatacaagcagaaaatcaagttgaatttgacgaaagaaatcaacatggtggcagcgatgtttacatgcgcgatcagagaacagaggaagctactggttttattcccaatattgatgagtatgatcagaacagtgcagttaggtctaatggattgggttctcgccaaagcgcattgcctgctagtggaggtaaagagtcattagtactggggtatgtaagaggagcttctgaaataagaagcagaagattgatagcccaggggccacatgctggttcaggaccaagaccatctgaaaagacccaaaatgtttctggtaacactaacatgcagaagcttccaattcatgtaactggagatgccgttgcatttgatcatcaagtgccaatggagaaggttgctgatgcaaggaaatcacatgtgaagaccgcacaggctaatgatgtatccatgatgactgataagtccaaagatttgatacagccgagttcaatgctgcaggcacagaaggcttctggtgctgctggatcaaatactacaggccaacctgaaggtggccctgattctagaactgtctttgttagtaatgtacattttggttcatcaaaagatgctctttctcgtcacttcaataagtttggagcggtcttaaagacccatattgtgactgatggtgtcactggtcagtcaactggctcagcatatattgagtttttgcacaaagaatcagcagaacaggcattaaccctgaacgggacatcatttatgtcacgcattttgaaggtcgttcggaaaagctccactgaagtaacccagctgcctgtcttgccccgtgcttcttggggatcaccatttgcttcaaggctcattagaactgcatacccaaggccgaactatcccggtgcaattcgtgggcgactatcactcaggggtgctgcccggagtttacagtggaagcgtggtgttgctgattcaggagatgttggaaaacctagtccaactgcacctgggaatcagttggtcaccccggccacacgaaacttcacctacacacgcacggagccaaaaacaaatgcgggagcgatggcatgactgatcagctgtagcatgccgcagcgtcgcagaaagagatcgtgattgatgactgtttcgtagtccattcagctgcttttggtaaatatttaagtagctgcagatcttagtttgtagcaggctggtttttgtggacctcaaccttgagtaatattctgtgaggttttctgtgctgatttttcaccgtcagcacacccgttgttctgctggctgttcggagttcgtggatagagggtaaaatatataaaaagtagttttaaatgaaaatacgaacgcgataggtaggttgc

SEQ ID NO: 98366 - DNA, 676 bp, Zea Mays
gtatcgctattactgcctacatatggaataaagtgcatttccctgtctacacaacgtgtagcccgtttggggttttataacaataaaacctcggggtataacttatataagccattgcattctgttaagtggcagtagcattgtctgcattttccatttctgtgtgtctgccccagtataatttgaattttccactgttttgcttttcatgattgttagtatagtattctaagaaaatgtagtttgtcccaataatggaaatcctataacctgattataacatacaccagattgtgcaagacgaaaggaaaggttaaaagctcatcatattatcctaataaaggtagtacatgatcatgtgtttcaaagtttaagctgcaagtttaaggtcctactactagcaagaagataacagctaccactattgatatgcaacctctgttccattctatatagcatgtgttttctcttgtcacaaattagtaatgttttggattctcttaaatcagccgttatgatctttggttgcgttctactttctatgggttgagttcggatagttaaaaatggcatgagtagatttgtcttgaaatgtagttttgtaagattactctttggctctgttttatgattatcttgtgataaaaaagtcctagtgaaacttgagttttgaaga

SEQ ID NO: 98367 - DNA, 1856 bp, Zea Mays
atcgctattactgcctacatatggaataaagtgcatttccctgtctacacaacgtgtagcccgtttggggttttataacaataaaacctcgggaggtcatcccacccagttgttagtgcaccacgtcggcttcttcagtttgctgttcgtgatgctgtcagaactgtgcagccagttacttctagttctgaatcagattccaagcgtattcgttctgtagtgtcaacattggcatcagattccacacttgatatcactcatattaggttacagaaaacaaattcagatttgagagtaccaggtgccacagcagcactaagagctgcagctgaggctgctggagatgctctcaaggatagcttttctagaagtgtttttagtagattgggcagaatgcccacaataaattctactgaacaatcaccttatcacagagaacaagatctcaaaggcaaagaatatgggaatatagataatatacaagcagaaaatcaagttgaatttgacgaaagaaatcaacatggtggcagcgatgtttacatgcgcgatcagagaacagaggaagctactggttttattcccaatattgatgagtatgatcagaacagtgcagttaggtctaatggattgggttctcgccaaagcgcattgcctgctagtggaggtaaagagtcattagtactggggtatgtaagaggagcttctgaaataagaagcagaagattgatagcccaggggccacatgctggttcaggaccaagaccatctgaaaagacccaaaatgtttctggtaacactaacatgcagaagcttccaattcatgtaactggagatgccgttgcatttgatcatcaagtgccaatggagaaggttgctgatgcaaggaaatcacatgtgaagaccgcacaggctaatgatgtatccatgatgactgataagtccaaagatttgatacagccgagttcaatgctgcaggcacagaaggcttctggtgctgctggatcaaatactacaggccaacctgaaggtggccctgattctagaactgtctttgttagtaatgtacattttggttcatcaaaagatgctctttctcgtcacttcaataagtttggagcggtcttaaagacccatattgtgactgatggtgtcactggtcagtcaactggctcagcatatattgagtttttgcacaaagaatcagcagaacaggcattaaccctgaacgggacatcatttatgtcacgcattttgaaggtcgttcggaaaagctccactgaagtaacccagctgcctgtcttgccccgtgcttcttggggatcaccatttgcttcaaggctcattagaactgcatacccaaggccgaactatcccggtgcaattcgtgggcgactatcactcaggggtgctgcccggagtttacagtggaagcgtggtgttgctgattcaggagatgttggaaaacctagtccaactgcacctgggaatcagttggtcaccccggccacacgaaacttcacctacacacgcacggagccaaaaacaaatgcgggagcgatggcatgactgatcagctgtagcatgccgcagcgtcgcagaaagagatcgtgattgatgactgtttcgtagtccattcagctgcttttggtaaatatttaagtagctgcagatcttagtttgtagcaggctggtttttgtggacctcaaccttgagtaatattctgtgaggttttctgtgctgatttttcaccgtcagcacacccgttgttctgctggctgttcggagttcgtggatagagggtaaaatatataaaaagtagttttaaatgaaaatacgaacgcgataggtaggttgc

SEQ ID NO: 98368 - DNA, 937 bp, Zea Mays
aataaatgttcattttgtgatgctgcattttattttctgggtcatttgtgattcatcgtctattctattttttaaactacaatccaggatttgatacagccgagttcaatgctgcaggcacagaaggcttctggtgctgctggatcaaatactacaggccaacctgaaggtggccctgattctagaactgtctttgttagtaatgtacattttggttcatcaaaagatgctctttctcgtcacttcaataagtttggagcggtcttaaagacccatattgtgactgatggtgtcactggtcagtcaactggctcagcatatattgagtttttgcacaaagaatcagcagaacaggcattaaccctgaacgggacatcatttatgtcacgcattttgaaggtcgttcggaaaagctccactgaagtaacccagctgcctgtcttgccccgtgcttcttggggatcaccatttgcttcaaggctcattagaactgcatacccaaggccgaactatcccggtgcaattcgtgggcgactatcactcaggggtgctgcccggagtttacagtggaagcgtggtgttgctgattcaggagatgttggaaaacctagtccaactgcacctgggaatcagttggtcaccccggccacacgaaacttcacctacacacgcacggagccaaaaacaaatgcgggagcgatggcatgactgatcagctgtagcatgccgcagcgtcgcagaaagagatcgtgattgatgactgtttcgtagtccattcagctgcttttggtaaatatttaagtagctgcagatcttagtttgtagcaggctggtttttgtggacctcaaccttgagtaatattctgtgaggttttctgtgctgatttttcaccgtcagcacacccgttgttctgctggctgttcggagttcgtggat

SEQ ID NO: 98369 - DNA, 892 bp, Zea Mays
ctctctctcacctcctgtcccctctcctctccgtgtccggtggagcttctccacctccggccaagatctggaaccagcgagggtgcccggcggttctcatcccggaccccgactctttcctcatctctgcaacctctggatcctccatctgcccccctgcaggatctggaagctgcacccgtcggggggagaagcaagcagcacatccagcccgctcgagctcgctcatctgacctcaccactgagcttccgcaggatcttcacatccccattccattgacaacgtgaaagagaacatgtgacggggctgccaagctacatgacaacgacgccgattgccgaatgccgagacaccgcgcacgctcttgcagataaagatgatcggttgatcgacgtggtatttgtaccactttgctgtccgtgaaagcccgctatataggtggtgacatcaagtgatcaagattttatggtgcgcaagaggttgggttatagttcccgtggccatcgaattccaactatgccacgtgttccaaactcagctcgggggaaacgttctaccagaagaaagaaagatgagaatgatgatatgtgtgcaatggatttgctcgcaactgtggcaggaaagttactagcagatcaggacaattcatctagcgttcctaataccagtgcagcgaaagctaaaaaaaggaaatcagttaaggaagaacactttgatgaaattccgcctctaaaaaatgtggctatggagaaagatgtgggttctggtagcgttagtgccttccctaggcaagctaaaaactgcctggcagaaaactcatcgacaagaaatggagctgatacagtattagagtcactaacagtgaaatcaaatatgctagcaaaaattcct

SEQ ID NO: 98370 - DNA, 1059 bp, Zea Mays
ccaggatgaagtgtgaggaaccttttcctgaagccgacgtcggagatgacagccagcagcctagagcgccttatcgaagccgctctctctctgacctgtactctgtccattgtcctgttcagatggcttcacaggacacgacggcgagctcccaggccatcgtccctgtttcgcctgcgccttcagacgtgggcgctctagccattgtgcccctttgtaagtccaaggggtctgaagtcgggcagaggcgcatgaggaggcccttcactgtcggcgaggttgaggcgctggtgggagcggtcgagcagcttgggactggaaggtggagagctgttaaaacgcttgcattcgacagtatagatcaccggacctacgtcgacctcaaggacaagtggaagaccctggttcacactgcgagcatatccccgcagcaacgaagagggcagccggttccacaagaacttctagaccgtgtcctcctagcgcaggcctactggtcccagcagcagcagcaggcgaggctctaggacaagccccgcggcaaggctcctctcctcttcctgagatctgttttccaagggaaagcttgtacttgtcctagattggcaacctatattgtttattttaccctatattgtttattttaccaaacaaagatgctaacatatagattggcaacctacaacacctatagaaaatggctgcaggctgctatgacaaattagtcactgtcagtgactgacatccgtataagtggaaaaacagtgacatgacatgctccggtcctgcggcttccagccaaacaacaacgaacccgcctcctcccctggcccgacgcgggctctcccgtctcctctgatggacgggaaccaaacctggccgccccctaccccctcgccgccgcccttctcctcccggccccgcgcgtcgccgtccccggcgacgcaccgccggcgccgccggcactccaaaaaacataagccccggcccgcgccggcgccgacgccgcagggcgcggacttctccgcgctcccgccggatctcgtccaccgggccctc

SEQ ID NO: 98371 - DNA, 3006 bp, Zea Mays
ccaggatgaagtgtgaggaaccttttcctgaagccgacgtcggagatgacagccagcagcctagagcgccttatcgaagccgctctctctctgacctgtactctgtccattgtcctgttcagatggcttcacaggacacgacggcgagctcccaggccatcgtccctgtttcgcctgcgccttcagacgtgggcgctctagccattgtgcccctttgtaagtccaaggggtctgaagtcgggcagaggcgcatgaggaggcccttcactgtcggcgaggttgaggcgctggtgggagcggtcgagcagcttgggactggaaggtggagagctgttaaaacgcttgcattcgacagtatagatcaccggacctacgtcgacctcaaggtgattttctcttaaaaataaagtcacattttttttagatattagttttgagtttccagttaaaagacctacaaaagcagccagttctggtcgatttcaatgctgtgctggtgctctgccatagccaccaccggtacatttctctgttcggtatcttgtggcgttcgaacacgctttgaaatgctgctgatggatgaaccaggacaagtggaagaccctggttcacactgcgagcatatccccgcagcaacgaagagggcagccggttccacaagaacttctagaccgtgtcctcctagcgcaggcctactggtcccagcagcagcagcaggcgaggctctaggacaagccccgcggcaaggctcctctcctcttcctgagatctgttttccaagggaaagcttgtacttgtcctagattggcaacctatattgtttattttaccctatattgtttattttaccaaacaaagatgctaacatatagattggcaacctacaacacctatagaaaatggctgcaggctgctatgacaaattagtcactgtcagtgactgacatccgtataagtggaaaaacagtgacatgacatgctccggtcctgcggcttccagccaaacaacaacgaacccgcctcctcccctggcccgacgcgggctctcccgtctcctctgatggacgggaaccaaacctggccgccccctaccccctcgccgccgcccttctcctcccggccccgcgcgtcgccgtccccggcgacgcaccgccggcgccgccggcactccaaaaaacataagccccggcccgcgccggcgccgacgccgcagggcgcggacttctccgcgctcccgccggatctcgtccaccgggccctcgcggccgcgtgcgcctccgacgtcgcggcggccagccgagcgtgccgcgcgtggtgggacgcgctgcggccgttgcgcgaggccgcggcgctgcacgcgtatggccgacgcgtcaagcacgaccccgtgacaggagccagagccgtagccgcagccgctgcctcgcgcgggggaggcgaacgtgtggagacggagaggcagcgcgctctggggctgttccggcgggcggcgaggctgggctccgcggcggcgatggtggacgccgggctgatgtgctgggaggacgggcgccgggaggaagccgtcggttactaccggagcgctgcggacctgggacatcccattgggatgtgcaaccttggggtctcctacctcgaagctgatccacccaaggccgaggaagctattagatggttttatccatcagcatctgcaggcaatgctcgtgctcaatacaacctaggcctttgcttgcagaacgggaagggtgtcaagcggaatcagaaggaagctgtaagatgtgatacctctgctatgtcggtgtcacacaccacttaaaattttccttacagtagaagtatttctgttttctatacgcattcagtggttgaaaaaaaactaggataattggtacactatcctattcatacaatctatgcatttaccacacctcttactagatatattaggaatagacaactgatgttcagttgacgaactactcgttaccctctgatctgatgatgctattgagtaccagactcttttgaagctctttaactcagctaagagaaagtagcttttaatttgaaaaaaagtaatcttggttgggtttcctctatcaatgtaattatgatcatgtcacctggaccaatcaaaatacactaaccagcagatactggactaccagcaagttcccatactctttttagtacttgagttgtgctgaatatgaaagagacttattaatgcaggcaaaatggtatttgcgagctgcagagggagggaatgtacgggccatgtataacatttccctgtgttacagctacggtgaagggcttgcacaggatccagtgcgtgctaagaggtggcttcaactagctgctgattgtggtcacaagaaagctctttatgagtgtggtattaagctttgtgcggcaggagacaaggtcaagtgtctcatgtatctagagctggcgacacggcgtggagaagctgctgctgctcacatgagggatgtaatacttgaatcgctctcggttgtgaatgcgcagcgtgccatgtcggatgctgataaatggaagcctaggacactccatcctagacctagaaggtgaggaaatgacgacgccaaagtgcagaagaaccatatcatcaagatgtccacaccctagtcatctgtggccagaattgaagcacagaaggtcgaagcaaacatgtatgcttcctcggcacccacagccacaggaatgtcagtagccatcctgtggctctctgtataaagccatccattggcagatgtaataccaggagaacttgtagtacagaaagttctgtagcaaatactacttcctcccttccaaattgctaccttaattctcgaatatttgtcaccactagttcatttttgaactaaaatgtgacaaatagaaataacggagcgagtataaaatactttggcttttctagatatgtattttttatacacttaaatacaaagtaaaaggaatgtatctataaatgca

SEQ ID NO: 98372 - DNA, 2545 bp, Zea Mays
ccaggatgaagtgtgaggaaccttttcctgaagccgacgtcggagatgacagccagcagcctagagcgccttatcgaagccgctctctctctgacctgtactctgtccattgtcctgttcagatggcttcacaggacacgacggcgagctcccaggccatcgtccctgtttcgcctgcgccttcagacgtgggcgctctagccattgtgcccctttgtaagtccaaggggtctgaagtcgggcagaggcgcatgaggaggcccttcactgtcggcgaggttgaggcgctggtgggagcggtcgagcagcttgggactggaaggtggagagctgttaaaacgcttgcattcgacagtatagatcaccggacctacgtcgacctcaaggtgattttctcttaaaaataaagtcacattttttttagatattagttttgagtttccagttaaaagacctacaaaagcagccagttctggtcgatttcaatgctgtgctggtgctctgccatagccaccaccggtacatttctctgttcggtatcttgtggcgttcgaacacgctttgaaatgctgctgatggatgaaccaggacaagtggaagaccctggttcacactgcgagcatatccccgcagcaacgaagagggcagccggttccacaagaacttctagaccgtgtcctcctagcgcaggcctactggtcccagcagcagcagcaggcgaggctctaggacaagccccgcggcaaggctcctctcctcttcctgagatctgttttccaagggaaagcttgtacttgtcctagattggcaacctatattgtttattttaccctatattgtttattttaccaaacaaagatgctaacatatagattggcaacctacaacacctatagaaaatggctgcaggctgctatgacaaattagtcactgtcagtgactgacatccgtataagtggaaaaacagtgacatgacatgctccggtcctgcggcttccagccaaacaacaacgaacccgcctcctcccctggcccgacgcgggctctcccgtctcctctgatggacgggaaccaaacctggccgccccctaccccctcgccgccgcccttctcctcccggccccgcgcgtcgccgtccccggcgacgcaccgccggcgccgccggcactccaaaaaacataagccccggcccgcgccggcgccgacgccgcagggcgcggacttctccgcgctcccgccggatctcgtccaccgggccctcgcggccgcgtgcgcctccgacgtcgcggcggccagccgagcgtgccgcgcgtggtgggacgcgctgcggccgttgcgcgaggccgcggcgctgcacgcgtatggccgacgcgtcaagcacgaccccgtgacaggagccagagccgtagccgcagccgctgcctcgcgcgggggaggcgaacgtgtggagacggagaggcagcgcgctctggggctgttccggcgggcggcgaggctgggctccgcggcggcgatggtggacgccgggctgatgtgctgggaggacgggcgccgggaggaagccgtcggttactaccggagcgctgcggacctgggacatcccattgggatgtgcaaccttggggtctcctacctcgaagctgatccacccaaggccgaggaagctattagatggttttatccatcagcatctgcaggcaatgctcgtgctcaatacaacctaggcctttgcttgcagaacgggaagggtgtcaagcggaatcagaaggaagctgcaaaatggtatttgcgagctgcagagggagggaatgtacgggccatgtataacatttccctgtgttacagctacggtgaagggcttgcacaggatccagtgcgtgctaagaggtggcttcaactagctgctgattgtggtcacaagaaagctctttatgagtgtggtattaagctttgtgcggcaggagacaaggtcaagtgtctcatgtatctagagctggcgacacggcgtggagaagctgctgctgctcacatgagggatgtaatacttgaatcgctctcggttgtgaatgcgcagcgtgccatgtcggatgctgataaatggaagcctaggacactccatcctagacctagaaggtgaggaaatgacgacgccaaagtgcagaagaaccatatcatcaagatgtccacaccctagtcatctgtggccagaattgaagcacagaaggtcgaagcaaacatgtatgcttcctcggcacccacagccacaggaatgtcagtagccatcctgtggctctctgtataaagccatccattggcagatgtaataccaggagaacttgtagtacagaaagttctgtagcaaatactacttcctcccttccaaattgctaccttaattctcgaatatttgtcaccactagttcatttttgaactaaaatgtgacaaatagaaataacggagcgagtataaaatactttggcttttctagatatgtattttttatacacttaaatacaaagtaaaaggaatgtatctataaatgca

SEQ ID NO: 98373 - DNA, 207 bp, Zea Mays
ataggaaatttataggaactcaatcctttgctctaaagggatatataggaaaatttcctatatgattttaatcctccaaaaattcctctatttttcctttgttccaaagggggcctacattagtgggttgctggtttcatcagtttatatccgaagcctgcaggcctgacatttgtgtccttgttatatcagaaatgtttgtccatt

SEQ ID NO: 98374 - DNA, 1483 bp, Zea Mays
gagacggctgtactgtactgatcactcctggcctctgcgaaggaaagaagaggtgggggaggctggtttggtggcctgtaccgatttgcagcagctgatggcggcgcctctgctcccctcttccgtctccgtgctcctctcgctccacatcgcgctgctgctggtcctctgctccagccaggtaggagattcctgctcctcagtgcgggactgcggcacgggcctctactgcggcaactgccccgccgcaggcaggaccaagctctcctgcatcagggacctagccatccagcccacctccattgtgaaggggctacctttcaacaggtactcatggctcgtcacccacaattccttttccatcctcggggagccgtcgcgcactggggttgagagggtcacgttctacaaccaggaggactccgtcaccaaccaattgaggaatggtgtcaggggattgatgcttgatatgtatgacttcaacgatgatgtatggctctgccactccctgcaagggcaatgctataacttcactgctttcgtaccagcagttgacacactaaaagaggtggaagcatttctctccgagaatcccacagagatcataacaatatttattgaggattatgttcattcaccgatgggactgagcaaggtctttactgctgctgacttgatgaagtattggtatccaatctcggaaatgccaactagtggcaaggactggccaagtgtcacagatatggttgcaaaaaaccgcaggttgctggtgtttacttctgatgcttcaaaggaggctagtgaaggaatagcttaccaatggagctacttgctagagaatgaactatcggagatgtccaacgatcctccatcttccacccacccgccacatccatcggcctccaccaatcttgtgccacccaccaccatgacgctaacaccaccatcctcttctacaccccctcacacttggaaccatagccgccacagtccaggacctggcccgatccatggcgaccatgcaggccttcctgacggcacccagattcccacagccaccaccgaccacaaccgtgccaccaccgccctctccacctccgccactttacagccttccatccaccaccacgccaggcgtgccccttcatctcttgccaatgccagcgtcaccatccccaatcccattatatgtgttggccccaataggaacaacacaatatacaataacgacatcaccatcgccattagaatcagcatctacatctccggaacatcacccacctcagggaggcggtacatggcggccatgttgcctgagcccatgtcgaccccacagggactagctccccagccttctgttcctccggcgacgagctccatcccggtgacctccgaggcagcagccgccaccagcacgtcgccaactgcgcccttgtcgcaggactccttcatggcattccagtgcaggactcccagacgttga

SEQ ID NO: 98375 - DNA, 923 bp, Zea Mays
cgacgcttcctggatgtatacctgaatttttgtctggatccggcatcagtccttgctacggttctgttgattctaaagttgccttccgactagttaatctggctgcataactcgtggtttcggaacccgtgttcgcttcaacgatgggtgtcaatgaactaactaatggttcggttggttatcgtctgctgggtgttaatcaacgaatgatttggttggttatcccccgtttgcaggtaggagattcctgctcctcagtgcgggactgcggcacgggcctctactgcggcaactgccccgccgcaggcaggaccaagctctcctgcatcagggacctagccatccagcccacctccattgtgaaggggctacctttcaacaggtactcatggctcgtcacccacaattccttttccatcctcggggagccgtcgcgcactggggttgagagggtcacgttctacaaccaggaggactccgtcaccaaccaattgaggaatggtgtcaggggattgatgcttgatatgtatgacttcaacgatgatgtatggctctgccactccctgcaagggcaatgctataacttcactgctttcgtaccagcagttgacacactaaaagaggtggaagcatttctctccgagaatcccacagagatcataacaatatttattgaggattatgttcattcaccgatgggactgagcaaggtctttactgctgctgacttgatgaagtattggtatccaatctcggaaatgccaactagtggcaaggactggccaagtgtcacagatatggttgcaaaaaaccgcaggttgctggtgtttacttctgatgcttcaaaggaggctagtgaaggaatagcttaccaatggagctacttgctagagaatgaacgtaagtacaactgtcgttgctct

SEQ ID NO: 98376 - DNA, 915 bp, Zea Mays
cttacaccaaggacaaacgcaagagttttcttctgtatccgaattaatacttcatttctcataatcatggcagctggagatccagggattgtgcctggttcttgtccaaacaggaaggaatcgcagccactgaactcaaggccggcatctctatttctgcaaaattacttccccacgatccccgtgcagaacgaagcatgtaaagagaattctgggctaccacaaatggcccaggcttgttatgccgcagctgggaataggatcccgaacttcatagctgtgaatttctacatgcgaagcgacggtggtggtgttttcgatgttcaagacagaatcaatggccgcaccttatgtgggtgtgacaccattgctgcttgccaggctggagcaccaatgggtgcatgcaaggacacgggggcaccaaatcagactacatcgccctctgtaaatggaaatgtctattcaggaactatagaattcaagacgcattccactagtgctgctagcaataacaacatccggagtagatctgtttttctgctaaggctgcagttgactttgctgctctttttctctttcaggctctagttttcatatatctggacctttttcccacctactgtatagctgaaagtaacatcagcttttgttgtgagcttgctttctctattgggatgacggttagtgccttgctagctttataatctatagttgggagggggtgtggatcaatgttaatgaaagaatgggtagagatcttcctctgttctccgaggaggagtaatacggctacaacctacaaagaaactgatgagtggaagttcatgctggttatgtgattactagatatatgcatgcgtgttgcacctagaccgaaattttgttcacatcaatggaaaccgcgtcttctctgtg

SEQ ID NO: 98377 - DNA, 2545 bp, Zea Mays
atggcagctggagatccagggattgtgcctggttcttgtccaaacaggaaggaatcgcagccactgaactcaaggccggcatctctatttctgcaaaattacttccccacgatccccgtgcagaacgaagcatgtaaagagaattctgggctaccacaaatggcccaggcttgttatgccgcagctgggaataggatcccgaacttcatagctgtgaatttctacatgcgaagcgacggtggtggtgttttcgatgttcaagacagaatcaatggccgcaccttatgtgggtgtgacaccattgctgcttgccaggctctagttttcatatatctggacctttttcccacctactgtatagctgaaagtaacatcagcttttgttgtgagcttgctttctctattgggatgacgatatatgcatgcgtgttgcacctagaccgaaattttgttcacatcaatggaaaccgcgtcttctctgtgccctctactgacgggtgggtcaccacgggtcccggactcggttggacacagggtccagcactccagcagccagccgtccaggcaccaggctcatccagtgttcgagtcctcgtcgacttcgctttcccgattcctaaccccgcaggccgcaggctcgcatcgccaagcatcttccgcgtctcttcggagacatctagtaaaagcatcttccgctactccgccctccgcctcccccgtctgcttcgcaatccgatccggcgaccggcggccatggatcctgcgccgcagacgcacccgatcctctcttacgtgctctcccgcatccccaacctctccatgaccaagacccccaccgccgagttcgacatcgagcagccgcctgtgcacaccccgtccccgcggacgccgtcctccgcgggagagttcgagctcgtcgagcgcatgccggggctgcgccacccgtccgtgctccgcgccatgacccgcgccgtcgccgacgtctccgccgcgcgctccgcgctgcaggtgctcggcccgcgccccgaccacgagctcgtcgactcctcccgcgccatagtggccgccgccgaggccggggattcgcggatccccgcgggcgacgtcgaggcgtgccgcgcggtggtgcgcctcgatgagacccacgacgcctacgaggccctgctgcacgaggccgagtccaggctcgagagggtgtaccgctccgcgatggaggggacggacctggatgacgaggcggcggagagcgtcaaggatcaagggccggtcgcggggcctgagggcggggacgcggcggtgggggaggaggtggtggcggtgctcaagcaggccgaggagggcaagccggtggacagcgtgcgcctcgtggatcgccagcttcgccatctgcccgaggcgttcgggaggatcctggggctccgtgtgctcgacgtctcccgcaaccagcttgaggttattccagatgctataggaggacttggtcatcttgaagagctttttcttactgccaatgatttggtatctctacctgataccattggactgctatccaatctgaagattttgaatgtatcaagtaataggcttagggcactgccagatagcatctccaagtgcaggtcgctagttgagcttaatgtgagctataatggtcttacttatctgccaaccaacattggttatgacttggtaaatctgcgaaaactctggattcatatgaacaaattgcgttctcttccatcatctgtctgtgagatgagatcgttgtatctcctggatgcccattttaatgaactatgcggtctaccatctctcttcgggaaacttagcggccttgaaattctcaaccttagcagcaacttcagtgatttgaaagagcttcctccctcgtttggtgacttgctaaatctgcgtgagcttgacctaagcaacaaccagattcatgctctccctgacacttttggtcggctggataaactggagaagcttaacctagagcagaaccctctagtcatgccaccagaggacattgtgaacaagggcgtggatgcagtaaaagagtacatgtcaaagaggtggctggacatattgctcgaggaagaacaaaggcgcattgcggcagagaccccagaaatgtcatcgactcctaaagcttggctgactcgcagcgtctcctgggtcacggacgtttctgagagtttggcagggtacctaggtgggaacaagtcagagaaagatgcatatctggaccagcagttttgatactttatgtttcttttgcctaatgtgcattcgccccatgtatacacaaataacgtttaccaaaaatcttcattacagatgtgttcctggtgagtataccgtacggttttgcttaggaaatggatgtgttcctaatgggtctgtcgtacggttttaccgtggtccattgaataatagtatctcacagcacttgagagtacactcaagataaacattgttcagagatcgacctgtcttctggtatttggctttcgcccttcgctgtgaatttttgttccatgta

SEQ ID NO: 98378 - DNA, 976 bp, Zea Mays
cttacgttttttagattgaaaataactaattctgaaaccttattttcactctgagcctgtgaggacagtttatcattagttaatcagcactttatatctgttatttgcctattagaagttatatccgtgatccgagcgacgagcgagactagaagatacgcctcttcgacaggtgagcgcagtgctgtgagatgcagttcgttgcgatgaagcggagagatctgttggagctctgccggcagcacggcttcgccacccgcggctccaaatttgtcctcacaggcgcgctcttggcccaacgtggtccaggaggtgttcctctagatggcaaaggaccatcttttcctagccgctgttataactatggaatggatgggcactgggttcgtgattgcaaatctggtgactggcgagataggtgctttcggtgtggagaactgggccatatagaaagaaactgcaagaacagttctaaggatctgaagtatttcctggagcgtgggaggagctacttgaggtctgcatctcctcaccatgggaaggttcgaaggagaagctactcaaggtctctatctccttaccttggaaggggccgagggagaagctactcaaggtctccatctcattatcatcggaggggcagaagctggagttacagttggtcgcagtcgccaaggaacaactctaaggcttatggtgaagaattgccatcaattagatctggttacagccgcggtcccaggaggagctccccaccgatggagcgagctgaatgcaatggtggtagccccatgagaggtgaagctcgggggaagtgacagcgacctgtaaaatcactctgggattgtgaagtgtcaaacatttgttctaaactttttggtgactatgtgctgagacatgaacttcgacaccagaagaatgtttagcggtgggttgtaaattctcagtaaagctctcctgaatgttgttggttata

SEQ ID NO: 98379 - DNA, 2138 bp, Zea Mays
gcgggaaactctcaaaatcatcttctccgcaccaattccgcaaaccctagaaaaatctcgctccgcaaaaccatgagcgcccctatggagatctccttctctgcgcccccaccccctccggacgcagcgtctaccgccgccgcttccccgctgctggaacctgccgccgcgcagatgctgccccctgtcgccgcggtctcctcctcgcagccgatgcagcagacagctgcggctgcggccgtggttgctccttccccggccgacgataaggtcctcgtgtcagttgaggtactgttgcacgccacgagcgtagctcgccacgaggacgtccaggtggcggtcgagaggatgctcgaagctcgaagcttaagctatgttgatgggcctgtgccaattcctgccgataattcttttcttcttgaaaatgtcaaaaggatacgaataagtgatactgatgagtgggttgagaatcacaaagttctcttattttggcaagtcaagcctgtcgtgcatgtgttccagctgagtgaagatggtccaggtgaggaaccaagcgaggatgatacactctctagctttaatgagtgggccttacctgccaaagaatttgatggtctgtgggaaagtttactatatgaagttggtctcaagcagaggttgctgagatatgctgccagtgctttgctttttactgaaagaggtgtggacacatgtctggtttcatggaaccggattgtacttttgcatggtccacctggaacaggaaagacttccttgtgtaaagcactagcacagaaactttctattcggttcaaatcaaggtattctatgtgtcaattgattgaagtcaatgctcattcattgttcagcaagtggttttctgaaagtggaaaactggttgccaaacttttccagaagatccaggagatggtggaggaagaaagcaacctagtatttgtattaatagatgaagttgaaagccttgctgctgccagacaagctgccatatctggctctgaaccttcagactccattagagttgtgaatgcactgctaacacaaatggacaaactgaagtcttggccaaatgttatcattttgacaacatcgaatattactacagcaatagatattgcatttgttgacagggcagacattaaggcatatgtcggaccccctacgcttcaagcacgatacgagatcttgaggtcatgcatacaggaactcttaagagttggtattcttacatatcctcagggtagtagtgtgccatgtattctgaactattcgaccctgaatgagaagaaacactgtcctgaggctgcagaaccccatggtgcgcttcatctatccaatctactctatgaagcctcaaaactgtgtgagggacttagtggccggtcattgaggaaactccctttcctggcacatgcctctgttaccaatccgtcatgctgcgatgcttctactttcttgcatacattgatacagactgcacggagagaagtcttggagtcacgtggttagttcaaccttgaaaccttggcgtcttttggaagagcaaaaggctaacagttcattccaaacaccatgtcctggagtcccctgatgtgatcaattgccgggtcgttaaaaccgtaagtaagtccatccgatcgctagagttaggttagtgtttaaatgtagagagacgagaacaaagaatgaatgaattggcttaattccattgattgatcggtatgtatatacatggcgttccttagggttgtcacacggttaatagtaagcctagtcacaaatctgtttgaagatagatccgttggatgatatcattggcttgtgattgattgatcaggttcttaacaagtttagaaagatgcaatcggtgcatatctgattgtggcttcagcacatttgatctctgtaatctttgcatggtatgataatacgtaccgtcagggatgcctcgctgttgttccttgtcagtcagattctccctctcgccctttaacaagtcaaacaattttgtaaacccttaaaacatggtttagagtgttagctagttcttggagaaataaaactagaattcattttaagtctatattttatttgtggagcatgttccctattaaataaat

SEQ ID NO: 98380 - DNA, 2006 bp, Zea Mays
ccacccacccacctccgtccgcctccgagcaccaccaaaccctagatctcgcaccggcggcagccatgtccaagccatggggcagcgtcggcgccggcgcgtgggcgctggacgccgagcgcgccgaggaggaagagcgcgagcaggccctgacctttccggcgcccgagccgcccttgcccgcgggcggcgccgccagcttcccgagcctccgggaggccgccgccgcgggcggcgggggcaagtcgaagaagaagaacaagggtaccacgctgtcgctgtccgagttcaccacctacggcgcggccgcggcccagcggcgcgcggcgcccgtcgagcccaagggcctgacccacgatgagatgctgctgttgcccacggggccccgggagcgctcggccgaggagctggaccgctcccgcgggttccgctcctacggcggcggcagcggcttcggcggccccgggggagagcgccgcggcggcttcgacgacgaggaccgccgcgggccgggaagaagctcggatcttgatatgccctcccgcgctgacgaggctgacgactggggcgccaccaagaagtttaccccggctcccacggactctggccgccgcgataggttcggcggcccttcccctctcggccgtgctgatgatattgacgactggtcgcgcggcaagaagccgctcccggcgcgctaccccagcctcgggtctggaggtggcttccgcgactctccagccttccgcgactcaccagctgcttctgattctgaccgttgggtccgtggcgccacccctttgccacacaacggcgagggggcgggggagaggccgcgcatcgtcctgaatcctcctaaacgtgatccgttagttgcctctaccccacctgctgaggtggcccgcaaccgaccaagcccgttcggggctgcaaggccccgggaggatgtgctggcggagaagggggtggactggaggaagtttgagaatgagattgagcacaagaccagccgtcctaccagttcgcactccagcaggccgaatagcgctcattcctcccgccctgggagccctgggtcgcaggtttcggcagttgggagtgaaggagcaccgagggcacggccaaaggttaacccatttggtgaggccaagccaagagaagtggtgctgcaggagaaagggaaggattggaggaagattgatattgagcttgagcatcgtgctataaataggccagagtctgatgaagaaagaaatttgaaagaagaaatcaaccttctgaaggtggatcttaaggaaatcgagagaaacatgagtaatggttctgaccagacatcggtagatgcaaaaggtttgtctgagaagatatctcagttggaaagccagcttgagcagctttcaagggagttggatgacaagattcgatttgggcaaagaccacgttcgggtgcgggcagggttacagcacttgcaccaactagtttaggggaggaaccacatgctacagtggtggacagaccgcgctctcgtggtggtatggagccaccaccaaggcaggaagaaagatggggatttcaaggaagcagagaaaggggctcttttggtgcaagcagaaattcggacaggccaatggcaaggcagagatggtgaaactgggacaacaagcatctcttagggatatttccggttcccagtccctttttttgttctgaaaagatgggcaaaataagtcgttacttatttgtttgtcgtgtttgcttggtctagaagattgttgaggatggagataactccacatgaagttattggtttgtcaactctatgccgtaggatgttttgcatttccctttttgccatctaccatgtcaaaacgatatcttagcaacctccgatactaactgttatgcttactggattccagttcagcatatgtcactagttgattatttgtgcactgcttagtggaaaccttggatttgcacttttactgatgctatgtcacctttc

SEQ ID NO: 98381 - DNA, 3757 bp, Zea Mays
cttttagcacatatgtgaaggactaaagactaaatcattttagtccatattttagtcctagtgtttggcaaaaaaagaactaaatgagactaaaaactagagattaatctttagtccatgtaaccaaccacccctaactcattcctcaaaccaaactctctattagcgagtccaataatgacaaacaaatgtgaaaaacacgatgttggcagtctcatttttgtaataacctttacctactggccataaccttggccttctccagcctctctcagttgcgaacaacctgatggcgaagaagaaaggctcggccgccgccgccgccgccatggcggatgagacggacgtctcgagtcctcagggctccgcccccggcagcgagggaggtggggagaaggagggcgcctttcttcttggggagccaacctgggaggacgctggcggcgggcggtggcggtgcgcggagacggggcacgagctgccggagcgggagaaggaggcctacgcgcggtcccgcgcttgccgcctcgcgctcattgaccacgccgtcgcgcagaagaagccgccgctcaacgccttcaagccccaccccgagcacaaatcgaagctggtatgcaagattacaggggatacaattaacaagttggaggatcacatatggaagcacatcaacgggaagagatttcttaacaagctagaaagggtagaagaccggatggcttctggtgagatgcctgatggagaacctgtgaagtcaaatgaagtggcaaagaagagcaagtcaagcaagaaggacaagaagaaagctaatgttgccagcacttctttgccaagagaacctaaaccagagatggctgattcagatgatccagatttctgggtgcctcctgttggaagtcgctgggatgacgatgacgggaaagacagatgggagtcattaccaggaaagcccaacttagcaaagaacgaaggtggttctgatgatgatggtggtgatgacaatgatacggctgacaaggatgatgctgaatcaatggaacttgcttcaaggacaaagcgaatgtcaatagaagcagctgggccaaggaagaaaaaacccaagaaggagcagtaagacattcgcaatttgtcaagactcaaatgaagaatttggtctcgttgggaagaagaagcgttatctatttgattattgggtcgtgtttcctcagatttgggtaatcaatgactggatttgtgttagcatgcttatggttaacgcctgtcaactgtgatacatctacatttgcacgtaccttgcatttttttttttggaaaactttgagggccaactatcagttgtcttttgctagggtttaggacgtgctatgattggacaacatagacggagctagagctccaaattccaagataactcattcgaaatattaataagactgtcctgatatattaggtaggaatattttagattgccgatttttatgtacttctgttccaaaacatcggttgcactcgctacagctggagcagtatctgcagacagaaaactgctttctactgtagctaaaacctgatgaagccgcagctgaattaaaaaaaaacagaaataaagagactggaccttagcaaaaaatacaggaaactggtatcaccagtaatcattgcaggagcaagtaccatccttaaaatgatgaaatatattccggtctcgaacaacaatctccctatcgtacaccttcgaaatcaactttgtggccgagtggcagtctgcgcagacccttagattcttcgacaagcgaattgttgcaccagggtccagcttcatgaggccaaacgcaatggccagcttctcgctgtgatgggaaacggatacttccttctcacgctcttcaacctctagcctcacatcagctgtgtttgggacatacccagccaccttgatcctgccaatcatctcctcgactttctggtatatctccctcaactcggggtggtcgctgtcttcggcaaagaactcgaagacaaccccgtccagctcaatgaggctgcagcctggagttttctcgatccctctatccttcatttcctttcgaaccatcgctgcgtccttccactgtcccgccgatgcatatatgtttgacaggagcacgtaatcaccactgtgactggggttcaaggagatgatctgcttcagtgcttcttccccgatcccaacatttctgtgaactgcgcaggaagacagtagcgccctccagataacagcgtttggctcgatgggcatggtcctgataaactggtacgcctcatctaccaaaccggcccgccccaacagatccaccatacatccatagtgctcaacccttggcttaatgccatagtcccgagccatgctatcaaaatgccggcggccctcttcaaccaggcagctgtggctgcaagccatgaggacaccaatgaatgtcacgtctgtgggctcgatcccggcctcgcgcattgacgagaagagttccaacgcttccctgcccctcccattggttgccatgccctttatcaaggctgtccacgtccacgagttcttcacaggcattgactcaaacgcttcaaccgcatcgtcaatgcatccacacttcgcgtagaagtccaccagtgcagtgccgagaatagttgtcagagataggcgcttccttcttacgtaggaatgcacccacttccctgtctcaagtgcacccaggacagcacaggcagagagcacgcttaccatggtcacatcgttcggctcaactcttgcaagctgcatctcactgaaaagaccgagcgcctctcggcattgatctgcctgcgtgtagcctgagatcattgcgctccaagcaaccacatccctggactgcatcccatcgaacagcctccgtgccttaccaatctctccgcacttggcatacatgtccatcagtgcggtcaccaatttcgggttcctcgccagcccctcctcgtccacatgtccagcaacccacttgccaagcttcgcgtcacctatccttccgcatgccgtgaccacactcaccaatgtgacctcatcaaaggccacaccaacctcaagcatgcccttaaacatctccaccacctccatccaatctccgttcttcaagtacgccgcgacgatcgcgttccacatcaccacgccactctcctccgccgcgtcgaacacaagccgtgccgccgcaacgtcgccacagctcgcgtacatatgaatcaagctgctcagaacgaaccgatcggccacgagcccacgcttgacggcgtacgcctggacgccgcgccctacgtccagggcgcacatcctggagcacgacttgagggcacaggcggcggtgtgctgatcagcggggcaggccgaagccgcgtggagcatttcgatgaacaggtgcagggcgtcctccgggtggcccgcgtgaaggaaagctcgcataaggacgttgtagcacggcgtcgaaaggggcggccgcgggcccaagcggaacaggctgaccgcgtaggggagcagcgtcggagaggccgcggccgcctcgaggagggagtggaaggatttggccgacccggtgagctctccggacttgattagtgccgcgtggagctgtggcaagtagctaggatctgcgcggagtggagcacgtggcggcgccggcccggcgcggcccggtgtggggagagccgccgtggggacggcggtggccattcgagatgccttgcttgggtttaactg

SEQ ID NO: 98382 - DNA, 2646 bp, Zea Mays
atggctggcggtccctccaaggtcggcggcgatccctccatggccggcggcaaggaatccctggacaacggcgaggaatccatggacggcagctcctcccttcctggcgacgcggcgaggcctccacgcgccggcggcgaggaatccctgggctgcggctccgagtgtatcttctccacaagcgatgctcgaagcctgggacctagcggtgcggcgatacatggtgtaacaggccacgctcagtgccctcccaatgatgactctctggtccgtggcggctcaatgagcagcgaacactccatgatggttctcagtaatggaggtgagcagaggaacaaagggatccctcggacattttgcattaaattgaaacttgttgtcacaattcgctcatattttgccacgccggatggggagccaaagagatattacccacgtagaacattaagaccacttgctgttgacaccaaatttagtctattacaattggtagactttataggtgagacattcatatggggttctaagcaatatttaaagttgtggcgttgtttggatgatgatttcgtagagataaaaactgacgaggacttgttacaatggtttgaagtcaatatgcaaaagggagtagtgcgtattgaaggggaggttcatgattttgagggacctttgttgttttcacctacaaaacgtaggttccacccaaaagtgaggagtagagtggtaaatggggagcctacattaaacatcagtgacccgttaagatcaaagaggagagttgcacatgatgactctgacacggaatcactgaaggcactaagtgatagcagctatgatagtgatttagccgcatcctccgactctgatcttgatttttctgactctgaatatgatcctgatgctgaaatattggatgaagatgaagatgatgatatccctacctttgcatatgatgtggataatccttgtattgataaggatgtgatgttcccagatgtggatgcatgcaagtctgcagtaactcatcatgctattttacatgattatgcttatgagacacctacatgggtagccgaaagaatagttgattggttaagggagacacctacacttgggcctaaaatgttgcagtaggaacttctaaagaagtacaagatggatatcccatacgatagagtttttagaggtaaagagaaggctcttgacatgatatatggagcatgggatgatagctatgacttacttcctacatatagagatgagctttgtagagcaatgcctggcagtgttgttgagttagatacagaagatcataagggagacatgtgttttaaaagattctttgttgctttgaaaccatgtattgatggatttttacaaggatgtagaccgtacattgctatggattccactcacttgacaggaagatcaagagggcaactagcagctgctgttgcagtggacggccataactggctttttccagtggcttttggagtgattgagacagaatcgattgaaagttggacatggtttgtccaaaacttgaagcaatcaattggtactcctatgggattggttattagtacagatgcaggcaaggggataggggctgctgtagatgttgtgtacccaggagtggaacacagagagtgtatgagacatctatggaagaatatgaagaagaagtattttggccctttgttttctcagaatatgtgggcagctgctaaggcttgtacaagtgacaagttcgactaccacatgagaaagatagaggagaagagtcctaatgcgatagcctggctagatgaaaatcatccatatgtgtggtccagaagcaaatttggagatggttgcaaggtagattacatcaataacaacctttctgaatctttcaatagttgggtatccaaaaccaaatcatttcatattgttgacatgcttgataaaataagacagatgattattagcaaatttgatttgagacgcaaaattggtagggaaatgaagggtaggataatcccatctattattagtactctcaatgatcatagcaaggcaatcaaggatcatgaggtgttaagatgtggagatggcacagctgaagtgactttttccaccattagacactcagttagtttagaacaaatggcatgtagttgtagatcttggcaagtgactggaaaaccatgcagtcatgctctagctttcattgcaacacacagtagggatttggagatggatgattatgtccatgagttttactcagtggagatgtttagaaaagcatatgaaggtgttttccctccgatgacatcgaagcatctttggtcacgggtggatttaggctataaaattaagaagcctaagttaagaagaaaaccaggaaggccaagagtagccaggataaaggcatccggggagccaggcaagaagaagaaaagagagtgtcctgaatgtcatgaattaggccatactgctaagtattgtcaaggtggtcctacggctagtcaaaagaagatgaggctgtcatcaaatgatcccaatgcttttgcatctacatccaatgcaactgctgctgtagctgatactgctaatggtggaggagaaccaactactacaagaggatttttgtgctgctga

SEQ ID NO: 98383 - DNA, 95 bp, Zea Mays
ataaattttatggttgaggggtgtccaattcagcctactgtagatgtgtgtgtgagcccaactcctatcggcaagagatctagtgctaggctggc

SEQ ID NO: 98384 - DNA, 1560 bp, Zea Mays
gcaattgtgtccgcatctgtgaaaaaaaaaagatagttgttcatcactgtggttttgtactgctcagttggaaacgtacgtgcactgttcgacaaatactgacattactttacggatgacatgtgtcgtagacttagagacgcgactggaaaccccaactacaaagtccctgaagaacaactcatgtccttacttatacaacaccttacgtacattttcgcgaacagtggcgggaacataaatgattacgacctaccaagatttgctaatcattgccattatatgggtgaaaacagattgattaacggcgagatggatcctgatcctttgatgttgtccatgcatgcttcatctttagttgcacaattgaatgatgaccaacgcaaagtgtacgacactatcattggacgtgttcacagtggatcacctagtttcttctttgtttgcggccatggtggcacaggcaaaacattcctatggaccactttaattgcgagtttacgttccgagaagaaaatagtgctagctgtcgcatcgtcaggcgttgcgtctcttctactacctaaaggatgcactgcacattcaaggtttaaaataccatttgacataaacgatgctagcacatgtaacgtgaaccgggggaccatgcttgctgagcttatacagattgccactctgattatatgggatgaagcaccaatgacacatcgtcattgcttcgaggctctagatagaactatgcgagatattctttctgagcaaacaccttcaaatgctatcctcccatttggtggcaagattgttgttcttggtggcgatttccgtcagattttacctgtcgtacgaaagggctcacggtcttccatagttaatgcatcaattatgaatttgaagttgtggcagcacgttgtcctccttaaattatgcacgaacatgcgccttcttggcccctccttggaagaaaacgatcgtaacgacctcatatcttttggtaaatgggttctatctataggtgatggtacacttcctaccgaaaaaaggactggtgatcgtgaacccacatggatcacaattcccgatgatttgcttgtccaaactaacaatgataaaatagccgcgattgtatctgaagtatacccagatttcttcatgaattatgataaaccaacataactagcctcgcgtgccattatatgcccaaacaatgctacagtcgatgatattaataactacgttgtttcgcttgtgcctggggaaaccgtgcgctaccttagttgtgacactatatcaaaatcatcagaaagaataccagatttcgatgtgctctatcctactgaattcttaaattcgattaatgcaaacaatttctcatctcacgagcttatgctgaaaaagggtgtcataattatgttgttgagaaaccttaatcaaagcatgggcctctgcaatggtacatgactactcgttaccgagcctggacaacgtatattgagatgcattgctctcacaggctctaatgtgggtgctgcggttttaataccgagaataactgtcacaccc

SEQ ID NO: 98385 - DNA, 184 bp, Zea Mays
ccctgatgttcatcctcagtgacttgtactatgtagtggcagaagaaaaacctactcttttgtatatatcaactgcttgttgttaaaccttttgctacattgcacggctgcaaattgtgctctacttatttgtgtggctaaagtcttttggcaacccacaaatgcattttattccatgactcac

SEQ ID NO: 98386 - DNA, 156 bp, Zea Mays
tgcttattgaaactcatgtgcgacaacttatcagggtctggtagtgatagtgttgttattacccagttctacacaaaattagaggagaaacataaagctttagaagtagagaaggacgaggctgaggccaggaaaaaggtacggttgattgaatga

SEQ ID NO: 98387 - DNA, 125 bp, Zea Mays
cttgcattgagttgccttttgtatcagtttttaattgtttcttattcagacttgtttggtataacaacaacctggtgatgtcttgacaaattacaaattagctgtgtggagcctgctcgggtatt

SEQ ID NO: 98388 - DNA, 3912 bp, Zea Mays
atggtcgacgctccggcaccggcaggctcgacggccgcggccaaggagaaggcctcggccctggagctggtccgctacgccgacgcgcgggactggtgcctcatggcgctgggcgcgctaggcagcttcggcgacggcatgatgcagccgctctccatgctcgtgctcggtgacatcgtcaacagctacggcggcgccgggaccgccgacagcgccttcagctccagcgccgtcgacaagttcgcgcttcggttgctgtacgtcgcggttgccgtgggcgcctgcgctttcctagaggggctgtgctggacgcagaccgcggagcggcaggcgtccaggatgaggcggctgtacctggaggccgtcctgcggcagcaggtggagttcttcgacacgtccgggccggcctcgcagggcaccacgttcagggtcatctccaccatctccgacgacgccgacaccatccaggacttcctcgccgagaagctgcccaacgtcctggcaaacattacgctcttcttcggcacgctggccgtggccttcgtcttcgcgtggcggctagcgctcgcgggcctcccgttcacgctcctcttcgtggtcccgagcgtgtacctgggcaagcgaatggccgccgcggcggggcaggcgcgcgcggcgtaccaggaggcgggcggcgtcgccgagcaggcggtgtcgtccatccggaccgtggcgtcgtaccgcggggagcggcgggagctggagcggttcgggcgcgccctggcccggagcaccgcgctcggcatcaagcaggggctcatcaagggcgtcgtcatcgggagcatgggcgtcatatacgccgtgtggtccttcatgtcctggatcggcagcgtcctggtcatccgtttccacgcgcagggcggtcacgtcttcgtcgcctccatctgcatcgtcttggccggaatgtccatcatggtggctctgccaaacctgcgttacttcgtcgacgcggcgacggcggcggcacggatgcgcgaaatgatcgacaagctgcagcctctcgagacggagggcaagaagggcaccgccatggagaacatcaggggccagatcacgttcaaggacgtgcatttctcgtacccgtcaaggcctgacacgcgggtgctccacgccgtgaatctcaccatctccgagggcgccaccgtcggcctcgtcggcggcagcgggtccgggaagtccaccatcctctcgttgctgcagaggttctacagccaggactcgggggagatactactggacggcatcgacatcggcacgctcaacgtcgagtggctcaggagccagatcggcctggtgagccaggagccggtgctgttcgccacgaccatcagggagaacatcctgttcggcaacgaggcggcctcgctgaagcaagtcgtcgtggcggcgaagatggccaatgctcacgatttcatcaccaaattgccccatggatacgataccaatgtatgccgatgcttcgaatcctggccacagaatgaactagctatttgcctatttgtacttgagcaagttcaatgcttgcatttgcaggtcgggcagttcgggacgcagctgtcgggaggtcagaagcagcgcatcgccatcgcccgcgcgctcatcagggaccccaagatcctgctcctcgacgaggcgactagcgcgctggactccgagtcggagcgcgcggtgcaggacgcgctggaccgggcgtccgtgggccggacgaccgtcgtcgtggcgcaccgcctctccacggtccgcaaggccgacatgatcgcggtgctcgacgcgggccgcgtggtggagcgcggcacgcacgacgagctcctcggcgcggaggccggcgaaggcggcggcttctacgcgcggatggcgatgctgcagagggcgtccgtggcgagggaggaacgccagcgggtggtggaagtagagccggagagcaacagggtgtcgttccgtagcgttgagatcatgtcggtgcccagcgacttccacccaagcccggtgccgtcgttcaggtcggtggaacggtccgtggaaatggaagacgaaaaggtcgacggacgcgacacggcgcgcggcagaaagccgtcgcagctccgcctgctcaagatgaaccggccggaatggaagcaagctctgctcgggtgcgccggtgccatcgtcttcggtgcggtgttgccgctctactcttacagcctcggagctttgccggaggtgtattttctcggcgacgacgacctcatccgttcaaagaccaggctgtactccctcgtcttcttcggcatcgccatcgtctgcatcacggcgaacatcgtgcagcactacaacttcgccgtcatgggcgagcgcctgacggagcgcgtccgtggacagatgttcgccaagatactctccttcgaggtcgggtggttcgacgaggacgagaactcaagcgccgcggtgtgcgcgcggctggccacgcaggccacaaaggtccggtccctcgtcggtgaccgcatgtgcctcctggtgcaggcgtccgccaacgcggcgctaggtttctcccttgcgctcgccctgtcgtggcggctcgcggtggtcatgatggctatgcatccactggtaatcgcgagcttctacttcaagaaggtgctgatgaccgccctgtccaagaaggccaagaaggcgcaggtgcaaggcagccagctcgccagcgaggctgtcgtgaaccaccggaccatcaccgcgttctcgtcgcagcgtcggatgctccgcctgtacgaggccgcgcatgaggcgcccaggaaggacaacagggtgcagtcgtggtactccggcttctgcctgtccctgtgccagttcagcaacacgggcagcatggcgctcgcgctgtggtacggaggcaggcttatggccaagggcctcatcactcccacgcacctgttccaggtgttcttcatgctcatgaccatggggcgggtgatcgcagacgccggcagcttgacgtccgacctagccaagggcggtgacgccgtgcggtccatcctggacacgctggaccgtgaaccgatgatccaggatgacggcgacgaagccgacggaccaaggaagaagaggaagcaacagcagcagcagaaggaaatgaaaggcacaatcgagttcagggacgtgcacttcagctacccgacgcggccggggacgaccgtgctcgatgggttcagcctcgagataggcgcggggaagactgtggcgctcgtcggaccgagcggatccggcaagtccacggtgatcgggctgatcgagcgcttctacgacgtgcagaaaggctcggtgctgatcgatggcagggacatcaggagctgcagcctggcgcacctccggtcgcacgtcgcgctcgtcagccaggagccgacgctgttctccggcacgatccgcgacaacatagtgtacggcgacgagcacgccaccgaggacgaggtgactagtgccgccaagcttgccaacgcccacgagttcatcagcgcgatggagggcggctacgacgcgcgcgtcggggagcgaggggcgcagctgtccggcgggcagaagcagcggatcgcgctggcgcgtgcgatattgaagaacgcgcgggtcctgctgctggacgaggcgacgagcgcgctggacaccgtgtcggagaggctagtgcaggacgctatcgacaggatgctgcaggggcggacgtgtgtggtggtggcacaccgcctctccacggtgcagaaggtagacatgattgcggtggtgcggggcgggaaggtggcggagagagggcggcacggggagctcatcgccgtcggacctggagggatatactacaacctgatgaagttgcaactgggtagatcgccgtgccttagtcctcctaagtaa

SEQ ID NO: 98389 - DNA, 467 bp, Zea Mays
tttgtatctaataaacaaatttaaatagaccagagataaaccttattctggactagctcaggggtctcaaagatctcaggcattcccacagtacccacatcctcccggtaggacagcttctcagcatagcccaatgacatctctcagtccttttcaagctttgctgatatcttcttcagtccaagacaccctataaactctggagctgtgtgccggtcgcagagacaccgggctgcaaagggcggacgcctcgccggagctggtcgcgatgacgctggaccccaggtggttctcgatcgagcgcggccttatctccgggttgcggcgcggcgagcggagggaggaaatcggtcgcgggcgagacgagttgaggcggcggggcgaggagcgagctcggccgcgggggaggagccgaggaggcggccgccgcccgctgcggatggatcgggagtagaaagagcctacct

SEQ ID NO: 98390 - DNA, 3731 bp, Zea Mays
cggaagctccagccgccgctaccattaccagtgagttgaggtgctctggtgctgggctgactgtacccgccgctaccattaccacgcgctgcaccgtagcagagcggttccaaccccgtcgaggcaaaaagccctggccgttccctggccccgtgccgccgccgccgcctccgtgcgcccaggcttctttctgtgacttcgctaaaatgggtcatgtcctcatcatcaggaccacactttcaagtcaaaattgaagataccatcttccactattccactttcatgtcaaaactcaagatgacggacatgaggcgtcactctgtggatgtcccgctgtcaagaaccttggtgcagctcaagcgattgagatcgctgcgggatccagcgacaaactcaatgggcaagttcgcatctcctgccgaccacatggtgtgggagactgcttctagcaatggggtggctctggagctcggcaggtcggcacataatcaccaggttgaagaagacgaggacgtgggagccgagcctacaatggggtcggagcggagttttcggggaccaaacgcaaggactgcgtcctacaggagatcttctgctgtcaggatcagaggcttgaacccaccaagaaacaagcaggttcatcgtgtccgccgagacggtcaccgcaagtcagtggactctagccactcgaatcatagttctatccgtcaattggcgaacaatttggtcaacaatgtggatgcagaggaggaagtgaattcttatgaaaggccaaaatttgcaatgccaggtaaatctgacgaagacgaagtgaaaatgccaggccactccaaattcaggagcaagccttcggctgcaatgagccgtgtcgggagcccctgcatgtcagctagcgaggcaagatcagggcatggaaccgaggatacacgactgaggtcaaacgatgtcgtggggtcaaattttagtggctgtggtataagctactgctggtcaggagcgtcaaagtgccgagagctttattctgacagtgatggtccagatcagcctctcttatctacagatgggactgaggcagcgttccaaggcaacgtaccatacactgagacgcccaggtgtctaagccagaaatttcgccctcgttccttcagcgaattggttggactaaacgttgttgcccagtccctcttatattcctgctgcaaaggaaaagttgccccaatgtacctgtttcatggcccccggggcacaggcaagacatccacggcaaggattttcgccgcggctctaaattgcgtgtcccttgaagagcaaaggccatgtgggttctgcaaagagtgtgtcatccttttctctgggaagggtagagatgtgaaagagcttgacgtggcgaaaatgggtcgtttaggtcgagtgaaggcgcttctcaagagcgcatccctcgtaccctactcttcgcgcttcaaggttttcataatagatgaatgccatctcttgcaagaagacgcatggtcagcaatactgaagagccttgacgagccataccggcatacggtatacattatgatcacttctgacatagaaagcctgcctcgcgcttccatcacacgttgccagaagttccattttccgaagataaaggtggcagatattgtatacaggctggagaagatctgtataggagaaggattggaattcgaccatgatgggttgtacttcattgctgcaaagtctagtggttctcttagagattctgaagtaatgcttgaccagctcagtttgcttgggaagaagatcacaatttctcttgtgcatgaacttgtaggatcagtgtctgatgacgagttgattgagttgcttgatctagcattgtcatctgacacaaccaatactgtaagacgagcccgagaacttatggggtcagcaattgatcctctgcagcttgtttctcagctggccaaccttattatggacattctctcaggacgatgtcaatctgctgtcagtgaagtcagcaaaagtttcttgggtagatatgcattatcagaggttggaataaagaaattaagacatgcactgaagatactatcagaaactgaaaaacaattgaggacatcaaggaatcaggctacttgggttacagttgcgcttttgcagtttggcaccaatgaacctaaccttattgctgaaccgaatgatatgcattcacattcagtaactggatatacagatgactgggtttccaaggtgcactcaaacaccaatttttgtcaggcatgtaacagcagcaagtccaactgttctgagagacactgtagacggcttaagcttgagaacatatggaggagagccattggaaagtgtcgatcaagatcagccaaaagtttcctcaggaaagaaggcttcttatcatcggttcatgttaccgaagagctggctatagcagaagttggcttcggacacccagatcacctatcaagagcagagaaaatgcaaagcctaatagagtgctctttacagcacgttcttgggtgcaatgtggagatcagattcaaacttgtaccttgtccagtgagaaaagatgctaggttgaagagacactcgttcagttttctcagttgctctggccggaagcaagagctgtcagattcagtagtgactgatgaagacgaagctgtgaggcctggggcaagggagacaccgcttaaaggctacacctctagccagcaggagtcaccatataccatgcaacgtgtcgattcgaaaccaacagcctatggttgcgaggatgatggtcggagcaccttgacgtcgaacagatccatgacagatgacatgacaaggacgtgcaggtccgagactaactactcaaaggggggtgtgagtgatcagggccgctttggtagcatccaggagcctgacctacagccaagctgcttctcgcgaacactgaggcttcagaagaagctgttgtcttctggcgcagcgcacaccatctgtctgaggatccagccgcataacaagatggaattcctacctaagaaggaatttgatacgtacttctgcgcgtatgagccttacgagcagtgtccaagatcagtttcaagggctacttacagttcaagagatgatgacttgtggagcaagaattcacggttcggttcaaatctactctgctggaaagccccaaaacaacccatgtaacggaggtacattactctgtattttcacatcacttggtccgtcggaatagccatgtgaattcagcgtcttggctcgctcggttgctgtttgctagtgttcatattacatgttgaccccagttctgccagagcccagagcactttcacaccagcaagctgctttcttacaagcgtaactgcgacaaccagcaccagcattgctgccggggaaaagtgaaccatggtagcagaacattggcatgctgaaaaacagtgtcaaatcattcagtttttgctaggacatttaccaatttctcccgaagctggaggcatgggcaccacctgtggggacaattttcaaaggaaatcccaggaggggtctttgtttttattgttcttggcaggcagctgaggaactattcatcagtgatgtttcttggatgtgctggtccttcaaaatgctaatgggcagttgtacatgttacgttatatgctactgaactcagaggctataatacactttttttatgtcaacacatagaaattaagatc

SEQ ID NO: 98391 - DNA, 366 bp, Zea Mays
atgtatctgccggtggagaggacgtcgaggcgcttctcgctcggctcgtaccgccccttgcgcagctggtaccggtgcgtcaccgccgacaccgtgtacgcctgcccctcgatcgtcacgctctcgccgcagtggatgttggtggggaagcagcggacgccgaggcaccgcggaggcggcgtgatctcgacgaccttgaaggggtgcttgtgctccttgccgtcccgctccctgtcccggccgtccctgttcttcctgcacaccaccgcgaaacgcggcttgtggtacgcgaaggaggtggacgcgaccatggccatggggggcggacactgctcgctcgctcgctcgattcctgctggtgcttga

SEQ ID NO: 98392 - DNA, 2095 bp, Zea Mays
ctgtgaagaactgaagacacatcacattccggctgccgtcccttcccttgcatctggctctccttgcagtcgcagcctcgtacaccgcttgtgcgagcttttactcctaccccaatctccctttgctacttttggggacctccagacctctcaaatcgagagaaccaaaaacgatagagaaagagagcctgtcagcccaagaaaaggttcctcccctccttccccacctcgccctcagccctcatcatcctctaacatccgattgtgccctgtgctctgcggttctcggatccaagatttcgccggccggccgccggcggtggctccggcctccgggagcgggagaaagactggatttttcgggccatggagatgtggcctgatccgttcaggcccgggcggtggggtggcttcctgagcaggtctgattcgtatcggttcaaatgatctcggcggcttgattggtcggttccgcttccgccgggggatcggagctagggcggtggtttcttggccggccggtggattcatcggctcgggtctggtgggatcttggtggttgctggttcagcacacgagccgcaggctgccgaggaagccggggaaggctggggatagccgggaagctgctgctgcggggaatggaactgagccgtcgaattcctacagtgttgcgaggagcatggacccaggtaacaaaagggctggaaatggagattacccagttccatctggtgtaattccgaatccagtgatgaatggggctgtggtgtatcactccaatgaacccttaccggcattcaaggacgtgcccatgtcagagaagcagaatttgtttgtcaagaaggtgagcctatgttgcgctgtgtatgactttgtggatccaactaagaacctcaaggagaaggaggtgaagcgccagacacttatggagcttgttgattacgtcgcttccgctaatggcaagttctctgaggttgtcatgctggagatcacaaagatggtgtcaattaatttgttccggagctccagccccacacctcgtgagaacaaagccattgaaggggtcgatctggaggaggatgagcctctcatggatcctgcatggtctcacctacagatcgtgtacgaggttttcttgagatttgtagcttcacaggagacagatgcaaagttggccaagagatatatagaccattcctttatccttaggctgctagacctttttgactctgaggaccccagggaaagggactatctaaagacgatacttcatcgaatatatggtaaattcatggtccatcgaccattcatcaggaaagcaattaacaacatattctacaggtttatattcgaaacagagaaacataatggtgttgcagagttgttggagatcctgggcagtattatcaatgggtttgcccttccacttaaggaagagcacaaattgttccttgttcgtgcactgatccctcttcacaagccgaaatgtgtatctatgtaccatcagcagctatcgtattgcatcacacagtttgttgagaaggactgcaaacttgctgacacagttattaggggtttacttaaatattggcctgtgacgaacagttcaaaggaggtgatgttcttgggtgagttagaggaggttttagaggcaacacagcttgcagagttccaaagatgcatggttccactcttccgtcagattagccgtagcatgaacagctttcatttccaggtggcagagcgggctctgtttctctggaacaatgaccatattgaaaccctaattaagcaaaactacaaggtgctgttaccgatcatctatccagcactcgagagaaactccagagatcactggaaccaagctgtccgtagcctgacactgaacgtacgcaagatcttctcagaccatgattccacattcttcggggagtgcgtccagaggttcagtgacgaggagctcaagcaggcggaatctgattcaaaacgagacgccatgtggaagcgcctggaggaaatgggtgcctcaaaacctggcgggaaccatcccttaggtgcacccaatggcaaacccagtcacgctgctggctag

SEQ ID NO: 98393 - DNA, 2507 bp, Zea Mays
ctgtgaagaactgaagacacatcacattccggctgccgtcccttcccttgcatctggctctccttgcagtcgcagcctcgtacaccgcttgtgcgagcttttactcctaccccaatctccctttgctacttttggggacctccagacctctcaaatcgagagaaccaaaaacgatagagaaagagagcctgtcagcccaagaaaaggttcctcccctccttccccacctcgccctcagccctcatcatcctctaacatccgattgtgccctgtgctctgcggttctcggatccaagatttcgccggccggccgccggcggtggctccggcctccgggagcgggagaaagactggatttttcgggccatggagatgtggcctgatccgttcaggcccgggcggtggggtggcttcctgagcaggtctgattcgtatcggttcaaatgatctcggcggcttgattggtcggttccgcttccgccgggggatcggagctagggcggtggtttcttggccggccggtggattcatcggctcgggtctggtgggatcttggtggttgctggttcagcacacgagccgcaggtctgcgtagatcccctcttcgcttccgtggcggatttgtactgctagggttttggttgggtctggtggaagatgattaagcagatccttggcaggctgccgaggaagccggggaaggctggggatagccgggaagctgctgctgcggggaatggaactgagccgtcgaattcctacagtgttgcgaggagcatggacccaggtaacaaaagggctggaaatggagattacccagttccatctggtgtaattccgaatccagtgatgaatggggctgtggtgtatcactccaatgaacccttaccggcattcaaggacgtgcccatgtcagagaagcagaatttgtttgtcaagaaggtgagcctatgttgcgctgtgtatgactttgtggatccaactaagaacctcaaggagaaggaggtgaagcgccagacacttatggagcttgttgattacgtcgcttccgctaatggcaagttctctgaggttgtcatgctggagatcacaaagatggtgtcaattaatttgttccggagctccagccccacacctcgtgagaacaaagccattgaaggggtcgatctggaggaggatgagcctctcatggatcctgcatggtctcacctacagatcgtgtacgaggttttcttgagatttgtagcttcacaggagacagatgcaaagttggccaagagatatatagaccattcctttatccttaggctgctagacctttttgactctgaggaccccagggaaagggactatctaaagacgatacttcatcgaatatatggtaaattcatggtccatcgaccattcatcaggaaagcaattaacaacatattctacaggtttatattcgaaacagagaaacataatggtgttgcagagttgttggagatcctgggcagtattatcaatgggtttgcccttccacttaaggaagagcacaaattgttccttgttcgtgcactgatccctcttcacaagccgaaatgtgtatctatgtaccatcagcagctatcgtattgcatcacacagtttgttgagaaggactgcaaacttgctgacacagttattaggggtttacttaaatattggcctgtgacgaacagttcaaaggaggtgatgttcttgggtgagttagaggaggttttagaggcaacacagcttgcagagttccaaagatgcatggttccactcttccgtcagattagccgtagcatgaacagctttcatttccaggtggcagagcgggctctgtttctctggaacaatgaccatattgaaaccctaattaagcaaaactacaaggtgctgttaccgatcatctatccagcactcgagagaaactccagagatcactggaaccaagctgtccgtagcctgacactgaacgtacgcaagatcttctcagaccatgattccacattcttcggggagtgcgtccagaggttcagtgacgaggagctcaagcaggcggaatctgattcaaaacgagacgccatgtggaagcgcctggaggaaatgggtgcctcaaaacctggcgggaaccatcccttaggtgcacccaatggcaaacccagtcacgctgctggctagaatacaatagcccaccgtaccagccgcatccgtgtaactcttcggctctcgtgccaagatctcctggaacctgggttgtgattttagctttgggattctttttgcgttggtttgcccctgttgtaggtgggtccgatgtgtttggttttgtaagaactgtatgttcaaaatgtacacacggaggaatttgacagatttggcatgtgtagcaacattaatcagaattactatcatatagtccaataaacaacgtcgattttgattgcagatacgcggtttgggtggcttatatatataccgaaatgacagtgagcgtt

SEQ ID NO: 98394 - DNA, 1809 bp, Zea Mays
atggcgaggacgcgctccggaataccagatgagcgaagccactcgacggggataccacaatcccaaaaggctcgccaaaaccccctcggcggttacccttctctcccgatggcaaccgccgccgccgccgccgtggcggcacccgagcagccgcgtcgccggaagccggcgccggggcgtgggggcgtggccctccctgcgggactctcggaagaggaggccagggtgcgggccatcgccgagatcgtctcggcgatgggggagctctcgcggcgcggggaggatgtggaccttaactcgctcaagtctgccgcgtgccggagatacggtctggcgcgggcgcccaagctagtggagatgatcgccgccgtgcccgaggccgaccgtgccacgctgcttccgcggttgcgcgctaagcccgtgcgcacggcgtcgggtatcgccgtcgtcgccgtcatgtcgaagccgcaccgttgcccacacatcgccaccaccgggaacatctgtgtctactgccccggcggtcccgattccgacttcgagtacagcacgcaatcctacacgggatacgagcccaccagcatgcgtgccattcgggcaaggtataatccatatgtgcaagccaggagcaggatagatcagctcaagaggctagggcatagcgtggataaggtcgaattcatcttgatgggtgggactttcatgtccttaccagctgaatatcgtgattatttcatcagaaatcttcatgatgctttatcgggtcacacttctgcaaatgttgaggaggctatttgttattcggaacatagtgctgtcaaatgtattggtatgacgattgagacgagacctgattattgcttggggcctcatctgcgccagatgctatcttatggttgtacccgcttggaaattggtgtccagagtacatatgaggatgttgcccgtgacacaaacagaggacacacagtggctgctgttgctgattgcttctgtttggcaaaagatgctgggtttaaggtggttgcccacatgatgccagatttacctaatgttggagttgaaagagatttggaaagtttcagagaattttttggaagtccagcgttccgggctgatggtctgaagatttatccaacacttgtgattcgtggaactggtctttatgagctctggaaaactggcagatatagaaattatccacctgagctgttggtggatattgtggcaagaattctgtctttggtaccaccttggacacgagtgtatcgggtccagagagatattcctatgcctcttgttacttctggtgtcgagaaaggtaaccttcgcgagcttgctttggctcgaatggaagatctgggcttaaaatgccgggacgtcagaacccgtgaggcagggattcaggatatccatcacaagatccggccagatgaagtagagcttgtcagacgtgactatgctgcaaatgagggttgggaaacattcctctcttatgaggatacacgacaggatatcctgatcgggctgttgcgcttgcgtaaatgtggccgtaatgttacatgccctgaacttgtagggaggtgttcaattgtgcgtgagcttcatgtctatggaactgcagtccctgtgcatggccgtgatgtggacaaactgcagcaccaggtgattcacgtatttacatgtagacagtgtgacagtgagtgaatgtatgataaccagccaaggctttggtcatcggcaattggcgctaccatgtttagaatttatgacctgacatgcttggccaattgtagttaccattattta

SEQ ID NO: 98395 - DNA, 2099 bp, Zea Mays
atggcgaggacgcgctccggaataccagatgagcgaagccactcgacggggataccacaatcccaaaaggctcgccaaaaccccctcggcggttacccttctctcccgatggcaaccgccgccgccgccgccgtggcggcacccgagcagccgcgtcgccggaagccggcgccggggcgtgggggcgtggccctccctgcgggactctcggaagaggaggccagggtgcgggccatcgccgagatcgtctcggcgatgggggagctctcgcggcgcggggaggatgtggaccttaactcgctcaagtctgccgcgtgccggagatacggtctggcgcgggcgcccaagctagtggagatgatcgccgccgtgcccgaggccgaccgtgccacgctgcttccgcggttgcgcgctaagcccgtgcgcacggcgtcgggtatcgccgtcgtcgccgtcatgtcgaagccgcaccgttgcccacacatcgccaccaccgggaacatctgtgtctactgccccggcggtcccgattccgacttcgagtacagcacgcaatcctacacgggatacgagcccaccagcatgcgtgccattcgggcaaggtataatccatatgtgcaagccaggagcaggatagatcagctcaagaggctagggcatagcgtggataaggtcgaattcatcttgatgggtgggactttcatgtccttaccagctgaatatcgtgattatttcatcagaaatcttcatgatgctttatcgggtcacacttctgcaaatgttgaggaggctatttgttattcggaacatagtgctgtcaaatgtattggtatgacgattgagacgagacctgattattgcttggggcctcatctgcgccagatgctatcttatggttgtacccgcttggaaattggtgtccagagtacatatgaggatgttgcccgtgacacaaacagaggacacacagtggctgctgttgctgattgcttctgtttggcaaaagatgctgggtttaaggtggttgcccacatgatgccagatttacctaatgttggagttgaaagagatttggaaagtttcagagaattttttggaagtccagcgttccgggctgatggtctgaagatttatccaacacttgtgattcgtggaactggtctttatgagctctggaaaactggcagatatagaaattatccacctgagctgttggtggatattgtggcaagaattctgtctttggtaccaccttggacacgagtgtatcgggtccagagagatattcctatgcctcttgttacttctggtgtcgagaaaggtaaccttcgcgagcttgctttggctcgaatggaagatctgggcttaaaatgccgggacgtcagaacccgtgaggcagggattcaggatatccatcacaagatccggccagatgaagtagagcttgtcagacgtgactatgctgcaaatgagggttgggaaacattcctctcttatgaggatacacgacaggatatcctgatcgggctgttgcgcttgcgtaaatgtggccgtaatgttacatgccctgaacttgtagggaggtgttcaattgtgcgtgagcttcatgtctatggaactgcagtccctgtgcatggccgtgatgtggacaaactgcagcaccagggatacggaactctattaatggaagaagcagaaaggattgctcgaaaggagcaccgatcgaagaaattagctgtcatttcgggggttggtactcgccactactaccgcaagttgggttatgagctagaagggccttacatggttaaatgtttggcgtaatgctatttcattttccgtatcatatagagcagactagtgtttgtaatgtaatatgggtagtcttttttaaaaaaaatgatcgttataccattgttttctaatattgagtagtccagaactccagatgaaaatggagacaactttctatgtatactgaacgatagctaatttgtcgcttatcctcaactttgtgccgtgcagcaactgtgatatgtagtcaggttactccttatttggtgttcaaaacccgttatccatgaatgaaggaaacaatc

SEQ ID NO: 98396 - DNA, 562 bp, Zea Mays
gctcagcgcatcgaatctggagtccaagcccgacccgcagcccgcagcccgtctcgcctcgcgctcgcgaaggcttcctttcctccccctttccgtccaaagtctccaagatggagtacccccaccagcaggcgggcccttcctccacgaccatcaccctcatctgtccgtacgcgactcgccgcaggaagagggccgcgggcgacgacctctcgtcggcggtggacatggatgtcgacgccgacgcgcagcgcgccacggacaagctgaaagcagtgtcagaggcacttgggcatgagatccgggttttttcaagtgagaactttgcttcacaaaccagcaagttgcctagtgcagatcatgaggaagatgacgacttttatgagcttcagcctgctgattactacaacttgatttcaaacaggatgggaggtagaaaatattgtttcggactttagttatttagtgtcaacttagtttaatatattgaccaacctgaattattttgcattctgatttacttacggtagcactgttgaaaatggcaaatttgtgcagagca

SEQ ID NO: 98397 - DNA, 709 bp, Zea Mays
gctcagcgcatcgaatctggagtccaagcccgacccgcagcccgcagcccgtctcgcctcgcgctcgcgaaggcttcctttcctccccctttccgtccaaagtctccaagatggagtacccccaccagcaggcgggcccttcctccacgaccatcaccctcatctgtccgtacgcgactcgccgcaggaagagggccgcgggcgacgacctctcgtcggcggtggacatggatgtcgacgccgacgcgcagcgcgccacggacaagctgaaagcagtgtcagaggcacttgggcatgagatccgggttttttcaagtgagaactttgcttcacaaaccagcaagttgcctagtgcagatcatgaggaagatgacgacttttatgagcttcagcctgctgattactacaacttgatttcaaacaggatgggagagcactttaaaatgctgaagactcgcaagatgcgggaagcagaacttgctgctcagcgagcaaagagaacaaaagtagggttatgatgcacatcatttacatttatttattttttacgatcaatcaacgtgcaatgcttcttcatccagtcctctgtacaaaggaacactttgaagatggcaattgttattaccagttcttttgttacattctgtgtgtgactcgtagttacctcctttttaattcagcgctgagcagtgccttaagaaatgtttga

SEQ ID NO: 98398 - DNA, 1544 bp, Zea Mays
gctcagcgcatcgaatctggagtccaagcccgacccgcagcccgcagcccgtctcgcctcgcgctcgcgaaggcttcctttcctccccctttccgtccaaagtctccaagatggagtacccccaccagcaggcgggcccttcctccacgaccatcaccctcatctgtccgtacgcgactcgccgcaggaagagggccgcgggcgacgacctctcgtcggcggtggacatggatgtcgacgccgacgcgcagcgcgccacggacaagctgaaagcagtgtcagaggcacttgggcatgagatccgggttttttcaagtgagaactttgcttcacaaaccagcaagttgcctagtgcagatcatgaggaagatgacgacttttatgagcttcagcctgctgattactacaacttgatttcaaacaggatgggagagcactttaaaatgctgaagactcgcaagatgcgggaagcagaacttgctgctcagcgagcaaagagaacaaaaacagtaatgagggtgcgtttcccggatggctacatccttgaggctgactttattccatcagagaggatacatagtctagtggacctgctcttgaaagtacttgctagaccagatctgccattctatctttatacagtacctccaaagaagcgaatactggacacatcacaggacttctatacagctggttttgtccctggggctaatgttcatttttcttatgatctccctgaagatgatctaaaagcaggaccctttctccgcgaagaaattctaagtttggatggattgtcacttctgctgaaacctgctagtcaacctgatgattctagaatgaactcttcttctcttcaatctgatgcatctcaatctgttcctgtaccaacaacaacaaataagaagcctggcagaccaaagtggctgaaaaggtgataccactccaggtgtcaagtgtgtgccatcaacacagaatcactctgttaggcttctaaacactattaatggccgaacaagctcaaatctgaacaggctacactgctgtagtacaagaattggatcctctgcttacagaagctgcaggggcattagaaatagaatcccaccttttttttctaggtgggagccaagtagcatgtaaatttgaatgtgtcgcgactcatcaagtcatcagaacagtgctccgctgtggctaagcactttgtcatcttacatttcgtgtgaaccccataggaagctagaaacggcggagataatagtccagtgctgttaacgcttcacggtgcaatgccatgcctgtcttcactattcagtcttgacaacaatatatttcagaaaactgaaagtgcccgaggtagctggaatataccaagtgagtgtggcttccaccatggcaactttattcgggtctcatacccatctctctcgatgcgattactatcacattacgtggtagtcccttggtaaaaggatctgccatatttttatctgttgaaatataagtcacacttataactccggagtttctcaactttctgacag

SEQ ID NO: 98399 - DNA, 1562 bp, Zea Mays
gctcagcgcatcgaatctggagtccaagcccgacccgcagcccgcagcccgtctcgcctcgcgctcgcgaaggcttcctttcctccccctttccgtccaaagtctccaagatggagtacccccaccagcaggcgggcccttcctccacgaccatcaccctcatctgtccgtacgcgactcgccgcaggaagagggccgcgggcgacgacctctcgtcggcggtggacatggatgtcgacgccgacgcgcagcgcgccacggacaagctgaaagcagtgtcagaggcacttgggcatgagatccgggttttttcaagtgagaactttgcttcacaaaccagcaagttgcctagtgcagatcatgaggaagatgacgacttttatgagcttcagcctgctgattactacaacttgatttcaaacaggatgggagagcactttaaaatgctgaagactcgcaagatgcgggaagcagaacttgctgctcagcgagcaaagagaacaaaaacagtaatgagggtgcgtttcccggatggctacatccttgaggctgactttattccatcagagaggatacatagtctagtggacctgctcttgaaagtacttgctagaccagatctgccattctatctttatacagtacctccaaagaagcgaatactggacacatcacaggacttctatacagctggttttgtccctggggctaatgttcatttttcttatgatctccctgaagtttcgttgttaaatgcagatgatctaaaagcaggaccctttctccgcgaagaaattctaagtttggatggattgtcacttctgctgaaacctgctagtcaacctgatgattctagaatgaactcttcttctcttcaatctgatgcatctcaatctgttcctgtaccaacaacaacaaataagaagcctggcagaccaaagtggctgaaaaggtgataccactccaggtgtcaagtgtgtgccatcaacacagaatcactctgttaggcttctaaacactattaatggccgaacaagctcaaatctgaacaggctacactgctgtagtacaagaattggatcctctgcttacagaagctgcaggggcattagaaatagaatcccaccttttttttctaggtgggagccaagtagcatgtaaatttgaatgtgtcgcgactcatcaagtcatcagaacagtgctccgctgtggctaagcactttgtcatcttacatttcgtgtgaaccccataggaagctagaaacggcggagataatagtccagtgctgttaacgcttcacggtgcaatgccatgcctgtcttcactattcagtcttgacaacaatatatttcagaaaactgaaagtgcccgaggtagctggaatataccaagtgagtgtggcttccaccatggcaactttattcgggtctcatacccatctctctcgatgcgattactatcacattacgtggtagtcccttggtaaaaggatctgccatatttttatctgttgaaatataagtcacacttataactccggagtttctcaactttctgacag

SEQ ID NO: 98400 - DNA, 1513 bp, Zea Mays
atcttgggattactgtaggtctgtttctgggagacccttgagcacacccgagccgtccaatttacatcggacggtgctgcgtggccgtcagggaaaaggattaggggacggggagagaacgaaacaaaacccaaatatctggacgcacacactgggccgcgctgcttctccgtcacgctgaatcgtcgtcgccgccggccagccgcaggagctcgccgtcgcgcgtttttgaagctctccaggaaagggggcgcgcgcaggcgcagcatgagagcggccgtgaacacgccacctccgcgctgctactcgcggcggcgcgccagcgccacgctgctggaagcgcgttatgtgttcgaccacgtgccgcagcggcgcctgccgagcctggctgcggaactccgcgcgcggcccgcgtccgtggctgcccggaggcccgcgcggcgctcggccgcgtctgcggctgcccccacctgtggcgccgcttcagttactcgtttgtttagggcattgctgcagattccaacggcctattcttcaatttctcgcgtgcgtttagccccggctgcattcttgccagcaagatacaactttgaaggctatatcccccgtagctgctccagttcgcttcagatctatagccggtcatcgatgttaaatctaccaccatcttcagctctcacggtgtcctcccagctcacctcctctgacgtagcccagcgttcagaggaatggttcgctcttcgcaaggacaagctcaccacaagcaccttcagtaccgccttgggtttctgggctggcaacagaagggcagagctgtggaacgagaaagtttttggcgcgacagagaccaagctggcggacaccgctaggtctgccatggactggggcacgcatcatgagagcgtagccatagagcagtacacgaacatcacaggaagacacgtgggcaccttcggcttcgcggtgcacgccgaggccagctccggatggctcggagcctcgcccgatggagtcctcgggtgcgggctggacggcgggatcctggaagtcaagtgccccttcaacaagggcaagcccgagctcgcgctgccctggcgcgccatgccctactactacatgccgcaggtgcagggcctgatggagatcatgggcagggactgggcggagctctactgctggacgcccagcgggagcagcctgttccgcgtgccgcgggaccgcgcgtactgggagctcctgcacgaggcgctgcgcgacttctggtggggcgacgtggtgcccgcgcgggagctggcgctcctggggaagcacgacgaggcgaggtccttcgagcctcggcccaagcaccggctcacgaacctggtgctgtacaggagcaggaagctggcctccgaggccaagctgctgtggatggatgttggcggccgtgtagagttctttcagtgagacgttctgccggtggttgtactgtgcactgtgttgtgactattctttgaattaactcattgccttc

SEQ ID NO: 98401 - DNA, 1500 bp, Zea Mays
atcttgggattactgtaggtctgtttctgggagacccttgagcacacccgagccgtccaatttacatcggacggtgctgcgtggccgtcagggaaaaggattaggggacggggagagaacgaaacaaaacccaaatatctggacgcacacactgggccgcgctgcttctccgtcacgctgaatcgtcgtcgccgccggccagccgcaggagctcgccgtcgcgcgtttttgaagctctccaggaaagggggcgcgcgcaggcgcagcatgagagcggccgtgaacacgccacctccgcgctgctactcgcggcggcgcgccagcgccacgctgctggaagcgcgttatgtgttcgaccacgtgccgcagcggcgcctgccgagcctggctgcggaactccgcgcgcggcccgcgtccgtggctgcccggaggcccgcgcggcgctcggccgcgtctgcggctgcccccacctgtggcgccgcttcagggcattgctgcagattccaacggcctattcttcaatttctcgcgtgcgtttagccccggctgcattcttgccagcaagatacaactttgaaggctatatcccccgtagctgctccagttcgcttcagatctatagccggtcatcgatgttaaatctaccaccatcttcagctctcacggtgtcctcccagctcacctcctctgacgtagcccagcgttcagaggaatggttcgctcttcgcaaggacaagctcaccacaagcaccttcagtaccgccttgggtttctgggctggcaacagaagggcagagctgtggaacgagaaagtttttggcgcgacagagaccaagctggcggacaccgctaggtctgccatggactggggcacgcatcatgagagcgtagccatagagcagtacacgaacatcacaggaagacacgtgggcaccttcggcttcgcggtgcacgccgaggccagctccggatggctcggagcctcgcccgatggagtcctcgggtgcgggctggacggcgggatcctggaagtcaagtgccccttcaacaagggcaagcccgagctcgcgctgccctggcgcgccatgccctactactacatgccgcaggtgcagggcctgatggagatcatgggcagggactgggcggagctctactgctggacgcccagcgggagcagcctgttccgcgtgccgcgggaccgcgcgtactgggagctcctgcacgaggcgctgcgcgacttctggtggggcgacgtggtgcccgcgcgggagctggcgctcctggggaagcacgacgaggcgaggtccttcgagcctcggcccaagcaccggctcacgaacctggtgctgtacaggagcaggaagctggcctccgaggccaagctgctgtggatggatgttggcggccgtgtagagttctttcagtgagacgttctgccggtggttgtactgtgcactgtgttgtgactattctttgaattaactcattgccttccga

SEQ ID NO: 98402 - DNA, 1288 bp, Zea Mays
actgcgcattctggggttagccgttcttgttgagtacttcctacatgctttcccagatcaacttctcaccttcgttaatatatgtcatacttattccaaaccacagcatcatttgtcaagctttctaaccattgagcagttactcgtttgtttagggcattgctgcagattccaacggcctattcttcaatttctcgcgtgcgtttagccccggctgcattcttgccagcaagatacaactttgaaggctatatcccccgtagctgctccagttcgcttcagatctatagccggtcatcgatgttaaatctaccaccatcttcagctctcacggtgtcctcccagctcacctcctctgacgtagcccagcgttcagaggaatggttcgctcttcgcaaggacaagctcaccacaagcaccttcagtaccgccttgggtttctgggctggcaacagaagggcagagctgtggaacgagaaagtttttggcgcgacagagaccaagctggcggacaccgctaggtctgccatggactggggcacgcatcatgagagcgtagccatagagcagtacacgaacatcacaggaagacacgtgggcaccttcggcttcgcggtgcacgccgaggccagctccggatggctcggagcctcgcccgatggagtcctcgggtgcgggctggacggcgggatcctggaagtcaagtgccccttcaacaagggcaagcccgagctcgcgctgccctggcgcgccatgccctactactacatgccgcaggtgcagggcctgatggagatcatgggcagggactgggcggagctctactgctggacgcccagcgggagcagcctgttccgcgtgccgcgggaccgcgcgtactgggagctcctgcacgaggcgctgcgcgacttctggtggggcgacgtggtgcccgcgcgggagctggcgctcctggggaagcacgacgaggcgaggtccttcgagcctcggcccaagcaccggctcacgaacctggtgctgtacaggagcaggaagctggcctccgaggccaagctgctgtggatggatgttggcggccgtgtagagttctttcagtgagacgttctgccggtggttgtactgtgcactgtgttgtgactattctttgaattaactcattgccttccgagtgtcctgttcttttttttgttctgttttttacgagcgtatgatcttccactcacgtcttgtgatcgttttgtgtgtgcatcggatttgatgtatttccattcgctgaaactgtgaaatc

SEQ ID NO: 98403 - DNA, 249 bp, Zea Mays
gagatgagtgcatctaccgccatgggagcgctcgagcaggcccacctcgcggtcgtcgcttccgcatgcgatgatgatgagcaaaacgactacatcgacatgctctcaggggacaccgcggtgacggggctacaccgtggagccaacggtgcgcgctggtgttggggcttgatgaggacgaccgccatgagggcctgtgctggacacccaagcatgtctccaaggccttccgcgatggcacccgaggta

SEQ ID NO: 98404 - DNA, 460 bp, Zea Mays
gcatggaaacatcttgcagagcatgcaaggctttatatcccattagacagagcacattagacgacatagtggtgtcaactttgggcatatcgggagctaggagagcaggggcggcaggcgtctgccatggtcaatttttttggttttggctccctcatgtgcagggccgatgcaagcgaaggtgatattgaaacatctagagaggaggggctcagcagtatctgagagagctaaaactatgtaaattatttaagggggtgtttggtttatagggactaatttttttgtccatcaagtttattatattttagtccctaaaatattaaatatggaaaataaaactctattttagtttccatatttagaaatttagtaactaaaatgaaataaaatagagggactaaaaattagtgatggagtaccgccagtgttaagccagtaaactggcgcatgttggtcc

SEQ ID NO: 98405 - DNA, 1877 bp, Zea Mays
cttccaagtcccctcaacgcagacgcagaacatgaccacaccacagttcgcctccctctcacaggtcacaggctcacagcacactgccactccgaaaccccaagcgccaccaggaccaggcagcctcctccgtcctatctcctccccgcgccgccgcggccatgctcctctccgggcctccgccggtgcccaccccgccgctcctcctcccggagagcagtggcgaggacggcggccacgattcctcctcccgcgccgcggcagcggtgggatcggcgccaaagaggcgcgcagagacatgggtccgtgaggagaccctttgcctcatcgcgctgcgccgggaaatggacgcccacttcaacacctccaagtccaacaagcacctatgggaggccatctccgcccggatgcgggaccaagggttcgaccgctccccgaccatgtgcaccgacaagtggcgcaacctgctcaaggagttcaagaaggcgcgcagccactctcggaacagcggcggcggctctggctctggagggaacggcaacgccaagatggcgtactacaaggagatcgacgacctgctcaagcgccgcggaaaggctacgggaagcggcaccgccggctgcgttggcagtagtgccgggaagagccccaaatcaaattgcaagattgattcctacctgcagttcaccacagataacggctttgaggacgctaacattccctttggtcctgtggaagcaaatggtagaacgatactgagcattgatgatcgtttggaggatgacaggcatcagcttcccttgacggctgctgatgcagttgcaaccaatggtgtgaacccgtggaattggagagacacctctactgatggtggagataaccgtggcaattttggtgggagagtcattttagtgaagtggggtgattacactaaaaggattggaattgatggtactcctgaagcaattaaggaagccatcaaatcggcatttggactaagaacaaggcgcgctttctggcttgaagatgaagatgaggttgttcgaaccttggacagagacatgccagttggaacatacacacttaatcttgatgatggtacttgtgaactctcgtcttagtcgtagtgtgaaattttactctatgaataactaggtctgtataggatgtagtgatgttgttatgccttgtctaagggacgaagggaaatgtggaaattagaaagaaactgacatggacaactagtgaataacggttcgtattatttcaaactccttttccgtctggatggtagagcgtatagactcataaaaatttgtgtgcgtggatgagattagtacatgaagttacaaaagtacagtgctttctctgactgttgtttggccaaacacggagacaaacaatccataggcctttatcacttgagaggcttttcatttaactactgaagtctggggggttatccttttttttcagggatgacaatcaaactctgtgatgcaagccgcatgcagacgccagaagacaagacattttacactgaagaggactttcgagatttcctgtctcggcgtggctggacatttctcagggagtatggaggctatagaaacgttgatagccttgatgatctccggcctggtgtgatgtatcaggggctgcggtcgcttggtgactgattttgcaacatctactttggccagacatgtcgaagtggaattgctagcagtgccatttagtgtaaatttaagtaaggccatccagattccagatatatgagcggtcctctcgcatttgtggagcaaaacttgcctccacttatcttttcttcagttcacactcatgtcggagccgcctctgtgactagtatgcaggtt

SEQ ID NO: 98406 - DNA, 2162 bp, Zea Mays
cttccaagtcccctcaacgcagacgcagaacatgaccacaccacagttcgcctccctctcacaggtcacaggctcacagcacactgccactccgaaaccccaagcgccaccaggaccaggcagcctcctccgtcctatctcctccccgcgccgccgcggccatgctcctctccgggcctccgccggtgcccaccccgccgctcctcctcccggagagcagtggcgaggacggcggccacgattcctcctcccgcgccgcggcagcggtgggatcggcgccaaagaggcgcgcagagacatgggtccgtgaggagaccctttgcctcatcgcgctgcgccgggaaatggacgcccacttcaacacctccaagtccaacaagcacctatgggaggccatctccgcccggatgcgggaccaagggttcgaccgctccccgaccatgtgcaccgacaagtggcgcaacctgctcaaggagttcaagaaggcgcgcagccactctcggaacagcggcggcggctctggctctggagggaacggcaacgccaagatggcgtactacaaggagatcgacgacctgctcaagcgccgcggaaaggctacgggaagcggcaccgccggctgcgttggcagtagtgccgggaagagccccaaatcaaattgcaagattgattcctacctgcagttcaccacagataacggctttgaggacgctaacattccctttggtcctgtggaagcaaatggtagaacgatactgagcattgatgatcgtttggaggatgacaggcatcagcttcccttgacggctgctgatgcagttgcaaccaatggtgtgaacccgtggaattggagagacacctctactgatggtggagataaccgtggcaattttggtgggagagtcattttagtgaagtggggtgattacactaaaaggattggaattgatggtactcctgaagcaattaaggaagccatcaaatcggcatttggactaagaacaaggcgcgctttctggcttgaagatgaagatgaggttgttcgaaccttggacagagacatgccagttggaacatacacacttaatcttgatgatgggatgacaatcaaactctgtgatgcaagccgcatgcagacgccagaagacaagacattttacactgaagaggactttcgagatttcctgtctcggcgtggctggacatttctcagggagtatggaggctatagaaacgttgatagccttgatgatctccggcctggtgtgatgtatcaggggctgcggtcgcttggtgactgattttgcaacatctactttggccagacatgtcgaagtggaattgctagcagtgccatttagtgtaaatttaagtaaggccatccagattccagatatatgagcggtcctctcgcatttgtggagcaaaacttgcctccacttatcttttcttcagttcacactcatgtcggagccgcctctgtgactagtatgcaggttcaggcttatgtaaaatgtagccgcgtgcaattggagtgtgcagctaatgatcctccagataactagcttgttctaccattccttgtaaaaatgtggaatgatcctccagctaatgtaaaatgtggcaagtgaagcaaatgtaccctgcaatattgtacttgtaaaaatgtgcaattggagcttgttctaccattccttgcagtaaatctgaatgtggcaagtgaagcaaatgtactcttgcaacactgtacttgtttactcaatttccactttgtgtccagggcattgacattcaagtcggcaagatagttgttatcagctgcagctgttcgaactgctgcagctgcaatctactgcaatatataatctactgcaatatatagagacaaaatactgtagcattcgcagccagatcttaaaggcgctgactcatgttatattaaaaccggcatttcaatctcgaaattctaaatggtaggagcgtctcacacttttcttccccccaaagtagcagtatactattagtgcagtacacgatagacgtgaatgaacgattcacacagccttcacgccaagctctagcagcagcagggtaacttttggtgcaaactctactcctcctcgtcccactcgtccttcttgtacgacaccagcgtgtccacc

SEQ ID NO: 98407 - DNA, 3771 bp, Zea Mays
atggggaatctttgctggagcacaaatagagaaagatggcgacgtacggccccgtccccctccgtccccgcctgcagcgacctcccggctgccgtatcctccttcgccgacgcgttcgtggactttgccgtgtccgacatcttcttcccgaccttcccctcctcctcctcgctccctcctcgcccgaagactccaaccaccttcctcccttccccatcccggctcgtcgccatcggagacctccacggggacctgcccaagtccctctccgtgctccgcctcgccggccttgtgcccccgtcttgcaccccgactccccctccgcctccggcctcctcatggcccgcggggcccaccctcgccgtccagctcggcgacatcctcaaccgcagcgacgacgagctccgcctcctatacctactccaccgcctctccctctctgccgagacacgcggaggcgcgttcctccccatcctcggcaaccacgaggtcatgaacgtctccggcgacttccgcttcgccacgccgcagggtttccacgacagggcggtgtgtgggggggtgctggcgtgcgcgggattcgcggcgtgggctgctgaggcgggcgtcgcgggagcggcgggttgctggcgcacgggcgttgcaggagcgggagcagtctacactgcctccttaatagttagtagagattgtttaaaattaaactctacgctaggactgtggacgtgtttttgccccatccgatctaaacctaatccattgccatcctatattgatataggatcatgggcaggtttagttaatccacggcgaagaaaaaaatacatgctgccaagtgccaactggcaagaaatgaagaaactgtcctctggcaagaaaagcgggaaaggcgatgggctgggccggccaggagagtcgctcgattcgcaggccaggcagatcgcggtcagatccccactgccttggcgggaagcctatcaatcctcaccccaaatcccccgctactccccgctccggctccgttcacgactacggcgacgagcaccaccctcacccccagccccacaccgcgccacgccgatgtactcccaactcgtcgacggggactccgactccgagggatccctgatctccgacatctccgcctccccgccccgcggccgttcgccctcgcccccgcccccgcccccgccgccgcccgaacaccgtcccaaccccaagcacaccgccaccgtgaaacctaagcctcccaagtccaaggcgaagcccaagcttgcagcatccgcctgcaccgccgctgtttcgccgcctcccctcccctccgccgcgctctccgacccgcacggtctcgtctcgcgcatcgccgctgctcccgcgcttgtcaccgccaccagcaccgtctcttcctcctccttccgccgtctcgtccagtcgcgcaacccctccttcgatcccgccgccgctttcagcgctccgacacccgcacccactctggcgcccaccgagatagcaaccgcagcgacagcgcagtgccctgcgccggacgcgccgccgcagaccaggcccaagcgggtgcatcccaactcggtgtcggaggtggtcccgcccgcggcggaggcagagcaaccgaagcggccgagagggggtgccgaaggaaactttgtgcggctcaacatcaatggctacggtcggaggaggacgttcaggaacgcgcaggccaggcgccctacgaaataccgctcctggcggcggcagcgacatggcggcgcaaagcctcaaggccgtggtgacgaagaaggggattttgtggctgaagctatgatagagcgggagaagaagagggcaggaggagatggtggtgtcctcgaggccgtcgaagcagcgcgagaggacccgtctgagcagaatcttgagaatttgctcagaattatctatgggtacaactctttccgcgaggggcagcttgaggcaattcagaaggttgttgcaggagagtcaactatgcttgtgctccctactggtgcgggcaagtcactatgctatcaggtacctgctatgattttgcctggactaacactggtggtaagcccgctactctccttaatggtggatcaactgatgaagctacctgcatttttgccaggtggctttcttgcaagcaatcagacaagcgatgagtttcatgagacattacaaaggttgcgtggaggggaaataaaggtgctttttgtttcccctgaaagattcttgaatgaagaatttctgctaatatttagggacgggctacaaatatccctagttgctattgatgaagctcactgcatttctgaatggtctcataattttagaccttcatatctaaggctccgtgcatcactacttcgaagaaaacttaatgttcaatctattcttgcaatgactgcaactgcgacaactcaaaccttggaggagatagtgactgtcttagaaataccatctgataacctcattaaaacatctcaaataagggacaatctgcagctgtttatcagcatgagcaataacagactgaaggatctattgctgttgttgaaggcttcaccttttgttgacatgaagagtataattgtctattgcaagtttcagggagaaactgactatgtttcaaagtacttatgtgataacaacattactgctaagagctaccacagtggacttcttatgaagaacaggaatcgtgtacaggagcttttctgctctaacaaaataagagtggttgttgcaacagtggcattcggaatgggtcttgataagagtgacgttgaaggggtgattcactatagcttgccagaaagcttagaagaatacatacaggaaactggccgtgctggaagggatggacgactgtcatattgtcatctatttcttgattcaacaacattctataaaagtcgtagtcttttgcacagtgacggtgttgacgaatatgctatgagcaaatttcttttccaggtattttcatgtgaaaattcagtggggtgcatttgctccttggttaaagagtcgacttcgcgcaagttcgatataaaagaggaggtgctcttcacagtcctaacacagctagaaattggtggtcagcaatatctccgtttacttcctcagttcagtgttacctgcaccctgtactttcacaagacgtcaccacagctgcttgcagacaaggatgtactagttagatcagttctggataagtcagagactaagggtggacattttgtcttcgacatgacaaaggtagctaatgatctgagcatcacagtgaatgaagtatttgaccatttgcaacagctaaagttctctggagaaatttcatttgaattaaaagatccagcctgcatttacgtgatcttaaagaagccagatgacttgaatgcgctttcagcagatatcacaagatggctttctgaagtagaaaactcgaagatcagtaaattggatgcgatgtttgatctagcaaactttgctgtcaagggttgccaaaggactgatggctgttctggctcccagcacactccgtgcattcaaaagaagatcatacagtactttagtaagaactactccacctcagacagtggccaatgtactcagccacaaaggggcagcccattcttgcaagctgacataaaggctggaattttggttggcaggggccgctatttggaggttgatttcccagtggtcatggaagctgccaaggccgagctggtcaaactcgtgggaaaaggagagtag

SEQ ID NO: 98408 - DNA, 1001 bp, Zea Mays
gagaaaagaataaacagcgaggccttcgtcaaatcaaatcataaacccaaacctcctcgtcctctgtcagactaccactctctccctcgcggactcgcggttgattcctcgcggcggattcgcatcttccgcgtcagggacagggagagtactccgtcggacggttggaggagaacagggagaggagctctgagatggagacggccgcctcggcagcgcgcctggtgaactacccgctcgtcgcggcgcttctcgcgttcgccgtcgcgcagtcctccaagttcttcaccacctggtacaaagatggccggtgggatgccagacagtttatagcttctggagggatgccatcatcccactcagctacagtgacagcactcgcagtggctgtggcgatacaagaaggctttcatagtgcaacctttgcaactgcactagtctttgcatgcgtggttatgcatgatgcttttggagttcggttacatgccggaaagcaggcagaggtgctgaatcaaattgtctatgagctaccagaagaacacccattatcagagacaaagccattgcgtgaaatccttggacatactgttcctcaggttgtggccggttgcatccttggagttctcatggctgccgttatgcacctgtctctcgggagttcttagtcaactgttgttcatggatgtcatgacagatgatcacctaatgtctcgctggtgatggctataaagcatgaagcatgatctccgcatggatctggttgtccaagtgtttggtagtacgaagttctaaccgatttagttctggacagtaggatataggttgtgtagcttgaatcggttactgtaaatctgaaaggttttgctttcaactccaactaccaatcacggtgtaatggaagctttgttatacaatcaacagcagtaaattcattctgaggtaacgatcggtatagttgatatatcatgccatcacatttgcttcccgttccaaattgtaag

SEQ ID NO: 98409 - DNA, 201 bp, Zea Mays
ttacaaagaatagctataggtatggttatgcatgatgcttttggagttcggttacatgccggaaagcaggcagaggtgctgaatcaaattgtctatgagctaccagaagaacacccattatcagagacaaagccattgcgtgaaatccttggacatactgttcctcaggttgaattaaatgctttgaattacctcccttga

SEQ ID NO: 98410 - DNA, 336 bp, Zea Mays
atggtgcggccggcggcgaagcacttggtggcgctcgccgtcgtcgccattctcggcatcggcctcgtcgctgactacctctgggcttcgtccttctccgcatcgtacgccagctccgccgctctgacgccgcccgtcgcgaagaaggtgaagcatcccatttctcactcccaatgcttagggatgcgagactgctgcctgtctcccgctgctgaggctcaagcgttactcctccgtggtagggttggggagcgtagtaccgacgtgcgtacgggattggagggatctgatggtaatcagagaggaattgggaacgtatgcgtgttgatcatctga

SEQ ID NO: 98411 - DNA, 195 bp, Zea Mays
agggcttgtgttgctgcaaatgataaacttcttgttatcggtggtcaagaaggtgatttcatggcgaagcctgggtctcctatatttaaatgtgtcagaagaagtgaggttgtgtatagtaatgtttatatgcttgatgatggaacgacttggaaggaacttccacctatgccaaaaccagattcacatataaaa

SEQ ID NO: 98412 - DNA, 3430 bp, Zea Mays
cgctacgcaatgcttccagacccctccggacttcggccgctagcgccctcttcgttgcgcgatggagctccgaggctccaccccccaccaatgatgcgtccagacgcctagatgagcaccatccccttcccctccacccatcctcagaagatgtcatgctgacggcttcgacgtggtctccagtagatccgagcggagcgccttcccgtctacccctcaaacattgtcgcagtgcctgggccgtcgcgaggagcccccaaacacaatctcctccttagacgtcgccggtctcctcgctccctcctcaaacgtcgtcgtgctaccgacactgtctgtggcggctccaaccggagcaccatcccacctcctccgtcaaacgacgctgcggtgtttgggccaccgtcgggagtctgaatctgccccctcagacatcgccacctcgaaacgcacaggttggcgcggtagggggcactggtggttcggcgcggtcacctggcgaacgacgacgaagaggaggaggtggccgagtctatcatgaagagacgctgtgaagagcagtcgccatggccgatggatcagttgccggttgcattcatcgaagatttggccctctccaccaccatgtcgctaccccatacccgtcttccctgcatatctgaatgatgcaccttcaatccaccgctgcccaaagagcgaatggggaaggaccgacctgagcattctgtccggtagctgggtagcaagaagcaccagcccttccccctcccaagatatagatcttatacgggtaatgggttgtacggcccagccgatgatccgcctcacccagcccaatcaggcaaccactcattcgtttccatcgcgccgaccccgtgccccgctggccgctgatccgcctcgcttccctccgccatctcggcgaccccgcggcgcggtccacgcacagcccgtcccaaaacccagaccaactgccactagcggtagagcctagcgcgcagcgcacacgcagtatacaactcttcaatccttcgctgcctgcctgcctgcctgccagtttccctgccctccccatccactccaatcccaccaccaccaccccgggccgcagcccgcagcaagcacgcagtctcccacctggtcaaaccgctcccctcccccaccaccaccgccgcgccccaatccgcgtgcatccgtccgccatgcctcctcctcgcctcctgcccccgatcatcgtcctcctcctcctggcccctcccgcggcgccgcagcccgcgcccggatcggaggcggcgccgcagcaggacggcctgcgctgcctccggggcgtcaagcacgacctcgccgaccccaacgggcgcctcgccgactgggacttcaagaacacttcggggggcgccgtctgcagttacagcggcatcggctgctggaacctgcaggagtcccgcgtgctgtcgctctcgctctccggcttcggcctcgtcggctccatcccctcctcgctccagtactgcagcgccgccaccacgctggacctctctagcaacgcgctcgtcggcacgatcctgccggccctctgcgactggctccccttcctcgtcaccctcgacctctcctccaaccagctcaccggcgcgatccccgcggagctcgccaactgccgcttcctcaactcgctcacgctctccgggaaccagctctccggccagatccccgcctccctcgcgcggctcgaccggctcaagtcgctcgacctctcggggaaccagctctccggccagatcccgccccagctcggcgaccgcttccccagggactccttctccgggaactcgggcctctgcggccgccccgtgtcctcgcgctgcggccgcgggctggggagcgccggcctcgggatcgtcatcgccgcgggagtcttgggagccgccgcgtcgttgctcctcgcctacttcttctggcggtgcagcgggaagggcaagggaggacgccgccgccacaggcgcggcggcagcgagtcgggcggcggggaggacgggagctggtggaccgagaggctgcgtgcggcgcacaaccgcctggccccggtgtcgctgttccagaagcccatcgtgaaggtgaagctcgccgacctgatggccgccacgcaggacttcagcagcagccacatcgtggtcgccgggagctcgcgggcggggacggcctaccgcgccgtgctacgggacgggtccgcgctgacggtcaagcgcctgcactcgtgcccgctctcggagaaggcgttcagggcggagatgtgtcggatcgggcagctgcggcatcccaacatcgtgccgctgctgggcttctgcgtcgtggaggacgagaggctgctggtgtataagcatatggagagcggggctctttcgtcggtgatgaagaagaagccaggggaggaggcgccgctgctggactgggcgacacggctgaggatcgccgtgggggcagcgagggggcttgcgtggctgcaccatgggttccaggttccgcagattcaccagaacctgagctcgagcgcagtgcttcttgacgaggactacgaggcccggatcacagacgttggcctcacgaggctggtccggatggcgcccggcgagggcggcgatactagccctttcctcaagggagacttgggggagttcggctacgttgctccagagtgcgcgagcaatccggtcggcacgacgaaaggcgacgcgtacgcgtttggggtggtactgttcgagctcgttagcgggcaggaggctgctgccgctgcggtgggcaccgtcgacgtgatgggcgaagggttcaagggcacactggtggactgggtttatcagcttaaggcctctggccggatcggtgacgctgtcgacaaatctttgcgcgggaagggccacgaggcagagatcgaggagttcttgaaggtagcctttgcctgcacccagcctcgcgtgagggagaggcactccatgtaccgggtctaccacgccctgaagagcatcggagaaggccgcgacgccacggagcagttcgacgagttcccgctggcctataacaaggacgattcggacactatgtagctagctgacgctgatcaccgattggattgtggaaatgttttttttgtcaggctcgtcgatgatttatatatatatattatatgtgtagccttgctatggacggaccagaggcacaatattgaggcgccaaagctcgcgtcgggtgctgggtggccaattctatcgtcgcatcaacagggatgcgatgaccatgcatgtaagctgtaagatcagtttacgattctgtatgtctctctctctctctctcttttttgttcagttactgctagtgcttgtagtatctgtaattcttgatgtgtctatctaaatcctgatatcaccttccaactcgt

SEQ ID NO: 98413 - DNA, 388 bp, Zea Mays
agggcagtgagtgtcatggatataaagttcgtcttgttgggcattctttaggaggcgctgttgctacagtcctaggaatgatgctatatggcaaatacccaagcgtgcatgtatatgcatatggaccacttccttgtgtggactttgtaatagcggaagcatgttcgcattttgtcacaacgtacgaataaactgagatcttcctgtggctactattttcaatggaacttcagttttggtgtgctgttctcttataaggttcattaacttctgactaccgaggtgacttttgctctgtttccttgcagcattatttgcaatgatgaattttcctctcgcctttcaatcaattcgattcttaggctacgatctgctgcaataagtgctc

SEQ ID NO: 98414 - DNA, 781 bp, Zea Mays
caaatttctcatcagattccattatgcaatactgaactagacctccacaatacgcaaaatggcttttttaggtataatgggtccagtgcatcaatagatgagcatctgagctatgaaggcataagcagtggccatgatatgcaaataattccacttgatggggctgattctggttttgaagggcaccagacatcttacagagaaataccagtggagcctcctgagatgtttcttgcaggcttaattgttcacatagtgcggcaaagaagaagtctctttcctctttggaaatgctggagcatccaggaaactgaaccaccatacaaagctgttttagcgaaaagggagaacttcagggatatagtggttactccttacatgtttacagatcacttaccatggaggtgccactttgctatgcagaagattgttgaagctcaaacgcctatgagacgtgcgcattccgatccacccgtacaacaacatttggtctgaccaggacaaaactgctgcccatgtacagaattgcgtgaaggacagaaaattatgatgatcacatttagcagcatggtttattgcaggctggaccgctggaggcatatttcagtccttcaggcagccagaatatgtccgtgacagacccaaaatcgtgacgagcttattgacagtcagaggccaccgagacatgatcactggttactgtacaccaaacagtatctaatcagtctactcaccctggcaacctgcgcgtcaattaattaattcatcgattgttctcttc

SEQ ID NO: 98415 - DNA, 1725 bp, Zea Mays
atgacggccgtcgcgacgccgacgccgccaccgccgcggcagctgagcctggaggaccttaaggcaatatccgtgctcgggcgcggcgccaagggcgtcgtgttccacgtcgtgcacgcccatggagaaccggacggcgagggcgagggcggcgccgcggccgcggccatggcgctcaaggcggtctcgcgggaggccgcgcggcacaagaaggcgggcagcggggacggggacggacaccgccggatctggttcgagcgcgacgtgctcctgtcgctgcgccacccgctgctcccctccctgcgcggcatcctcgccaccgaggccgtcgtcggcttcgccatcgaccgctgcggcggcggggacctcaactcactgcggcggcggcagaccgagaagatgttctccgactccgtcatacggttcttcgccgcggagctggtgctggcgctcgagtacctgcacagcctcggcatcgtgtaccgggacctcaagccggagaacgtcctcatccaggacagcggccacatcatgctcgtcgatttcgacctctccacgcggctcccggcgccgccgcaggagcctgacgcgccggtgaccagtcccaatgccaagccggcgcttccggtcgccgcgccgtcgccgagccgcggcagtgcaaggaagccagcgggcgccgcactgtgcttcccattccgcaccgccatcgccacaaagcctgccgccccggccacggactcgaggtcgccgctgtccacctcgcgcacggcctcctcctcctcgtcgtcgtcgtcctcgacggcgaccacggcctcctccgcggcatccgccggcgggcggactcccgcgaagtcgaactcgttcgtggggacggaggactacgtggcgccggagatcatcgccgggcgcggccacgacttcacggtggactggtggggcctgggcgtggtgctctacgagatgctctacggccgcacgccgttccgggggcagagccgcaaggagaccttctaccgcgtcctcaccaagcagccggagctcgtcggcgagcagacgccgctgcgcgacctcatcgcccgcctcctcgagaaggaccccgagaagcgcatcggcgcgcgcggcgtcagggcccaccctttcttccgcggcgtcgactgggaccgcatcctgcaggtggcgcgcccgccgttcatcccgacgccgccgccgcaggacgagggcgaggacggcgacggcgacgaggcgcttgacgtcgagaaggtcgtccgcgaggtgttcgcgtccaacgacgcggagggcgggaaggcttggcctgtggcggacggaggccgtgtcggcggcgacggcgattgcgacgggaggggagatcaatctaaagatggcgatttctccgtgttcttctgagctatttattttcttttgatttgttttttcttttcttgtttttaaaaacaatagctactagtggtagtagatgtatatgctgtgtatggagtattatttgttctcctcaaggatgatgtgatttagcagctgatattagggagtgagtacggcgcaatgatggccggtggagtacatacataaattataaagagattctcctgttcgatggggtatatagccattagagtttgtaattttttatctcttttatgttttggtttgttcgtactttgttcggtacataatgaataatgagagcgcaattgtctgttcaaatgt

SEQ ID NO: 98416 - DNA, 1306 bp, Zea Mays
aaggagatgaggtgtcaatctgatagacaagtcaaaaaggcagcccacttttcaggaggggagcatatcatgtccaggaggggttacagttacagatatagggaatcacagtcatcagattttattcatcgatgatgatgtgtcatgtgtgtgtgtatggaattgccatggacatcactcctgtttttttcttcttctttccgttaaggcccagatagtgggctggcccggacaggcctacgtatgtccagtccagtccagcagtgttgacgaccagcacaaatacgtgcatcttaaagtctgagattcccaagggcatctggagcacacgcctccctgaatgcctttcagcacttgaggttgcaagtataaataggacacgtacctgctgcaccaatcagtgcactcaacaagttcacagttgacgccaaatcagctagcttctttgctctctctctctctctctctctctctctctctctctctctctctctctctctctagagcttactaggcctgtaggaagactcctcaaggcaaccttttttttttggctcacgaccctcaaacttagcattcttgactaacctaaccatgtcaagggatccactagtggtaggacacgtggtgggtgacattttggacccgtttactaaagcagcctcgcttaaggttctgtacaacaacaaggaactgaccaatgggtctgagctcaagccatcgcaggtagcaaatgaaccgagggttgaaataattggtgggcgcgacatgagcaacctttacactctggtgatggtggatccagactccccaagtccaagtaacccaacaaaaagagaataccttcattggttggtgacagacatcccggaatcagcaaatgctagctatggaaacgaaatcgtcagctatgaaaacccaaagccaactgctggaatacatcgctttgtctttgttctcttccgccagtctgtccagcaaaccgtttatgcaccaggatggagacaaaatttcaacacgagagacttttctgcgttctataatcttggacctcctgtggctgcagtgttcttcaattgtcaaagggagaatgggtgtggaggcagacgatatattagataaacaccatctcattgactgcaccgcaagaaggaatattacttaaatttgaaagaaaagaaaattgcaaggccagacacttcgcaaagcgatgataatgctgggtcttaaaatgtagcttcatttgaaaattaaattactttgccacatctgcaagtgcaatgaaattagcttatagtttcatcat

SEQ ID NO: 98417 - DNA, 1728 bp, Zea Mays
actggctacttccttctccccttcaaatttgcgtagcgttgaatccacgccctcccggaacccccgaatctaccgacgctccctctcagtctctcacaacgctcaatccaaacgcgagccgcgagcctaaccctagcaaccgtgagtgatggcgcgcccaagggctaagaagcgtacgacgccccaggcggccgccactgattcggtcgagccggatgccaccgtcggtgcttcgagcaagctggaggaggcggcggcggagccggcaactcgggagcgggggaagcgcgtcaaggcgccgcccaagcccaagcccgagacggaatacttcgacgagaaaggaaatttcgaggatctatggttatctgctttccccgttggtaccgagtgggaaaacatcgataagataaaggagttcaactggagctttgaaaatgtagaggaagccttagaagaaggaggagagcttcatgggaagaccctttatatgtttggaagcaccgagccccagctattgtatgttaatggtgaatcaaagatagtgcttatcccaattgtcgtcgctgtagactgtcctttcccaccttcagacaaaattggcataaattccgtccaaagggaaaatgaggaaatagtgccaatgaaggcgatgaagatggcatgggtgccttatgttccccttgaggaccggctgagcaggattgacattttcaaaacaaaaatattcacgctcggatgcacacagcgaaggtctgcactgaagcatctcaaaattgagagagtcaagaagtttgactactgcatgccttattatatgccactgcaacctcttgaagatgaagaaaacacaactatcaatttcttatatcctctggaacccccgatagtagatgagttcgactgggaaatggatgattacgaggattttgcagatcagaaagtccaagaaggtagcctgcccgagggcgagaaagaaaaattcaaggagttcctgaaggagaaggttagagaaaggaagagagagctgagacaggctaaagaagccaggaagaaagctattgatgatatggatcctgcgatgaaagaggcattcgagaatatcaaattttacaaattttatcctgtgaaaaccccagacacgcctgatgtaaacaatgtaaaggctaggtacatcaacagatactacaggaatgcccattatctgaagtaaaggctctcctgatctcacgtgcttgaggacgagcttgtcatttgagttggtgtaaaaaaattttgaaacccgggggagaaaagtttggtgacatctttggatggtcttactgttgtactgtactgtactagaattgccctcagactttcgctgtccggtgcatacagtcagaaaggttcaaggtagttttgagactaaccaaatcatgatggaacaatttgttcctttgtcatcatggttactgcacaccctgatggttatgctgtgactttttttaacatctgctatgagcaagctatgaattatgctgtaatctgtctggtgaagcgaccaggtacagtagggttcagactggttaacaatgggataacctggcttctaggcctgtttgtttttttccaattaataatcggtcttttgatctaatttaaattggtttctactccctttgccctacaatgaatgttgtttgacttttttggcataagttcgactgactcgtcttattcaaaatattt

SEQ ID NO: 98418 - DNA, 372 bp, Zea Mays
atggaggccgagcaggtgaagcggcgcgctggtacaggagaggcgcgtgcagagaacagggagcagcagcgctggggcgagttcggagagagccaggggcacactcccgcggcaccagagagctcggccgccataggagcagggaacaatcgctggagagagagtgcggcagggaggaagaagcttggggagatggggaggagagaggtccgcgcgcagagagtttcgcgagctgggcgagcagggtacgacttccagagaactcagccgccagcagagagaaccggagagggaagacctgggcgctcaccaggggagctctgctgggcgccgatagaggaagagggaggagcaggaatggagcgcgcttga

SEQ ID NO: 98419 - DNA, 2360 bp, Zea Mays
ctcatagagtcaaaagtcattgcagacttgcaagcttccctcccctactatcaggcgaatcatatccatccacttactacgctgctaggctgctacgaacaaaatcctcctaattaagacgggcgtcgttggcttcaaatactggtctctcccctgtccaaaagtctctcgaatctccaccctggttctgcaccggttccagaattttctcccatttacagggtctccccgtttctgtccggcggttctgccgttccactgcttttgatttcggagtgtgaacttacatcttgctggataataaagattggattttaagcgatttgggggtgcttgcctgatctccccctgcgaggtactgccgggggattggatttcggggaagttttggtggtttgagattcggcttggccggagcaggaatgacgatcgacatgtccattcccgggagctccgggctgctgaacgctgcggggaagagggacatgaagttcttcagcaacccctacgtgcttgcgctcacgggcgctgcaggaatcggtggattcctctttggctacgatacaggtgtcatatctggagcccttctgtatatccgcgatgattttccagcggtcaaggacaattacttcttacaggaaacgattgttagcatggccttagtcggagctatgattggagctgctgggggtggttggatcaatgatgcatacggtcgcaagaagtctactcttcttgctgatttgatgtttgctcttggctcacttgtcatgtgtgctgctgctggtccttacattctaattatcggaaggctcctcgttggtttgggtgtgggtgttgcatcagtcacagcaccggtatacattgctgaagctgctccttcagaaatcaggggaggtttggtgtcaactaatgtactcatgattaccggtggccaattcttctcctatcttatcaatcttggctttactgaggtgcctggaacatggcgctggatgcttggtgttgctgctgttcctgccattatacagtttgtgctgatgctattcctgccagaatctccgcgttggctttactggaaggatgagaaggcaaaagctattgccgtccttgagaggatctatgaatccgaccgcttggaggaagaggtagagctgcttgctacatcctccatgcatgaattccagtccaacaataccggaagctatctggatgtcttcaagtcgaaagaattgaggctagctttctttgctggggctggccttcaggccttccagcaatttaccgggatcaacaccgtgatgtattacagccccacgatagtccagatggctggtttctcctccaacaggctggccttgctcctctccctgatcgtcgcggccatgaacgccgccggaaccatcgtcgggatctacctaatcgaccgttgcggccgccgccgtctggccctcacaagcttggccggggtcgtggtctccctggccatcctcgccacggccttcatactgcagtcatcatccggcctctgcatgagcgccgccagcggcacgtgccagggcgcgctaggctggttcgcggtggccggcctcgctctgtacatcgccttcttctccccgggcatggggcccgtgccgtgggccgtgaactcggagatctaccccgaggcgtaccgtgggacgtgcggcggcatgtcggccaccgtgaactgggtctctaacctcgtcgtggcacagacgttcctgtcgatcgtggggctggtcgggaccggcccgacgttcctgatcgtcgccgggatcgcggtgctggccttcgtcttcgtggccacgtacgtgccggagacgaagggcctgacttttgagcaggtggagcagatgtggagggagagagcgtgggggaacagcggcggcaactgcgagagccttttggcgggtactgctgctgcgccgtaggctacccgttgccagcactggtcaagcgcgtcagttttagtatggccgctctgggcttgatcggctccgtcctggcattagttggaagaaagtaaaaacagattggagatgcagatgcaaactgttgtatgtggtggtgcttatattgctatcctgttgcctgattgtacgtgttgtcgtcgtggcaaatgttcagtgggtgtaaaatatgaggtcgtaccgtgacgtcaaactaaggcaaaaggccagttgtatgaccccagatgggtgattataattatttgtacagtttccggcatatgaatgaatgatgtcctggagagacagtagggcaggagtttttttttggttgtccttggtcaagtgagttggtgtttgggctctacatgcggaccatgacaaacgagc

SEQ ID NO: 98420 - DNA, 2360 bp, Zea Mays; identical to SEQ ID NO: 98419

SEQ ID NO: 98421 - DNA, 2278 bp, Zea Mays
agagtcaaaagtcattgcagacttgcaagcttccctcccctactatcaggcgaatcatatccatccacttactacgctgctaggctgctacgaacaaaatcctcctaattaagacgggcgtcgttggcttcaaatactgggtctccccgtttctgtccggcggttctgccgttccactgcttttgatttcggagtgtgaacttacatcttgctggataataaagattggattttaagcgatttgggggtgcttgcctgatctccccctgcgaggtactgccgggggattggatttcggggaagttttggtggtttgagattcggcttggccggagcaggaatgacgatcgacatgtccattcccgggagctccgggctgctgaacgctgcggggaagagggacatgaagttcttcagcaacccctacgtgcttgcgctcacgggcgctgcaggaatcggtggattcctctttggctacgatacaggtgtcatatctggagcccttctgtatatccgcgatgattttccagcggtcaaggacaattacttcttacaggaaacgattgttagcatggccttagtcggagctatgattggagctgctgggggtggttggatcaatgatgcatacggtcgcaagaagtctactcttcttgctgatttgatgtttgctcttggctcacttgtcatgtgtgctgctgctggtccttacattctaattatcggaaggctcctcgttggtttgggtgtgggtgttgcatcagtcacagcaccggtatacattgctgaagctgctccttcagaaatcaggggaggtttggtgtcaactaatgtactcatgattaccggtggccaattcttctcctatcttatcaatcttggctttactgaggtgcctggaacatggcgctggatgcttggtgttgctgctgttcctgccattatacagtttgtgctgatgctattcctgccagaatctccgcgttggctttactggaaggatgagaaggcaaaagctattgccgtccttgagaggatctatgaatccgaccgcttggaggaagaggtagagctgcttgctacatcctccatgcatgaattccagtccaacaataccggaagctatctggatgtcttcaagtcgaaagaattgaggctagctttctttgctggggctggccttcaggccttccagcaatttaccgggatcaacaccgtgatgtattacagccccacgatagtccagatggctggtttctcctccaacaggctggccttgctcctctccctgatcgtcgcggccatgaacgccgccggaaccatcgtcgggatctacctaatcgaccgttgcggccgccgccgtctggccctcacaagcttggccggggtcgtggtctccctggccatcctcgccacggccttcatactgcagtcatcatccggcctctgcatgagcgccgccagcggcacgtgccagggcgcgctaggctggttcgcggtggccggcctcgctctgtacatcgccttcttctccccgggcatggggcccgtgccgtgggccgtgaactcggagatctaccccgaggcgtaccgtgggacgtgcggcggcatgtcggccaccgtgaactgggtctctaacctcgtcgtggcacagacgttcctgtcgatcgtggggctggtcgggaccggcccgacgttcctgatcgtcgccgggatcgcggtgctggccttcgtcttcgtggccacgtacgtgccggagacgaagggcctgacttttgagcaggtggagcagatgtggagggagagagcgtgggggaacagcggcggcaactgcgagagccttttggcgggtactgctgctgcgccgtaggctacccgttgccagcactggtcaagcgcgtcagttttagtatggccgctctgggcttgatcggctccgtcctggcattagttggaagaaagtaaaaacagattggagatgcagatgcaaactgttgtatgtggtggtgcttatattgctatcctgttgcctgattgtacgtgttgtcgtcgtggcaaatgttcagtgggtgtaaaatatgaggtcgtaccgtgacgtcaaactaaggcaaaaggccagttgtatgaccccagatgggtgattataattatttgtacagtttccggcatatgaatgaatgatgtcctggagagacagtagggcaggagtttttttttggttgtccttggtcaagtgagttggtgtttgggctctacatgcggaccatgacaaacgagc

SEQ ID NO: 98422 - DNA, 1231 bp, Zea Mays
aatgaacatatgcaagaggactgcgtgctaatggcactgaccatacaaaagttcttacggaggttctcaagttctgtcactggtactgctacaggttcttatcacttcatcaaatcagaagtcagctgccaatgtagatgatattgagctacaagacaccaacacacaaggtcatgttttcaaatctggaaccaatcaagctgatgaaaccagggtcctcatccagatgcttccaatcttcatcagctgcttcctcgtctacctgccattcgtgctgctcatgacactaaccatacaggttggccgtgcaatggacagaggtgcaggcgcgatccagataccctccgccgcctctctcatcgcgatcccaacagcgttccacacgctgatgcagccatgctacgacagaatcctgacgccgctgctgagaacagccaccggacaccagcacggggccaccccgctgcagcgcatcggcgcaggatcggcttgcgggatcgcggcagcgtgcgtcgccgcgctagtggaggcaagaaggctgaacgtcgcagagcagcgcgggctaacgacgtcgacaggaaccggtgtgccggcgttgtctgtcttctggcttgtgatccagttcttcctgctgagcgtcatggacacggcatccttcggcgggctggctgagttcatcaggagcgaggcgccttcggcgatgaagtcgatcgcgccagcagtgcagtcctgcgtggctggactggctgcctggtcatgctgcgccttcatccatctcgtgaacaggatgacgaggagtggtggcggtggagacggagggtggctggacggaacggatttcaacagagcacgccttgatcgcttctttctgtcgctgggagccttcgagctgctggcactggtcaattacacgttctgggctaggagatacgccaggaagctgcgacgtgtcagtactgtcgtttgatgagaacgactcaaaaaattaaacacaaccaaacagagcatctcttaaaaaaatcataaacttagatttaataagttgctaaatatatagtgggaacaaaaacaactatagtctccacaatagttctctagcctccaacggcgtaaaggccaaccaattttgtcagttttttttcttcttaaaagctaatgttaaatgtattttaatagattttgacttaaatgtatcggcggaccttgaataatctcgtaaggatttaagggt

SEQ ID NO: 98423 - DNA, 1441 bp, Zea Mays
caaagagtcgctagcgcgtacatgagcgtccaaaccttaacgtactacacgccaaccaaacgccacccgataataaaaacagagcgccacacgagcgggcgcaacgatgcttcaggttcgcgcgtcctcggccttcctcccctccacctcctccccctccccgccatcctcgtcgcaggcaccggcgccagcgccgttccggctctcggggaagagccagcggcgcggcgggctgatcgcggtgccgcaggcgagccgcgtggctaggcggtccgtgatggcagcggcgggggcagccgcagccgccccggcggcggccaagctcgaggacgccgacgcgctcatcgactctgtggagaccttcatcttcgactgcgacggtgtgatctggaagggcgacaagctgatcgacggcgtgccggagactctcgacctgctccgatcaaagggcaagcggctggtgttcgtgaccaacaactccaccaagtcgaggaagcagtacggcaggaagttcgagacgctggggctgagcgtcgacgaggaagagatcttcgcttcgtctttcgcagccgccgcgtacctgcagtccatcgatttccccaaggacaagaaggtgtatgtcatcggagaggaagggattctgaaggagctagagttggctggatttcagtacctcggtgggcccacagacggagacaagaagatagagctcaagcctggtctctacatggagcacgacgaagatgtgggagcggtcgtggtgggatttgatcgctacttcaactactacaaagttcagtacgggacactgtgcatccgtgagaacccagggtgccttttcatcgcaacaaacagggacgccgtcacccatcttactgacgcccaagaatgggcaggtggcggagcaatggtcggtgcacttctcggttcgactaagcaagaaccgctcgtggtcgggaagccatccaccttcatgatggactacctggcaaagaagttcggaatcacaacatcccagatatgcatggtgggggaccgattggataccgatatcctgtttggtcagaatggaggctgcaagactctcctcgtcctctcaggcgtgacttccctgcagacgcttcagagccccgacaactcgatccagccagatttctacacgaatcagatttcagattttctcaccctcaaagcagcaactgtctgaagagcccgcgttccatttgcacagcatgtcagcatcggcctttttttaacgaataaggaaatacaaaggacggatttgttttttttcactcttgtgtaatcatgggatatctttatgtgcaacatcagccatgcaaatatcataaggatgccaagaattaatctaaattctctagtcaacctttttttttacttcagacaaaatgcatatatatgtccattgttaacgtaccag

SEQ ID NO: 98424 - DNA, 1805 bp, Zea Mays
caaagagtcgctagcgcgtacatgagcgtccaaaccttaacgtactacacgccaaccaaacgccacccgataataaaaacagagcgccacacgagcgggcgcaacgatgcttcaggttcgcgcgtcctcggccttcctcccctccacctcctccccctccccgccatcctcgtcgcaggcaccggcgccagcgccgttccggctctcggggaagagccagcggcgcggcgggctgatcgcggtgccgcaggcgagccgcgtggctaggcggtccgtgatggcagcggcgggggcagccgcagccgccccggcggcggccaagctcgaggacgccgacgcgctcatcgactctgtggagaccttcatcttcgactgcgacggtgtgatctggaagggcgacaagctgatcgacggcgtgccggagactctcgacctgctccgatcaaagggcaagcggctggtgttcgtgaccaacaactccaccaagtcgaggaagcagtacggcaggaagttcgagacgctggggctgagcgtcgacgaggttggccgggttcttaatcggcactcctcgtcatgaacccgcttctgttcgtcggtttcctctgctgctgctgctgcctgctgctgctaaccgatgagaccggccgcgggtcgctgcttgcttgtgcgcaggaagagatcttcgcttcgtctttcgcagccgccgcgtacctgcagtccatcgatttccccaaggacaagaaggtgtatgtcatcggagaggaagggattctgaaggagctagagttggctggatttcagtacctcggtgggcccacagacggagacaagaagatagagctcaagcctggtctctacatggagcacgacgaagatgtacgtatgatccttctccacgttctgggggtgggtgtggcatgctgttagaagtagaccaaccaaatggcacgcttttggagggtttgttttacaggtgggagcggtcgtggtgggatttgatcgctacttcaactactacaaagttcagtacgggacactgtgcatccgtgagaacccagggtgccttttcatcgcaacaaacagggacgccgtcacccatcttactgacgcccaagaatgggcaggtggcggagcaatggtcggtgcacttctcggttcgactaagcaagaaccgctcgtggtcgggaagccatccaccttcatgatggactacctggcaaagaagtaaagaggctcgaacaattctaaagatgtcccgtgtttgagattttcgtcgaaggatgtgtgaatgttttaagtgtaataataaaccatacagcccacggcaagttttccagattcttacatttcttcatgacaggttcggaatcacaacatcccagatatgcatggtgggggaccgattggataccgatatcctgtttggtcagaatggaggctgcaagactctcctcgtcctctcaggcgtgacttccctgcagacgcttcagagccccgacaactcgatccagccagatttctacacgaatcagatttcagattttctcaccctcaaagcagcaactgtctgaagagcccgcgttccatttgcacagcatgtcagcatcggcctttttttaacgaataaggaaatacaaaggacggatttgttttttttcactcttgtgtaatcatgggatatctttatgtgcaacatcagccatgcaaatatcataaggatgccaagaattaatctaaattctctagtcaacctttttttttacttcagacaaaatgcatatatatgtccattgttaacgtaccag

SEQ ID NO: 98425 - DNA, 2649 bp, Zea Mays
tgaaaatgtaattgcgttgcttatatgaaataaaagatattatgacgaggaacagtggccagtgggggtacttctgtacattgcatccgattgcacctgagcacctcgaatttgccataggtcattgaaaccttattggattatgtctatgccaataagttaacagaacattatatcttgtatgtatgtacagaaagttaataaaaacacacttatctcgctcagggggtccctagtttcaagctagccacgctaacaagcataatcacataatttcactatcgcggcaaacaaggaaagtgcactttacagttacgataattctagtcttgcccccaaatcgcaagacaaaaatccatacagctccagttgtgaagtgctggccctttattttgctgatttcttcaagctgctcattaatgctcgcaaagcttctttcacgttttggcccttcgtttgtctgacctcctgggatgtcagacgtaagctctcgaggccgcggcccagagaagcaatcatgggaacagaaggtgctgcctcggctgcgcactcgatcccatctccatgcatcacaaggccagcacatgcagccatgctgcagccaaatgttgcccaaggaaatattctgaaaggctgcctgtgcctcttctgcattatttcgtagaatgaagtccgcataaccaataagcttgttctctcggccgatgatattacggtatgcgtgaccgctcgaatcttctctgctgaagccgtgaactgcaaagcagaagccttcgagccagcggtaacaaccccgtgagggagtatcttgcttaatacaatagcagcatgtctttggagctgcattaatccatacttcagaaccgctggacttttgtaaggggccatcttaaggaaggcagaagcctgaagagatttcgataatgatgaaaagcccaggagtgctgtccctcctgcaccaacagcaaccacaggtttctcagatatccaactttttttgtcagtgtcgtctgctgaaggtacctcaattttatcatcattttcagcaccatagtgattgaagcatctgctagctaattgagtgatttctgaaggaacaggggtgttccaatgtctccttattccagctaagcagctcgcgtcaactatagccaccacagaaccaaactctcttagttgactcctgagagcttgcacaagaagaatgtggcacttctcatcagattggagttttgaaaaatccagatcatttgagccatgtttatctccggtatcaatttgggacctggctgcactgtttaagcccatcctgagggcttctattgcaattctaaatacatacacatcagacaacatatcactgctgattggctcccccttgtgaacttgtgtaagcaacttctgagcagaaaccatagccctaccaatcgatggaatatcagcaaatatatgataaagatcagcaagtaaagggtagacagactgagcaaatggtggagcttcatatctgtcaatcaacttgcattcagatggcctgcactcagtggcagcattggagggggctgcttgggacatcaagaaattaagagttggtgccagtgacttcaagagttgtcctccattatcatccataaggcatatactcctaccatgggagctcacaattgaagtggcgctcctgggggtcaagcagttagcctgcaattgcaaacctgaggcatcatccatggtgatgtgagctagcgagcagctagcctgtaatgactgagctgagttatcgtctgcagtactattctggctggccgatccaccgccgccacaattcctctcatagggagactcaagcaatagaaaacacgaccccgtctcctcggcggctctcttggcagcgagcagatggccatagaaaccgaccccgaaaatctcctgcaggacctggcacgcggcagccttcacgtactggtccctgctcctcttctcggtgacgcaccgcttgatcacctgaaacggcgacgccggtaccggcacgcccccgcctccattgcctgccaggcaatcctcttcgatccggacgtcttcgagggccggacgcgcgacctgggtgaccacggccctcggtcgcacctccctgatcaggcgctcggcgtccgaggcggactgctccgacagattctgcgcggcgaggatgtagatcacgccagcgccgtcccggtgccggtcgtgcggcgacccgccgggctcccggagcgcgagcacgaactgcttcgtctcctccggcacagagagcgacccgaccagccgcgctgacgcgcgtaggtcgtcctcctccctcaggagggcagagaacggccacagggcctgcaggtacgagagcagcgccgacgccatggacggcgccgcagcatcggcggtggcgaaggcgcgcgatcaggcggcgaggagggtcgattgacttgcccccgccttcgccttttcctccccttccgctggacctagatggacgaggagagggtaatgcgcctgcacggcggctgattcttctcggaccgccgccgccgccgcggtcgtcggctgcaggggaggcgagaagaacgggaatttcggtgccgtgcggatgggcggcgtgacctaggattgggttgctttgct

SEQ ID NO: 98426 - DNA, 1257 bp, Zea Mays
gagatcgcgatcacaaagtgtccattctcgtttcggtcgcaaacgggtaaagacccacggacaggacaagtttgcaaaacccccctctttgtgctgtttcttctcgccgccgccgccgccgtcgttgccgctagccggcgtagctgataggaaacctgaccacctgagccttctgtagaccagcctcagcgcaactcccaaccacttctcttatggcgctcctccttcgccgaggcgtggccctcgccgcccgctccttccgcgccgcggccgcctcctccgcttccaccactgtgcaccgcctcccagccggggcgtcccttgcgggcgccggggaattggctccggcgcagctcttcttcttcgagaaccgaagaggcttcgcgaaggggaagaaatcgaaggatgatcgaggtgacactgttcaagctgttcctgacattgggccaactgtcaaatcagctgccaccgcacaaatggacgctgcagtgatcgcactgtcacgagagctgagcaaactacggactggaagagctacacctggcatgcttgaccatatcatggtggagaatgcagatgttaaagttgcattgaatcgcattgccgttgtttctgtcctggacgcacataccctatcagtgatgccttatgatcctacttccatgaagtcgatcgagcatgctattatctcatcaccattgggcattaatccaacacctgatgggaataggattattgcagctatccctccgttgacaaaggagaacatacaggcactgtgcaaggttgttactaaatcagcggaggattttaaacaaagtattagaagagcacgccaaaaggcacttgatacaataaagaagtctgcatctagtatgcccaaggatgacgtaaagaggattgagaaggagattgaagaattgaccaaaaagttcataaagtcgtcagatgatatgtgcaaggctaaggagaaggaaatcagcggaaactgaagtcatctgtggcgatgaagttatgttttattcacattagttgtgttttgtttacattccaacaaagttgagcagctgagtggatgatataaatttctcaaatgttattgtcctattctaagtaatactgatagcacttgagaaaagtgagatgaccaggacaggttagctggtgctgttgtaatttccagccgcgccgtatttgattaaaacttgcaacacgacgaaacaaacttcagtttgctatatgtggttggtagttgtc

SEQ ID NO: 98427 - DNA, 2786 bp, Zea Mays
gagagaggaaagctctcgttcctagcttccttctcttcaactaagcgagcgaatccaacccatcccatccatttctcccttccctgttcacggattccaatccttcctccacaccccaccctcccttcgcctccacatccaccaccatccaatccgcgcgggtgcttcgccaccctatcccgattgctacctcctcgtggtgggcgccgctccgatccgcccgatccgcgctgctcctggggctccggcgcgcggcggcgagcggcggaggcggcgcaggaatggaatccgaggacgatatgcacgacgcaaacgactccgccgaagatgacttctacagcggcggggaggctggtctcgccgccagcgacgacggagacgcagactacgacttcgcggaccacgactccgacgactccgcggagctcctctcccacagacagcagcaaaattacagtatattgagtgaagttgatatcaagcggcgccaagaggatgacataaatagggtttcaactgttctttcaatttccaaaccagaggcatgtgttcttctccgcaactataactggagtgttagtaaggtgcatgacgaatggtttgctgatgaagagcgtgttcggaaggtggttggtttaccagagaagcatattgaaatgccaaatgacagagaagtaacatgtggaatatgtttcgaaagttgccctctcggatcgatgagtgctgctgcatgtggtcatcctttctgcggtacatgttggcgaggttacattagcactgctataagtgatggtccgggatgcttgatgctgaggtgtcctgatccgtcctgtgctgctgctgttggacaagatatgataaattcactggctgatgttgaggatacagaaaagtatgggcgatatcttcgcagatcttacattgaagataatagaaagacaaaatggtgtcctgcgcctggatgtgaatatgcagcggaattcgtcatgggcagtggcagctatgacgttaattgcaactgttcatatgggttttgttggaattgcaccgaggaagctcatcgtccagtagactgtgccactgtttcgaagtggatcctcaagaacagtgcggagtcggagaatatgaactggatactggctaattcaaagccttgtcccaaatgcaagcggcctattgaaaaaaatcagggatgcatgcacatcacatgcactccaccatgcaaatttgagttctgctggctatgtcttggtccatggtcagagcatggagagaggactggtggattttatgcttgtaaccgctatgagtcagcaaggcaagaaggagtgtatgatgaatctgaaaggagaagagaaatggcaaagaactcgcttgagagatatacacattattatgaacgatgggcagccaatcagtcgtcgaggcaaaaggcactgggggaccttcaaagcctacagaacgacaagcttgaaaggttaagtgacatacaaagtcaacctgagtcacagctgaagttcattatagaggcatggttacagattgtcgaatgcagaagggtattgaagtggacttatgcctatggattttacctgccagagcatgagcatgccaaaagacagttctttgaatatctgcaaggtttgccgtttctctctcataaataatcatgtatagactttgtttaaggatgcaagtgatgacaccaatgggtcggttgtgtggtccatttttatcatactccccttgctttgaataagatgagttttgggtcaacccagttgccctacctatgtactaaacggactattcttggtgtctttatctaggtgaggcagaatcaggattggagcggctacatcaatgtgcagagaaagaacttcaaatataccttgatgcagaatctccctcgaaagacttcaatgatttccgtacaaagttggctggattaactaggtgtgtgttacttctttccatgttatctatgcttgccttaatgacatgaacaaaattacaaaataactgttctgttgtatccctgtggatgtttactttgttttttttcctgtgagggcttgaccacctctaaggctataacttcaagaagtcgagtttttttagtatatatacatttgacatcttctttaattttacagtgtgactcgcaattattttgaaaacctcgtccgggctctggaaactggattaaatgatgtaggtccttccactagccatggtacatgcagcaaaagcgcaacttcgaagagcctcggtggtaaaagtaagagtggcaagaaccgagcatcaagcaccagttccaagtcgggtggctcaagccgaggtgtggatgatagtaacatatggacgtgcgatcagtgcacatatgcaaaccccaaatctgccagagcctgccaggcttgtgatcaccagcatcgatagcgctgtcagtccttgctagagatttgaaccccatttgttgagaatcttctggtgctcccccgtgtaatacacaaacatacatgaaattgaatgctagctgatctctgggggtaattgcactaggaatgctgtaggttttcgtgtatctcggattgtttgtcgactgacatcgcctgagaagcctcaactcatcatccagttcgatttgtgtatataagtgtatcatctgtaacaatgttctttagatgagctaggaggcgtctgctgccaaaggaactgaactgttgtactgctgttgtaatataataatgcatttgtcaaatttaaagaaagttagccatcctgct

SEQ ID NO: 98428 - DNA, 2416 bp, Zea Mays
gagagaggaaagctctcgttcctagcttccttctcttcaactaagcgagcgaatccaacccatcccatccatttctcccttccctgttcacggattccaatccttcctccacaccccaccctcccttcgcctccacatccaccaccatccaatccgcgcgggtgcttcgccaccctatcccgattgctacctcctcgtggtgggcgccgctccgatccgcccgatccgcgctgctcctggggctccggcgcgcggcggcgagcggcggaggcggcgcaggaatggaatccgaggacgatatgcacgacgcaaacgactccgccgaagatgacttctacagcggcggggaggctggtctcgccgccagcgacgacggagacgcagactacgacttcgcggaccacgactccgacgactccgcggagctcctctcccacagacagcagcaaaattacagtatattgagtgaagttgatatcaagcggcgccaagaggatgacataaatagggtttcaactgttctttcaatttccaaaccagaggcatgtgttcttctccgcaactataactggagtgttagtaaggtgcatgacgaatggtttgctgatgaagagcgtgttcggaaggtggttggtttaccagagaagcatattgaaatgccaaatgacagagaagtaacatgtggaatatgtttcgaaagttgccctctcggatcgatgagtgctgctgcatgtggtcatcctttctgcggtacatgttggcgaggttacattagcactgctataagtgatggtccgggatgcttgatgctgaggtgtcctgatccgtcctgtgctgctgctgttggacaagatatgataaattcactggctgatgttgaggatacagaaaagtatgggcgatatcttcgcagatcttacattgaagataatagaaagacaaaatggtgtcctgcgcctggatgtgaatatgcagcggaattcgtcatgggcagtggcagctatgacgttaattgcaactgttcatatgggttttgttggaattgcaccgaggaagctcatcgtccagtagactgtgccactgtttcgaagtggatcctcaagaacagtgcggagtcggagaatatgaactggatactggctaattcaaagccttgtcccaaatgcaagcggcctattgaaaaaaatcagggatgcatgcacatcacatgcactccaccatgcaaatttgagttctgctggctatgtcttggtccatggtcagagcatggagagaggactggtggattttatgcttgtaaccgctatgagtcagcaaggcaagaaggagtgtatgatgaatctgaaaggagaagagaaatggcaaagaactcgcttgagagatatacacattattatgaacgatgggcagccaatcagtcgtcgaggcaaaaggcactgggggaccttcaaagcctacagaacgacaagcttgaaaggttaagtgacatacaaagtcaacctgagtcacagctgaagttcattatagaggcatggttacagattgtcgaatgcagaagggtattgaagtggacttatgcctatggattttacctgccagagcatgagcatgccaaaagacagttctttgaatatctgcaaggtgaggcagaatcaggattggagcggctacatcaatgtgcagagaaagaacttcaaatataccttgatgcagaatctccctcgaaagacttcaatgatttccgtacaaagttggctggattaactagtgtgactcgcaattattttgaaaacctcgtccgggctctggaaactggattaaatgatgtaggtccttccactagccatggtacatgcagcaaaagcgcaacttcgaagagcctcggtggtaaaagtaagagtggcaagaaccgagcatcaagcaccagttccaagtcgggtggctcaagccgaggtgtggatgatagtaacatatggacgtgcgatcagtgcacatatgcaaaccccaaatctgccagagcctgccaggcttgtgatcaccagcatcgatagcgctgtcagtccttgctagagatttgaaccccatttgttgagaatcttctggtgctcccccgtgtaatacacaaacatacatgaaattgaatgctagctgatctctgggggtaattgcactaggaatgctgtaggttttcgtgtatctcggattgtttgtcgactgacatcgcctgagaagcctcaactcatcatccagttcgatttgtgtatataagtgtatcatctgtaacaatgttctttagatgagctaggaggcgtctgctgccaaaggaactgaactgttgtactgctgttgtaatataataatgcatttgtcaaatttaaagaaagttagccatcctgctacaagagaactcttgata

SEQ ID NO: 98429 - DNA, 1805 bp, Zea Mays
ccgcttcacgtcaaacgggtgaagagagttgctggagtaaaatcggcgcccatgccagcagaagcggcgaaacttccacccccaccttcccctcctgctgcgtgtgtatacatatttactcgccccggctggctcccaccacctcactccattcctgacggcggtttgaccttctgaccggagggagagagagagagagagagagaggagaatcatagctgctgcgttcgatttgcggagggctggaggggacgcgagacgggacaggacggatcttcgacggagcgttgcccgattcgtcgcagttcccggacaagggaggaaaggcgtgggaagagggaggacgcgcgttggtctccgatccaagagctttgttaacaccagagattaaaagatagcgccgtagcgcaatgaaggcaccatcgctactggttcggtgtttccctggcttgcttcccagcaaggacactagttgtgtgccaattgtgtccgagaaggatctgcagctaccatcactagccgttgaaataattccctcaaagagtgctcacccgtacaaatatgctggagagaaggttgatgtgcaaggttttgatattttcaagggtaaagttagtgtagcagatatgatatccttctcaccttctgaagtagcatcatcaaaatatgatggagctctgaaaagctgggagaattctattactcttgtcaacattattcgaaatgagatccgtgatggccagttgagcttcaggggcaagcgggttctagagcttggatgtggatctggcgtctccgggattttttcatgcttgaagggtgcatccaccgttcactttcaggacatgaacgcagaaaccatacggtgcagaacaatacccaatgttcttgcaaacctcgagcaggctcgggacaggcagaacagaccatcagaagagagccccgtgacgccatcccggcagctcttggatccaaacgtgcatttctatgccggagagtgggatgaactcccgacagttctctcggctgtgccgccacccgcggcgccagcagacctcagcttctccgaagacgatttcatggatggcggcagcagtagtcatgatggaagcagtgtagtcgtcggccaggactactgccccagaagatctaggaagctctccggtagccgccgcgcgtgggagagggctaataacgagaccgaccaggcagatggcggctacgatgtgattttggtctccgatgtcccctacgcagctaactctctgaagaagctccatgcgcttatttcaaagtgcctacgccctccgtacggagtcatgtactacgtggcatcgaagaagagctcggttgggtccaacggtggcgccaggcagctccgagctctgatggaagagggaggcgtccttggcggccacttgttgaccgaggtgtgtgacagggagatatggaagttcttcttcaagtgagcagatccagggactgggagtgggaacggcaggggaaatggatccttcctgacgttgaaatgaaacccagttttttttttggtttctatctgcagcgatgtacatacataccgcgaggcgtatagtacgtagttccattaattctttggcagcagcagcagcaacgttgaagcttcaagaatcaaatacctgtagctgagcttgcacgaatccttcgccgcctttgtagagatctgtctgctatgtgctgtgctagtgtcgttctgttaaagtacagagagcaaattgtagtgacctttttgtgtatatcgaatacacggtgatggcaattcggcc

SEQ ID NO: 98430 - DNA, 2072 bp, Zea Mays
aagcacaaggcgctggcctcgcctataagtggaacggcaccggtccgccatgtgagcagaacaccagctcgcgagaggagatacatactcctactctccaagctcccgaggtgtaggaaataggagctgctggctaagtacgaggttaattacgaggcgaggggccgggataaccagagatggtgatcgataggcggagcgtgcagcgcgccgcgctggtcgtcctgccgctggtgctcttcgtcgcggcgcgggctgtctctgccgtcggcgatggtcctctgcagaacggcaacttcgaggactcgccagaccagtcccagatgagcggctcggtggtggccggggagcacgcgatctccggctggaagacgtccggccacatcgagctcgtatgctcgggccagaagcagggggacatggtcctgacggtgccggacggcgcgcaggccctgcggctgggagccggcgcctccatcgagcagcagatcagcggcctcacgcagggctcgtactactccctcacgttcgccgcgtcgcgcacctgctcccaggacgagacgctcagcgtgacggccgcccccgcgccgtccggcgccggctccccggcgccggcccagaccggcgaactccccatgcagacggtgtacaccagcatcggctgggactcctactcctgggccttcagggcggagggcgccggcctcatgtccgtcgtaatcacccacaactgcgggcaggaggaagaccccgcgtgcggccccatcgtcgacgccttcgccatcaaggcgctccacgaccagccgcctgaccaggcggcggcggacaacaacatgctgcggaacgggggcttcgaggagggcccgtacatcccgccgggctcgccgtggggggtgctggtgccgccggtggacgaggaccccgtctccccgctgcccgggtggaaggtcatggcgtacaagaagtccgtcaggtacgtagactcggcgcacttcgcggtgccgcgcggcgcgcgcgccgtggagctcgtgtccggcgtcgaagccgcgctcctgcaggaggtggacaccaccgtggaagggagctggtacaggctcgagttctcggccggggacgccgccaacggctgcgcctcgtcgtctgatggttcctcgtcgtccgggatgaagctcaaggcgtacgccgggacgagtgaaaccaccgtggacatcgatttccgcggcgctggcggttccaaccgagggaagatcgagttcagggccgccgcgagccccaccagggtggtgttcgtcagcctgggctaccacaccaagtccgacaacagcggcacgctctgcgggcccgtcgtagacgacgtctcgctcgtccccataccgccgccgtatgctcgccggctgcttctctaggcgtaacataaaaacttgctttgcgcccggctatactgatgctgcgtcattttttcttgtagaagtacccatgctacttgggtaatggacagtgtgaatgtgctggtttactggctcattttggcttatcttttgaactagtatattgagctatttaaattcatacccttagttttactaccttcctcatttttatccttaggagttaggacaccatcttaaaaaaccgtatatttattcgtgttcatgctttttcttggtgcggttgttttagcgaaaaacaaaatgctcacacttaattaagttatttttataaaacatggtttaaactttttatttttttgggggtgggggcaccgttttaaaatgaaacgatggttgtgccttggttttttaactctgccattttacttggcatgactatctatgcgattgggagtcggatagcacgacatcgcggtggccgaggatggagatgatgagcgccttgctcgtgccccaccctgcaagatagtgtgggcgacaaatacaccatgcgtcttcagcaatgtatgagatgtgcgtaaacttttcttgtttacgcatgttgtttccctctactccttccttggatctaaacttatgttgtaatcatgaaactcgaataatagtacctatttgcacctg

SEQ ID NO: 98431 - DNA, 1227 bp, Zea Mays
atggtgatcgataggcggagcgtgcagcgcgccgcgctggtcgtcctgccgctggtgctcttcgtcgcggcgcgggctgtctctgccgtcggcgatggtcctctgcagaacggcaacttcgaggactcgccagaccagtcccagatgagcggctcggtggtggccggggagcacgcgatctccggctggaagacgtccggccacatcgagctcgtatgctcgggccagaagcagggggacatggtcctgacggtgccggacggcgcgcaggccctgcggctgggagccggcgcctccatcgagcagcagatcagcggcctcacgcagggctcgtactactccctcacgttcgccgcgtcgcgcacctgctcccaggacgagacgctcagcgtgacggccgcccccgcgccgtccggcgccggctccccggcgccggcccagaccggcgaactccccatgcagacggtgtacaccagcatcggctgggactcctactcctgggccttcagggcggagggcgccggcctcatgtccgtcgtaatcacccacaactgcgggcaggaggaagaccccgcgtgcggccccatcgtcgacgccttcgccatcaaggcgctccacgaccagccgcctgaccaggcggcggcggacaacaacatgctgcggaacgggggcttcgaggagggcccgtacatcccgccgggctcgccgtggggggtgctggtgccgccggtggacgaggaccccgtctccccgctgcccgggtggaaggtcatggcgtacaagaagtccgtcaggtacgtagactcggcgcacttcgcggtgccgcgcggcgcgcgcgccgtggagctcgtgtccggcgtcgaagccgcgctcctgcaggaggtggacaccaccgtggaagggagctggtacaggctcgagttctcggccggggacgccgccaacggctgcgcctcgtcgtctgatggttcctcgtcgtccgggatgaagctcaaggcgtacgccgggacgagtgaaaccaccgtggacatcgatttccgcggcgctggcggttccaaccgagggaagatcgagttcagggccgccgcgagccccaccagggtggtgttcgtcagcctgggctaccacaccaagtccgacaacagcggcacgctctgcgggcccgtcgtagacgacgtctcgctcgtccccataccgccgccgtatgctcgccggctgcttctctag

SEQ ID NO: 98432 - DNA, 456 bp, Zea Mays
taatcacatagatatataaatttaattagtattgcacaatgatagatccacatcatataaacacaagcaccagaatattattggatcattcacaaaacaacacaattatatcattcacaaaagctagcaccacagctagattagtcataagcatcacaacaaaatcattcacaaaacctacacatgttattatgttttgcacatatttgcaaacactttataaaatcattcacaaaagtactaacgcttcaagcgatttgcaaaagccttcacaaaagcactccaacttcttgtatcctcttatatcctcttgttaaaagcacaagcttgtagggattgtgatgttgccacttacttgatgctaacaagacatttcttccaccaaagccatcttaaacacttggcccatcaaaaagatcaattctcattttcaattgtctgtctgcaggacaagtg

SEQ ID NO: 98433 - DNA, 3270 bp, Zea Mays
agattctgttcagctagaagacagtgctctcctttatatcctgtctgtagctcaatacagtgctccaaatccatttcggcgtactaggtgtggataaggatccttgcctcgacgagtggagcaaagccatggatgtgcctacgcctcccaaccgtgccggctgcaacagtaacatcggcagccccatgcaatcttttgatgatccctttggtgttgctgccatgacgagctttgatggatactcggagctctgcagcccatcagttgctgatcacatattctccctgctgaatgatccctccgctgcgcaacagatggttgccatgtggtcatccttgggctcatctccgcgtgcttcagctgtgagagaagacatgtcgtttgacacctttcctgggcctgtggacgggacatcgtcacttgctcaaaggttcaactcagcagcagcatcgagtccaactggagtcgacagagggctaaaagagtcagatgggcttgttcttccaagtaatggctcacagcaagggagtagcatcattccgaggtctgttggcaacgctcttgcagacaggatgctcatggcgctatctttgttcaggaagtcattgagtgatggtgttcttgcccaagtctggatgcctgttgagcacaatggtcgtgtcgtgttgagtacatctgagcagccctatttacttgaccaggatcttgcaggttacagagaagtttctagaaatttcctgttttcagttaaggaggagcctggtctgcacctagggcttccagggagggtcttcatatccggggtgccagagtggacgtcaagtgttatctattacagtaagccagagtatttgagaatggagcatgctcttcttcatgaaatacaagggtcacttgctatgccagtttacgatcccagcaagggctcttgttgtgcagttcttgaacttgtcacaaacaaggagaaacctaattttgatgcagagatggacattgctgtgaacttgcagacaacaacagatcgcagcaatcagaaggtttactctgaaaatcagaaatctgcttttactgagatattggatgttctaagagctatttgtcatgcacacatgcttcctttggcccttacatgggtccctacatcaaatggcatcgctaatggtttttgtgttggaaagaatattgggatagatccgcaaccaggaaaagcagcacttcgtatccatgaatcagcttgctatgttaatgatgcaaagatgcaggggtttcttcatgcatgtgctgatcgtcatcttgagaaggggcagggtattgcaggccgagcccttaaatcgaatctgccattcttctcacctgatataagagagtacagtatcgaagactacccgcttgcacaccatgctcgtaagtttggtctgcacgctgctgtagccatacggctgaggagtacgtacaccagttacgatgactacatactagaattctttctcccagtcaactgcaagggctgtggagagcagcagatgttattaaacaacctttccagcacaatgcaaagaatatgcaaaagcttgcgaacagtctctgaggcagagattgaaaatgttagtgctactgcagcaatgtttgagaagactagtggaacttgtttaccaactggtaactctgaaagttcctcacatgatgaccagccaatcacagaatctgcactccaggatctatctttgggtgacaaacaaggagacagagaacctgacaagccacagagaagctcaatgcgagttgcagataaaaagcgcagtgcatctgaaaagaactttagtctggatgttcttcgcaaatacttctctgggagcctgagggatgctgcaatgagccttggtgtttgtccaacgacattgaaacgaatatgcagacaacatggaatttcccgatggccatctcgaaagataaacaaggtcaatcgttcattgaagaagatagagaaggtcattaaatcagttcacggtgtggatagatccttgcagtacgatcctgctactgggtctcttgttcctgcaacctctcttccggaaaagatgccattctctgcttgcgatacattgcctacttcatctcttgggagagcagtggaggaaacatgtagcccaaaatcagaacaagatttctcttcgcctgatgggtggcaaagagaaactagccaatttcatgtttctggtatacctaaaaggggaggcgatgaagttcggacgttggcaaacaacaacaaaggcagaagaaactatgtttctggtattgcaaatatcacacagcattcaaactctgaaggcacacatggtccttcatatcccaatcccattggtgctgttaattctctgcatactggagaaacaggcaacatcgattctctgacctccctccacccaagcatggatggcattgaaggccaaacaacagtaaggaactcaccatttgtgcaacaagcagatgtcactatggtcgatggtcatgacaccaaggagcagacactcccttccacctctggcatgaccgattcttcgagcggcagcgcctcaagcgagcctactttcaaggggaacccaggacgtgccctcaaagaccgaagcagccctgcactgaccgtgaaagctacctacaatggcgacaccgtccggttcaagtttgtgccagcaaggggctggtaccacttgctggaagagatagcaaagaggttcaagctgacggctggagcattccagctcaaatacaaggacgatgaggacgagtgggtgatcctggcgaacgatgccgacctccaggagtgcatggacgtcctggactcgatcagctcacgcaacatgaagctgcaggtgcgcgacctctcctgccacgtgggcagctcgggcagcagcagcagctgcttgcaggtggaagcgcatagctcgtgacagaacagaagcctaggttaccgcccttagcctgttgtagtaggcccagtatcctgttgtcgccatagaggttccttgtccatgttcacgccatgttgtcgtatggaatgtacaaatggcgagtgtagaaaaggaataaagtgtcatactcttcgcacggttgaaacacgaaacgatgccgtgaaggtttttgtcataatctgttgttggtttcaaaagtcctggcaataatctgttgtcatgaagatgagttcatggcttaagctgcgatacgaagtttctgaacttgctgtgttccaaaatttcagtctggttcttccgg

SEQ ID NO: 98434 - DNA, 759 bp, Zea Mays
atcaggttccttaaaacctgaagcatttcgaagccttctccgcgttcggcgggcttcgtgccatccgtcgcgtgacgcgcgtcctccgtaggtccgacgccgcggacgcgagactcgctttcgacggacgcgaaatttctaggcacgcaccttctctcgcagtacagacgtacaatacaaacatggtcgcggctgttctcagctgatggcaaactcgcgaaggccacgatgcggcgggacccgtctctgctccatgtctccattacttcgtgtcgtcctccctccctccacgctccttcccgcaggagcagcttccctcctccccatccccaaacgctcccctcctcttctctcgcgctggactcgccccagcgtccgactccctcgcggccccgacgtagggcgtcgtcatgggtgatggggtcgtcgtcccgccacagcccgccggagccggcttgtcctcggatgtcgtgcgatttaggagcagcgacatcagatgttacggacgcaaggccgtcaactccggtaccgccccagccccgcggattcctccccggcagccccaaaggctacgacctggcagacgtcagagccgatgggggtacgctaatgtgctcacctacagacatggcagtgcttgctggtggaaatgcagaggacttactggagatgtgttcatggagcctgccatttgcactggtcaagaagcttatcaaggagaaaaaggatgatgctggaatttctgatatgtcgatataa

SEQ ID NO: 98435 - DNA, 1116 bp, Zea Mays
atgtccatgccgtggaagctcacttgacttatccccacagggacgagggaatgtagtgacatcctgacgtgacctcacgtctcctctcagcccgatcctggttcctgtctctgatcccaacgcccactggtccgcggcagcccggagatgtttctccactccctcttgatgcaaaaaatggcaaagaacacgcagcagccaagaaaagacggcggcgcgagatcgtcaggtggcgggctgtcgtcgtccaagaagtcccggtggtaccagcgcgcggtggaggtgctcctcctggtctggaagcagcagccggcggcgcctccaacgacgaaggccgcggcggcgtcgggggtgacagccgccgcctcgggcaacaagggcgcggcgccaccgggggggaggctgcgcaagtcctcgtcgctgaacgtggcggcgtcgttcacgcgggtgtgcctgtgcgcgcccatctcctcgtacaacagcgagtcgctctactgcttcccggccgacggcgccgcgccgcgccggagctacagctacccgcgcgcgtcgtcggcgtcagcgtccgggtgcggcgccggcaccggcgtgagcccgctggtggcgccggcgtcggcgccgccgccgctgcctcctctccccgcggggagcagaggcggtgagggcgcgcggcgcgtgttccgcggcaagtcgctgacggacgacgtcctgatgcggcggttcgtggtggacgaggaggccacgcggcggcgcaacgagatggaggtcgtccggcggcgccacgccgcggcctccaagcgccggcgcctcggccccagcccactccgccggatggcgctggcggagtcggaggcggaggccgaggaggaggaagcagcgcctggaactgggaggggaacggacaatcgcgtggcagctgctgctgtagcgtaggactgactgcggagctttttttccccctgtcctgtgtgctctcgatcggctcgccgtcgcctctgttttttcctctgtcgttttcctcttctgctgctgctgtcgtgcgctgcgatgcgactgggagaaggaggagaatcgcccagttttttttaacagaactgtactagcctcttgttgtcc

SEQ ID NO: 98436 - DNA, 228 bp, Zea Mays
atgccgtcttcgggggcgtcggcggcgcccggcgcgccggacgaggaccccaaccgcgcccgctgcatcgccttgtacgcctggttcttccccatctctccctcgccgccaggcccggcgagaccagattggaatcggaaggggaggagccggggcctggggaccggagatccctttcgttctgctgctggtctggtggtgcgcgtctctgcctgccgtgagttatga

SEQ ID NO: 98437 - DNA, 2088 bp, Zea Mays
cgacggcccaacccaaacgcgctgttgggggggggggggggggaggggggtggtttgaaacggtgaatattaaacctagtcctcaccgtcgaggcgtcgacacagagccatcccaccgctgatgcgctgatccatccaagccaaggggtgcaccggcgtaccgacagcagccatgcactcggtgaaccactggggcgggtcgttcgacatcaccaccgacgtggcatcggaggacgacgactgccggaacacggacgtcgacgccggtgcgttgtcggcgcggcagcaccacgagctggacgaaacacagcagggctggctgctgagcccggagggggccaagaagaggagcaggcacgtcgacctcggctgcgtcgtcgtcaagcgcaaggtcctgcggtgggcgttctgggggctcgtcgccggcttcgtcctcgtcggcctccccgtcaccgtctacaagtccatcccgcacaggccgccccgcccgccgccgccggaccggtacgccgaggcgctgcacaaggcgctcctcttcttcaacgcccagaaatccggccggattccgaggaacaacggcatcccgtggcgtggggactctggcctcaaggacggctccgacgctaaggacgtgaagggcggcctcgtcggcggttactacgacgccggggacaacatcaagttccacttcccgatggccttctccatgacgctgctgagctggtcagtgatcgagtacagcgccaagtacaaggccgtggaggagcacgaccatgtcagggagctcatcaagtggggcaccgactatctactgcgcaccttcaactcctccgcttccacgatcggccacgtctacgctcaggtgggtgcggcaaagatcaagagcaggacgccggacgaccactactgctggaaccggccggaggacatggcgtaccctcggccgtccctggcggtgagctcggctcccgaccttggaggggagatcgccgcggccctggcggccgcctccatcgccttccgcgacgacgacgacgcctactctaagaagctcgtccgcagcgcggtcaccatgttcgagttcgccacccgcgactgggcggacgagcacgccacctactccaggcaccggccggaggtcgagcccttctacaactccaccagctactgggacgagtacgtctgggccgccgcgtggatgtactacgccaccggcaacgccagctacgtcagcttcgccaccgaccctcggctcgccgagcgcgccagggccttctacgacgacgtgctcgacttctccgtgttcagctgggacaacaagctccctggcgccggcctgctcctgtcgcggctgcgcatgttcctcaaccccggctacccctacgagcagtccctcgtccgctaccacatggagaccggcctcgacatgtgcaagtacctccggcgcttcggggccttcaacttcaccgggggcgggctcgcgctcttcaaccacggcagggggcagccgctgcagtacgtggtcgccaactccttcctcgccgcgctcttcgccgactacatggaggcgatcaacgtccccgggtggtactgcggacccaacttcatgcccattgaggacctccgtgcgttcgccaagtctcagctcaactacatccttggggacaacccgaggaagacgagctacgtggtgggcttcggcaacaagtaccctcggcatgtccaccaccggggcgcgtcgacgccgcacagccgcgtcaagtactcgtgcaccggcgggtacaggtggcgcgacaccaagaaggcggacccgaacgtgatcacgggcgcgatggtgggcgggccggaccgcaacgacaggttcaacgactcgcgcatggcctttgggcacaccgagccgactctggtgggcaacgccggcctcgtggcggcgctggtggccatcaccagcagcggccgcggcgtcggagccgtcgacaagaacagcatgttctccgcggtgcagccgctgttcccggccaccccacctccgccgcccgtgtggaagccttgagagatctcgtgggatagaaagcttatcctagcatc

SEQ ID NO: 98438 - DNA, 314 bp, Zea Mays
aacctttgttccttcttgaccaaggttatcttgatcctcacctaaatcctcaagctccatgtcaaatatacctttgttgtgttcatctttaaaaatatcttcccatgttatattaacatgcataattccaatcaatcaataagagaaaaaaagttgcaatatagattacctagccatacaaaaggaaaggagcatacatccaattatgtaagtagatacacaactttctccagcaatgacgacccaataatgtcccaaacaacagcatcaagtcccaacatgcacttgacagatgataccatcttctgcaaaga

SEQ ID NO: 98439 - DNA, 972 bp, Zea Mays
atgaagggtgacgagaagtcggcgggcggggcccctgcgtactggggcctcggcgcgcggccctgcgacgcatgcggcgccgaggcggcgcgcctctactgccgcgcggacgcggcgttcctgtgcgccgggtgcgacgcgcgggcgcacggcgccgggtcgcgccacgcgcgagtgtggctctgcgaggtctgcgagcacgcgccggcggcggtcacgtgccgcgccgacgcggccgcgctctgcgcctcctgcgatgccgacatccactcggcgaacccgctcgcgagccgccacgagcgccttcccgtggcacccttcttcggcgagctggccgacgcgcccaagcccttcgcctcgtcggcggccgtgcccaaagcggccgacgacgacgggagcaacgaggccgaggctgcgtcgtggctccttcccgagcccgaccacgggcagaaagaaggcgccacgacggaggtgttcttcgcggactccgacccatacctcgacctcgacttcgcgcgttccatggacgacatcaagaccatcggcgtccagggcgggccaccagagctcgacctcgccggcgccaagctcttctactccgatgactccatgaaccacagtgtatcatcgtcggaggcggcggtggtgcccgacgcggtggctggcgcggcgcccgaggtggcagtggtctgcaggggcctggagcgggaggcgcggctgatgcggtaccgggagaagcgcaagagcaggcggttcgacaagacgattcggtacgcgtcccgcaaggcctacgctgagacgcggccgcgcatcaagggccggttcgccaagcgcacgcccggggctggggcggacggcgaggagccgctggaggagcacgaggagatctactcctcggccgcggccgccgtggctgcgctcatggcccccgggggagccgacgcggactacggtgtcgtgcccactcattga

SEQ ID NO: 98440 - DNA, 1284 bp, Zea Mays
atggagccagaaagaggcctgatcgcatatgaagggccgcctccagactcgacggacctgctgtcgagcgcgtggtgcagctcggctatccaagttcttgacacaggaggacacaaggagtgctcgatggccctggtggagcatccggtcatggcgcttggcaacgacaggaacgacgtgttggcaaagagcgaccgtagcttggtggttgacaacagcagcttcagcacggcccagtggaaatatgacgatctgaagtcgtggatatggctgcagaaggcaattcatcccgaactggactatgatctctgcctcaagaagaaatggctcccgcgcaagatgacggcgtggaacgggatctcgctcaagaagtgggtcaaggagcggaagcagaagcgcaaggaggaggcgcgcctgcagcgggccgaggtccacgccgccgtgtccgtggccggcgtggcggccgcgctcgccgccatcgccgccgagaacgccgcgccgcgccgcgcgcccgggatgagggagacggcgctggcgtccgcggccgccctggtcgcggcgcagtgcgccagggtggccgaggccgcgggcgcctcgcgcgaccaggtcgcggcggccgtcgacgccgccagggcctccacggacgacagcagcgtcatcacgctcaccgcggccgccgccacctgtatgtgtctgtcgttcgcaactcgttgtcgtgtcccctggcttgacacggtgtctcccaaaacgcttatttgcgatgtccggttgacagcactgcgtggcgctgcgacgctgagaggacggcgcagcggcagcggcgggcacggccagaacgagagggcggagcacgcggggccggctctgtctcaggacgacctcgacttcgacttcaaccacgcgaggtccagggcggcgctggccaagggcgacgagatgttcgtcgcgatgccggacgggaagtggaagctccacacggtgtcggcggcgtcgaacaagcgcggcgagatcgtgctgcggatcaagaagacgaacctcgtcatggccttctcccacgcaaaagaaagcgtgatccacgacgtgcagccgtgctccccggagaagccgagcccccacgagggcgcgacatacccagtggaggtctccacgaacaagggcaaggtggagctccgcacggacgactacggcgtctacaagcggtgggttgcgacgctgagccacatgctcgtgatgtccaccgccgtctccgtctccaccaggcacgagccggcgcgccgggactga

SEQ ID NO: 98441 - DNA, 2100 bp, Zea Mays
gaaggcaaacgagggcatctcttcatcaggcccacgctttgttaacaaagaattccctcatagccgccgccgccgccgccgccgccgctcatctcgccgagaggtgacgggaccgaggaactcgccgagttctaagatagagaatcgcttttcacagcctggggtctgctgcgtagggtggtgttgaaggggagaagtttaagatctgttccacagatcacgcgtgcgcgctcgcgaatcgggggttccacacatagcttcgtcgttttgaatttgatgtactaatggagtctaagggtggcaagaagtctagcagtagtcgttccatgatgtatgaagctccccttggctacagcattgaggacgttcgacctgccggaggcgcgaagaagttccagtctgctgcttactccaactgcgcaaagaagccatcctgatatcccttttggcttcctcgttctagtagtttaggatttcttttctgacacttcgattcttaccaatccccctggcctgctgctttcctgacaatcgaccagttccccagtcttgctccctgcagtcctccctcctccatctccagcgttgtgttctgactcacctgcaccaatggctgttctttctgctgctggtgctcccccggcctcagctatcgggtttgagggctatgagaagcgccttgagatcacattctctgaggcacctgtctttgtggacccccatggcagcggtttgcgtgccctctccaggtcccagattgactctgttctggatcttgcacggtgcacgatcgtgtccgagctctccaacaaggattttgactcctatgttctctccgagtcaagcttgttcatctatcctctgaagattgtcatcaagacctgtggcactaccaagctcctgctcacaattccaaggatcctagagcttgctgaagagctgtctatgcctcttgctgctgtgaagtactcccgcgggacgttcatctttcctggcgcacagccagccccccaccggagcttctccgaggaagttgctgtacttaaccgatactttgggggcctgaagtctggtggcaatgcttatgtgattggagatgcagcaagaccaggacagaagtggcacatctactacgccactgagtacccagagcaaccaatggtcaaccttgagatgtgcatgactggtctggacacgaagaaagcttcagtcttcttcaagactaatgctgatggcaacacaacatgtgccaaggaaatgacgaagctctctggtatctctgaaattatccctgagatggagatctgtgattttgacttcgaaccctgcggctactccatgaatgcaatccatggctctgcgttctccacgatccatgtgacgcctgaggatgggttcagctacgccagttatgaggttatgggcttggatgccactgccctgtcttacggtgaccttgtcaagagggtccttgggtgcttcggcccctcggaattttctgtcgccgtgaccatcttcggcgggcggggccaagctgggacatggggaaaggaacttggtgcggaggcttatgactgcaacaacatggtcgagcaggagctgcctggaggtgggatcctcatctaccagagcttctgtgctgctgaagacgccgttgctagctcgcccaaatccgttcttcgctgctttgatggcgagaatgcagcaccttttgcgaaggactgcaagctggctaatcttgtctgcttggaggaagttggatgctatcgaggagaaggatggagtgcttgatgagtaagacgggtttctggtgtcgatttgcttctgagtttttttctttttatatcgttgcgatctcgtggttgtcgtttggttagcagccaagccaggctattagtacgaagaatgtcgtctataaacatgtgttcctacgttgccacatgctgagtcaatctgtatacagctagctctaggtggtcagctgcgtctaccacaatgagcatacatgtatggataaatcttctgtgaaagcattcgatgaataagggttgttttcgtgattcgttttctgaagtctgaaatgttattatttattctctt

SEQ ID NO: 98442 - DNA, 654 bp, Zea Mays
atgtcgctgcaagaaacagtcgcagggcacacagcttcaagcaacctctttgctgcatcgatgacattgaacccaccaagcgagaggattcagggattcagacagtccattccgtacctcgacgaagcagtcatggaagaccagcctaagaagcttgccggggatggaggggtccagggtggaggccgacctaacgacgtccctcactgccagctcaacgtccgggcaggactgcgcgacgtcgtcggcgtggagttcgacggaggctgcagcggagccggtggcggcggcggcggtggcggcggctttggagctggtggtaccggtgtgacaggtggaggagatggccttggcgccggcgccacggacggggatggttttggagccggcgccgttttaggtggaggagaggatggctttggagctggcgaggctgcaggcgacgctcttggcgcgggtgtcgccactgccggagacctcgttggagccggcctgggagatggcgacggcttcccagctggcgccgcgggcggtggagacgacggtttcgcggccggcggggctggaggccgtgacagcctcggcgctggcgccgcaggcgatgggaacgacggtctcgcggacggcgccgtcggaggccgcgacgcgctctga

SEQ ID NO: 98443 - DNA, 2413 bp, Zea Mays
actcagtcgctcgctccctcgcttcgatccaccggcggcggctgaggtgctgagcggcgaggcagcgagcgccactgcgacctgcgtgctgctgtgctcctgcgcggctgcgcgccggtggacgaccgggccgtcggcgtggttccggctctccgcgcctgcgcggctgcgtcgcgacgagcagtgcatcggcacagtggcggtgcgccccccgcggcgaggcggcttcacggaccgcggttaccgagcgccgtcgcgccgaacgggcgcgggcggcaggcctcctgccggctgctggcgagcgctgctgcctgctgcaggccagggcgagcgggcgagacgctgagaccgcgtgggccgcgcttccctaagccagagcagccgagctcttcgtcgttcgtgattcgttgggccatcgccagcgacgagctgcaaccagaggtgaactggtgaagtgatgggcacggcgatcgtaagcgacgggggcggtgagggaagcgatggaaagtcggttgacgggtggcaggcagagaaggccgtcgcgggcaaccgtagggcactcgaggcccttcgggagctcgtggcttatcctttcctctacgcccgcgagtcccgtttgctcggcctcaagtggcccagagggttgctgctccatggcccccctggcaccggaaagacaagcctggttcgagctattgttcgagaatgcaacgcgcacctgacaacgatcaacccatattctgtacacaaagcccatgtgggagagggagaaaagttcctgcgtgaagctttttctgaagcatattctcaggctttgcggggtaaaccagctgtgatatttattgacgaacttgatgccatatgtccacgccgcaatagtaggagagagaatgagtcccgcattgttggccaacttcttactctcatggatggaaacaaaaaggcgtcaaagatgcttcctcacatagttgttgttgcatcgactaacaggatagatgccgttgatcctgcattgagaagggcaggacgttttgactcagaggtagaggttgccgttcctacagttgaagaaaggctgctgattcttaagctttataccaaaaacctacatctggatgaaaaagtcgatcttcagactgttgctgcgttctgcaatggctatgttggagctgatttagaagcattgtgtcgagaagctgccaagcttgcatatcatagaatgttaaacttatgtgagggtgacaaagtacttaaactacttatggaagactgggaatgtgctagatctatggtgggaccaagcataacaagaggggtaaccaaagaaatttcaattgtttcgtgggatgatataggaggcttgaaagatctaaagaaagagcttcagaaagttgttgaatggcccatcaagcatgctgctgcattttctagacttggaataccaccagtccggggggtgctgttgcatggcccaccagggtgctccaagactactcttgccaaggctgcagcgcatgctgcccaagcttctttcttttctttgagtggtgcagatttatattccaagtatgttggagaaggggaagctctgttgcgtagaacatttcagaaagctcgtcttgcttctcccagcattatattttttgatgaggctgatgccattgcccccaagagaactggccctggtgggaattctagtggcaatgccacagtcggagaaagacttttgtcgactttattgaccgaaatggatggtttagaactggctacggtactgttagcctgctgataactttctgtgtgattctactgattatatctacatgtatattcactagaaggcaatcctttttttagggaattatcgtattgggtgctacgaatcgcccaaatgcaattgatgctgctcttttgcgtccagggcgtttcgataaggtccttcagtgcttctgttaatgacacatggacatatagacactggccataatttcccattgatctgcaggtgctgtatgtcccgccaccagatgtggaagggcgacacgagatactacgcatccatacacggaaaatgaagttgggagaggatgtagatctttggaaggttgcagagtgtaccgagctattcaccggtgctgatcttgaaggcctttgcagggaagctggaatggcagcattgagggaagatatctcagcaagtttgatacatgacgctcacttccaagccgcacgaagttcattaagcccctctcttacaaaagcagtagttgatgagtactcaaaggtagatataaatgatccatcgagtaggaaacattgatatgttccttttctatttctttgttgcacactaggcgcaatacacatttgcaaccttgccaccaagacacacagatggagatagagagatctt

SEQ ID NO: 98444 - DNA, 2282 bp, Zea Mays
actcagtcgctcgctccctcgcttcgatccaccggcggcggctgaggtgctgagcggcgaggcagcgagcgccactgcgacctgcgtgctgctgtgctcctgcgcggctgcgcgccggtggacgaccgggccgtcggcgtggttccggctctccgcgcctgcgcggctgcgtcgcgacgagcagtgcatcggcacagtggcggtgcgccccccgcggcgaggcggcttcacggaccgcggttaccgagcgccgtcgcgccgaacgggcgcgggcggcaggcctcctgccggctgctggcgagcgctgctgcctgctgcaggccagggcgagcgggcgagacgctgagaccgcgtgggccgcgcttccctaagccagagcagccgagctcttcgtcgttcgtgattcgttgggccatcgccagcgacgagctgcaaccagaggtgaactggtgaagtgatgggcacggcgatcgtaagcgacgggggcggtgagggaagcgatggaaagtcggttgacgggtggcaggcagagaaggccgtcgcgggcaaccgtagggcactcgaggcccttcgggagctcgtggcttatcctttcctctacgcccgcgagtcccgtttgctcggcctcaagtggcccagagggttgctgctccatggcccccctggcaccggaaagacaagcctggttcgagctattgttcgagaatgcaacgcgcacctgacaacgatcaacccatattctgtacacaaagcccatgtgggagagggagaaaagttcctgcgtgaagctttttctgaagcatattctcaggctttgcggggtaaaccagctgtgatatttattgacgaacttgatgccatatgtccacgccgcaatagtaggagagagaatgagtcccgcattgttggccaacttcttactctcatggatggaaacaaaaaggcgtcaaagatgcttcctcacatagttgttgttgcatcgactaacaggatagatgccgttgatcctgcattgagaagggcaggacgttttgactcagaggtagaggttgccgttcctacagttgaagaaaggctgctgattcttaagctttataccaaaaacctacatctggatgaaaaagtcgatcttcagactgttgctgcgttctgcaatggctatgttggagctgatttagaagcattgtgtcgagaagctgccaagcttgcatatcatagaatgttaaacttatgtgagggtgacaaagtacttaaactacttatggaagactgggaatgtgctagatctatggtgggaccaagcataacaagaggggtaaccaaagaaatttcaattgtttcgtgggatgatataggaggcttgaaagatctaaagaaagagcttcagaaagttgttgaatggcccatcaagcatgctgctgcattttctagacttggaataccaccagtccggggggtgctgttgcatggcccaccagggtgctccaagactactcttgccaaggctgcagcgcatgctgcccaagcttctttcttttctttgagtggtgcagatttatattccaagtatgttggagaaggggaagctctgttgcgtagaacatttcagaaagctcgtcttgcttctcccagcattatattttttgatgaggctgatgccattgcccccaagagaactggccctggtgggaattctagtggcaatgccacagtcggagaaagacttttgtcgactttattgaccgaaatggatggtttagaactggctacgggaattatcgtattgggtgctacgaatcgcccaaatgcaattgatgctgctcttttgcgtccagggcgtttcgataaggtgctgtatgtcccgccaccagatgtggaagggcgacacgagatactacgcatccatacacggaaaatgaagttgggagaggatgtagatctttggaaggttgcagagtgtaccgagctattcaccggtgctgatcttgaaggcctttgcagggaagctggaatggcagcattgagggaagatatctcagcaagtttgatacatgacgctcacttccaagccgcacgaagttcattaagcccctctcttacaaaagcagtagttgatgagtactcaaaggtagatataaatgatccatcgagtaggaaacattgatatgttccttttctatttctttgttgcacactaggcgcaatacacatttgcaaccttgccaccaagacacacagatggagatagagagatctttttaagaatattctttttaaaccaa

SEQ ID NO: 98445 - DNA, 1894 bp, Zea Mays
aatcctgactccacaactgagcggaaaccagccgtggctgtactatcagcgattgtttttggctgtagaggtgaactggtgaagtgatgggcacggcgatcgtaagcgacgggggcggtgagggaagcgatggaaagtcggttgacgggtggcaggcagagaaggccgtcgcgggcaaccgtagggcactcgaggcccttcgggagctcgtggcttatcctttcctctacgcccgcgagtcccgtttgctcggcctcaaggtaatgtgctcccgtctcttgccccccatcagacttcgtcattgtctgctacacctccgaattaatcattcagcttgctttcttcagtggcccagagggttgctgctccatggcccccctggcaccggaaagacaagcctggttcgagctattgttcgagaatgcaacgcgcacctgacaacgatcaagagagagaatgagtcccgcattgttggccaacttcttactctcatggatggaaacaaaaaggcgtcaaagatgcttcctcacatagttgttgttgcatcgactaacaggatagatgccgttgatcctgcattgagaagggcaggacgttttgactcagaggtagaggttgccgttcctacagttgaagaaaggctgctgattcttaagctttataccaaaaacctacatctggatgaaaaagtcgatcttcagactgttgctgcgttctgcaatggctatgttggagctgatttagaagcattgtgtcgagaagctgccaagcttgcatatcatagaatgttaaacttatgtgagggtgacaaagtacttaaactacttatggaagactgggaatgtgctagatctatggtgggaccaagcataacaagaggggtaaccaaagaaatttcaattgtttcgtgggatgatataggaggcttgaaagatctaaagaaagagcttcagaaagttgttgaatggcccatcaagcatgctgctgcattttctagacttggaataccaccagtccggggggtgctgttgcatggcccaccagggtgctccaagactactcttgccaaggctgcagcgcatgctgcccaagcttctttcttttctttgagtggtgcagatttatattccaagtatgttggagaaggggaagctctgttgcgtagaacatttcagaaagctcgtcttgcttctcccagcattatattttttgatgaggctgatgccattgcccccaagagaactggccctggtgggaattctagtggcaatgccacagtcggagaaagacttttgtcgactttattgaccgaaatggatggtttagaactggctacgggaattatcgtattgggtgctacgaatcgcccaaatgcaattgatgctgctcttttgcgtccagggcgtttcgataaggtgctgtatgtcccgccaccagatgtggaagggcgacacgagatactacgcatccatacacggaaaatgaagttgggagaggatgtagatctttggaaggttgcagagtgtaccgagctattcaccggtgctgatcttgaaggcctttgcagggaagctggaatggcagcattgagggaagatatctcagcaagtttgatacatgacgctcacttccaagccgcacgaagttcattaagcccctctcttacaaaagcagtagttgatgagtactcaaaggtagatataaatgatccatcgagtaggaaacattgatatgttccttttctatttctttgttgcacactaggcgcaatacacatttgcaaccttgccaccaagacacacagatggagatagagagatctttttaagaatattctttttaaaccaatcctcttaccgtcagctctggatgttatttaaaaaaaatgccctca

SEQ ID NO: 98446 - DNA, 836 bp, Zea Mays
aaatatactgtaacagacaaaacggtccaaaaccatagtacaacgttacaaaaagtgtagtcgcaggaaaagaactagcaacagtttaagtggacacgaaaacatcatatatttagccttgttcatctggggcctccagcaaaataagctggtcgcccaagggtaaaatccatggcttctttctttccatcctggtccaaacaataataataataataaattaacactcatctgatctcgcaaaattatacagcccaaaactggctgttcctcgcatctttggtactgcgttccttggacatctaagctacagggaatacacgacactgtctttcgcaagagacagcatctgaaaaagttggttggccaaagctgctaagaggattattccaaaaggctgttgcaagcgtctattacagcagcatgtgagcctaagattgtctggcccgatgggtttgcttccaaggttttcttgacagcatcaaaaactgctttgcggtacatggtatcctccattttctttaaaatctcctccataacttcaaatctcaaggcacctaacaaagtcaggcgagcaataatctcaccaaattgcgttggagctttaggaaggtcaatcccaatgtcatccaacagagcaccgtataacaagcaaccggattccaggtcttgagtcttgaaaattttctttgtgtacagatgctccagtagcctaacgagaggatcaacaaaattggtccctttatctagggcaagattgacagcttctttaacaatctctgggtagtaaccacgattctgcaactcctcgatacattgctgtgcttcatctaaaa

SEQ ID NO: 98447 - DNA, 808 bp, Zea Mays
ggaatccggaatcgccaaatcagggataaaccatatccccctcttcctctggctctagcgggcggcggctgcctgtgcgactgtgcatgtcgactaccgcagtgcgcctacgtcgcctgccaccgtgcgtccagacgagagacgactagaccacaaccgcttccagaatccaaacaacaatgcccgccaggccgtcactcaaactcaacacctggagtggaggcgtggagccgcggagcggacgagcggtggaggtccaccaagccggcctagcatcatccaagcagttgcaccttgcacgccaacaggcaacagacaacatccatgtgtccatgtccaggagtgctcgtgctacctccatgccgccgctagagaaacatcttagcctcgacctctggagttatttgccagacccaccgccgacaccatcttcaggcaaaggcaacaatggtgtacctattttagcggtgccagggtcatcagctgcactatcaccagccaataatgataagcaagggggttcaaggcatggagctaatgcagtggttgacagacaaacaaagaacccatctgtagtggctcttgatgctgaggaagaagagggagaggccgtggatattagtggaacaaggaagagggcaaaaaggactaaagcttttgtgtgcgattacttcaccaagaaaatagagaaacaataagggcaagtgaaacaccgagggctctaggaagcaggggataaatgccttactagccgcgtgactatcggacttggcaagtcaggatcggagcagctcggccttagagcatc

SEQ ID NO: 98448 - DNA, 2047 bp, Zea Mays
gacagaaatcaccaagtgtctctctacttctctaccttgcctagccaaaatctactgccgaccaccaccgcggcaggcacacggagcaccctccactccaccgaccaataccagcggcagtaaattccgaggccgagcagccgctgccgagcctcgaggctcccttctcgcttccttcacccgcctactcctcctagggtttcctcccgcctcgctggcgtgccgcctcccctcgccattgccgcggggcgttccgccgctcgtgggacccgcatcgagactcgagagctgttcgtgctgattcccgcggagccttgtggctgcgactctgcggcgtcgggtggagaggttttgacgcccgtgggggtttggatcgagggcccggagctgtgtctccgcaatgccgggctggtctggcggcgattgctagggttttctggtcggatttcggtggaagagctgaggttttgcttcgagtgcgggagctgcctgcaaccccccccccccccccccccccccccctggcccgagctcggtgtttccgcagcaatgcctagccgattttagctcgctctggggttccgaagggcgaaggggctgtcgggcggttcgagattgcaaggagtcggtggctcggcccaatgtccggggcaagcgcgagggggcggctgtcgccagcgtccggcggcgccggggactccgaaccgcggtccgcggggggcaggacgcgctcggtgtccgctacccgcggccggaagccctcgccgaggcccgggagggatgccgccgcggcggcaggggcgacagaggagaggaaacccgccgccgtgcccacattgctgccctcgctcagcgcgcccgcggggatgcgtcggcaggagctgctgctgcgctcgggtctgtctctcgacgcgtcctgctcctcggacgcgtccacggactcgttctgcagccgagcatccacaggccggattgggaggccggcgtttggggctaggaagaagaagaccctctctcagactgattacaagcctgtttccatgctggaaagggagggtggattggcttatcagaccgatgctgctggtgtcaagaggaggtgcgcatgggtgacagcaaatactgatccttgttattctgcatttcacgatgaagagtggggagttcctgttcacgatgacaggaagttatttgagctgctagtactgtcaggggcattagctgaactgacatggccagcaattctgaataagagagacatattcagggaagttttcatggattttgacccagtatcagtctcaaaattaagtgagaagaagattatcgcacctggaagccctagcagttccttgttatccgaacagaaactgcgcggtgttattgaaaacgcacgccaaatactcaagatcatagaggaatttggatcgtttgataaatactgttggagcttcgtgaatcacaaacctatattgagccggttcaggtactcccgtcaagtgcctgtcaaaacatcgaaagcagacgccataagcaaagacctggtccgaaggggtttccgcagcgtcggcccaacggtcgtttataccttcatgcaagtctctggcatgactaacgaccaccttatctcctgctaccgttttgctgaatgcgtggcctcctctgctggtgccgctaaacttaccgatggaagcctagcagatgcaagtgatagcaaccacgccacggcggagcagaaggtgaacgggacgaatgacattgaactgtccagggctatagacgagctcagcatttcatagcggttaggagggggtgctgaagcgagacggtgttagcttgtgtattttgtgtgctgtagtggagggtgtgatttggtgtcttttttctatagtttttaccactcgtcgatgtagggtagaacaatctttagtctttggcttgccaggaccattgagcgacagcagtgtaatgatgtatattctttgtgatgcgagtgcacctgttttcctgcatttcagttgagctggcttttcgccagtgtcgtcaa

SEQ ID NO: 98449 - DNA, 763 bp, Zea Mays
gagaaaacagagggaatagaagagcaccttcttcctcctcaagctattctgagatcctatccccctctcgatctctattgtggctgctcacgctctcgggtgatctcgccgatgagctacgggtgtgacagtggtatcagaggtagtcatcctcggcattggtgtgacggcagcgctgttgcggcggcggcggtgctccccaccccaacccaaccctagccggggcgttgcgggccccatccggtccgcggtgcatcttctttggcctccccgcacgcaaacgtggacacgcgcagatcaggtggaggcgtgcagatcaggcgcgtgacagcgcacgttgactaagctctcacgcgacggcatcgaccacgagcttcccacaggctattacagtgaagtgattggaaactcggcggcattggtggtggaatgaaatcggtggcgcaggcgacgacgttgggttttggagtgacactggcagtagctcgggccaggctatggcaaggctcttcctctccaagattgagggcgatggatggattggaggtgagtattcctacacgtagcatgggggtttgatacaagggaccccaacagtgccatggaatttgaggccacgggaggaaactgtgatgcgtgttgtggcaggaggcatacccaccaagtgtttgatggtttgcctgattcggagtcatgaggagattatggtgagtggtgatggcagttacttgctgcaacaggacctggtggtacctgatgcctc

SEQ ID NO: 98450 - DNA, 1248 bp, Zea Mays
atggcaaggctcttcctctccaagattgagggcgatggatggattggaggaggcatacccaccaagtgtttgatggtttgcctgattcggagtcatgaggagattatggtgttcgtgggaatgccacaggaagtaagtgcagataaggaattagatgaactgccttatgttgatgttgtctgggatgatgaacctctagatatagaaacaattgttggtgaggattgggtccatgcagatcaaaagcaggatgcagatttgcaattagctcaagggactgaggagatgatgtgcaaacaggttccattggaggcatcaattttgttggaggaaatgtatcaaggtggagagaacttgccattatttctagatttcgatgtgtttactgtaggaaaggctattgaggacaacaaggtcgtgtgggataaagagctgctacaagaggttgagtcacatgacagtatactgatgccagtagctcagggagagtgcctgagtgtcatggatgacaaaccagttgttaagttggtctctttcaaggcttcaatagtgataaatgatgatgaaggggagttattcgatgaaaggtctcttacaaatgtgatttgggatgatgaatttgtacacgagctagagcttaatggtggtccagtagtacttgatgagatgcctcacgaggacatcatatgggatgaaggttcatcttctgacctcggcttgcagcatggattactgattagtggttataatagtgtgacctggttatcatctctagatttttttctcctgagaaagacatactgtcagtacattaaggtccacatcaacatgcttgagaaaatgacagtatggagcaagactatacacattgttgataacaaggagttcattttccctgtcgtattgatcattaggccatgggatccgggcatcattacggccacaacttggggacaagttgtgtttcgagggagcggtaatgtcatgacccaaatggagaccaagagaagcccaaaagctattaagcccagtcatcaagttatatcccaactaaggcccaagcatcccctacatagagctcggtcagcaactcaagagggcagacaacaaattattaaaaagaagagaaaacagagggagcggaagagcaccttcttcctccttaggccttgttcgtttgtgtcggattggtgggtcggaacgattccgaaccggattgcttctctaatttatataaactttgattag

SEQ ID NO: 98451 - DNA, 189 bp, Zea Mays
acttcataaaactgaaatgcaattgcgcattttcaatggctcttgatgacacttaacttacttcatatatcctcgtgctgccagcctaaacatgacttgtgagatcagcgcttacttaccttttttctacctcgctccatcttttccttcttacctctacatcgtcttttataattactcttcttcctc

SEQ ID NO: 98452 - DNA, 599 bp, Zea Mays
ggtcaaacatggagtcatacaattaatttgaatccatgtaaagggctcaaataaaacaaattccactcaactagtaactttcaggtactattccaacaagtgacatacgtatcttgttaacatcattatcacaacgatacactctgtacttgtcatttctaggcgggaacagccaacatatatccacattattcttattatagaaaatttcgtgaaactcatttttttaaatgtcacggtagaacttctgatgataaaatgtagtacacagtaatgtgtgaaatcatcagccctccagcctgttcgctgtggtttgttaactaaaaacaacctttatctatttatatctattcaataaactactactcaaccttatcttgagatgatgacgggagaaacattatcacgtcatcagcataaaaggatacatgatggtttacctgttgtgttattagattatcatgggatatgttgtgttattagacttatcatgggatatgtttatagctatacctattattgatactatcttctacaaacttggtcaaactttaacatatgatccaaaaatagctacagttgcatttttcgggaccaag

SEQ ID NO: 98453 - DNA, 955 bp, Zea Mays
aggactcgtgaagaaaatgatctttatatggaaatgaaggaatccagagtaattaatgaaaaaatattgaggaatcaaaggtagctctagtctatggccaaatgaatgaaccgccgggagctcgtatgagagttggtttaactgccctaactatggcagaatatttccgagatgttaataagcaagacgtgcttttattcatcgataatatctttcgttttgttcaagcaggatcggaagtatccgccttattaggcagaatgccctccgcagtgggttatcaacctacccttagtacagaaatgggttctttgcgagaaagaattacttctaccaaaaagggatctataacttcgatccaagcagtttatgtacctgcagacgatttgaccgaccctgctcctgccacaacatttgcacatttggacgctactaccgtactttccagaggattagcttccaagggtatttatcccgcagtagatcctttagattaaacctcaactatggtacagcctcggattgttggcaacgaacattatgaaactgcgcaaagagttaaggaaactttacaacgttacaaagaacttcaggacattatcacaattcttggattgaaaaaccgatcaaaaaaggacgagcgaagtaagtaatcgaaaaactttcttctttgttcgtcctatctataagaggagagcatatgaaaaatgtaacccattcttttatttttttagctcactggccattcgctgggagttttgggcttaatacagatattttagcaacaaatctaataaatctaactgtagtggttggtgtattgggttcatgaacggacacctttggctaatttaattcgctggagagataagcccgtggctctttcccgtcaacactacttcgtctacccacttctctttcaggaatatatttatgcatttgctcatgatttctg

SEQ ID NO: 98454 - DNA, 940 bp, Zea Mays
cgcgtgcatccagcaggaattgaacccgcaaatttaccaattatgagttgggcgctttaaccattcagccatggatgcttaacagggatcatagattagaaggatagaaaggcgatgagaatgtgaaaagaaaacagagaattgacacacccaaaaattattatatatatcggatacacttgaagaggctaagttcataggtatgtaaacacgatctcgtacaactcaccaaaccaaagtctggaagttccattttttttgttaagaagagaacaaatatgtatcaattgttgaatcggatacaacaatgggccaaaaaggccaaaggccagttagcatagggaacatattctaaatctatatatgaaaaacgaatcacttattttttttggctttttggccccatatttgtcgcaagcataccactcataatgaaataaagaaatatgagcatcgtgtgttcgatttttccaaagaacagggagagcaatacaagcgttgtgctgctaggcgaagcggttgagtgccgcaccctagatggcgttccagatccaagtggtagtatcggggcccttagctattgttcttgagaaatgcccgggtctggcccattcctcaaaagatggacttcttacttcaattaaattatttcatttcttagtcggaaccttaggtggttctcggaagaagatagcgaaaaaaattatccctaaagtcgaaactaaaaggaacgtataaaccaatgcttccatagattcgatcctagtttattacaatatcatcaagaacaagaaaaagagcgaatatcctgtttgggtatttcaatggaaataccctttatgggtgttttacgtagaaatactatttttgcttattttgacgatccacgatacagaaaagataaaaggggttcaggaattgttaaatttagatataggac

SEQ ID NO: 98455 - DNA, 2644 bp, Zea Mays
cgcaagcgcggcccagcaactgctgcagccgtttccccacagctgctgcttccttctcctacactgccccgctccgctctgagatggatcccgcgccggcgaccccgcgctggaatcttgagcgaccgtaccttactggacgcttccaccaggaggcgaaggcggctgcggcggcgcagggcctcggatccaagccgttctcgcttgactccttcagccgcggcgccggcgccgggagtgtcatcggatcgtacgcagtatcagtgcaggagcttttggttatcgatgatttgctatcagctctggtgggtattgagggacggtatgtttctattaagagagttcgtggaaaggagggctatgttgtctttcagattgattcttctatggaccttgccctccaggaattgactcgccggattttccctttgtgcgaggattatgtgttggtaagccagtttgtggagtccaggtcacatttcaagaatggtttggtcaaccatgctctggctgcagctctaagagcattcttactggattatcaggcaatggttgctcaactggagcaccagttccgtcttggaaggctttctgttcagggattatggttcttttgtcaaaggatgatgagttcactgaatgcactggcagttctagtggagaaggctacctccaacaatactaatggttcagcgacacttaatctacttcaaagccaggcaaaggcgatgggtggtgatagtgctgttcggtctttactggagaagatgacagaatatgcaagtgcagcatacctcaggatgctagaaaggtgggtgtatgagggagttattgacgatccttatggtgaattcttcattgctgaaaacaaatctctgcagaaggagagcctcactcaagattatgatgccaaatattggcagcaacgttacagcctaaaagaaggaattcctagtttccttacgaatgttgccgcaacgattctaacaacagggaagtatcttaatgttatgagagaatgtgggcacaatgttcaggtttccttgtcagacaattctaagcttatgagctttggctcaaaccaccaatatcttgaatgtataaaatctgcatatgattttgcaagtggtgaattgttgactctgatgaaagataagtatgatctcatcgggaaactccgatccctgaagcgctatctactccttgaccaaggtgactttttggtccattttatggatattgctcgagaggagcttacaaagaaaccagaagaaatatccgctgaaaaacttcagtctctgcttgacattgctttacggagtactgcagctgcttcagatccaagccatgaggaattaatctgctgtgtggaaaggagttccctccttaagaaactggccactctgaaggacttggatcctgcagataagcttgctgcagcagatgttgatcgatcaatgcaattaagcatcacgggtttggaaacattctgccttagcaataaggtccagtggccgttatctcttgtaatttcaaggaaggctttgacaaaataccaattgatctttcgcctattgttccactgcaagcatgttagtcgccagctgtgtgcagcatggcaaatacaacaagcattccggtctgtcaagattctagggacaccaattctgcggtcatcaattctttgtcgtagcatgctcaagtttgtaaatagccttttgcattatctaacatttgaggttcttgaaccaaattggcatctgatgcatgaccgccttcaaacagcaaggagcatagatgaggttatccagatccatgatttcttcctccagaagtgtctaaaagaatgcttgctgttgtcgcctgaactccttgtgaaagtcgagaagctgaaaggtttatgccttcagtatgccacttccatccagatcttgatgccatctatcgatgtcgctaactctgagaacacatcgaagtctaggaagtcaagatcaagaatcgataaatcacaggacagagaccagcagctgaaactagcatcagagaatgttgtcatgtcagagtcgatcctgaaatttgaagcagcgttcaattcagagctgcagagtcttgctcctacgctgagtaacagttcacaagcggagccgtacgtgactcatctcgcacagtgcattcttggcgtgcgaatcggccaatgagttatttgatgggccgtacccatacctgcctgccttcatttggacttttggcacaatgccatactctatgtgcgccgctgcagtcaaggtaggtgcatatccgtttcttgtgaatgctaatgtggagctacgacgcgtttagtgaccctagggtggtgtcgggagccttgttatcttgagctcgaaccttgctgtgtgtttatcagctgcgactcagcatttcgtgctgttgatatctgacaatagcaatgtgtggttgtgttgtgttgtgttgtgagactcagatgtaagctttgtggagttcatttccacgtgtgtgggaaaagtgtttggtttgaatcgaactgggcattggtattccacgagagttggttagcggccagtaatgtaatagtaaatatcatgctattaagctaatttaagttgatgaaatccaaataaagcaa

SEQ ID NO: 98456 - DNA, 1214 bp, Zea Mays
accgagcaaaggcacttcaccgagtctcttggacttctctaaaatccggtccatgcgcggtaactttaagttgggtccacctccacacgaatcagcacgatagtgcgtagtggcaggctgccaagctcaatcaaggattctggactcagcatgccagtctcctctcgcggccctgttgtttgccggaaatccgctcggggaccccgcgcgcactagccatttttgcgctctacctccgcaccaaccatccgcggttagttcacttcccacactcccccacgccactgtttcagtgttcccctcaccacccgagccccaccaccagtccaccaccaccaccggcccgtgccccagccacaacaaggcgaaatcaggggtggtcacgccgagcgactacgcgaagacgcagtcggcgggggcgaagatctcccaacccacattgcgcgcgcgtctacgcccgaggatcgatggttggcggcggggggcgccgcgcggcgctggggcgctggtgcctggtgatcctggccgtggcctccgcgctaggggtctctggccccgccttctactggcgctacaagaagggcttctcctcctcctccccctcgtccaccgcggcggcggtggcttcttccccgtcgtgccctccctgcagctgcgactgcccggcgcccctttccctcaagtccatcgccccaggtgatctgtcctgttcagaccctctttccagatcttcctacagttctcgcctgatcagtgtcggtacgcatgtctacccataattcgttaggtaaaacaaaaaataataatctgtattttggtcgggactagggtcatcagatgaacgccatagcatatggtacagctgacgcatgcatatgggtagcaaataagctagttttagttgctgtgtctaatcgtctatgatgaaaactcccagttgcagctatgtccacattactgacaggaatttgtgtttattgcagggcttgccaacttctcaataacaggtttgggtccttccttcacagttcacactcctgtcaattgaggcatgggtttcctcatatttggatgagcatagtggttatcttatgatagaatggcagcaatcgtcatggatcactgtgttctttacttactaaactgaacaattcgtgaagctgccttcagtagttcagtcactatgatgatgcatggggtgatttatagacctt

SEQ ID NO: 98457 - DNA, 2273 bp, Zea Mays
accgagcaaaggcacttcaccgagtctcttggacttctctaaaatccggtccatgcgcggtaactttaagttgggtccacctccacacgaatcagcacgatagtgcgtagtggcaggctgccaagctcaatcaaggattctggactcagcatgccagtctcctctcgcggccctgttgtttgccggaaatccgctcggggaccccgcgcgcactagccatttttgcgctctacctccgcaccaaccatccgcggttagttcacttcccacactcccccacgccactgtttcagtgttcccctcaccacccgagccccaccaccagtccaccaccaccaccggcccgtgccccagccacaacaaggcgaaatcaggggtggtcacgccgagcgactacgcgaagacgcagtcggcgggggcgaagatctcccaacccacattgcgcgcgcgtctacgcccgaggatcgatggttggcggcggggggcgccgcgcggcgctggggcgctggtgcctggtgatcctggccgtggcctccgcgctaggggtctctggccccgccttctactggcgctacaagaagggcttctcctcctcctccccctcgtccaccgcggcggcggtggcttcttccccgtcgtgccctccctgcagctgcgactgcccggcgcccctttccctcaagtccatcgccccagggcttgccaacttctcaataacaggtttgggtccttccttcacagttcacactcctgtcaattgaggcatgggtttcctcatatttggatgagcatagtggttatcttatgatagaatggcagcaatcgtcatggatcactgtgttctttacttactaaactgaacaattcgtgaagctgccttcagtagttcagtcactatgatgatgcatggggtgatttatagaccttatggaaccttctacttgggttattcttcacactacaaaaaatgcacgagcaaaatagttcttatgaaatgaaagtaaaattatgtgttgaattctgaaaattcacattcttaatcatttagcctcaaattgtcttatgtgaaaagaaaagctgaacactagaattctagcctatcaagtatgttaagtgctgcatatctttaagagttggattttataattaggtgcggaactacagagatttgtctaatgatgcgatctactgaaatacctactgtaggcttcttaaaagcatcctgttgttgagaaaaaaatatctttttcttcatcttggtttgcatttcataagtctttggcatcaggctattaccctaacaatatagcatagatgaaagttagttgtgattagaccgtgtccagcagttcacccatatggtcgcccaaaaaactattttgcactgtagaccgcactgttcacaaagtggagtttgaatataggtatggggatgagtaagctgctgaagatagccttagtatgtgttgacgttcataacatccaatgaaactcagagattgttcttccatccaactagatttggcattttggcactttttagatttggacggtatatttgcttcatcaaggttgcacaaatcttcctcactatgctgcaccattagttcttgtgcttttgtatctcatagccacccagttttccagaacaggaattgtcgaaatatttgaatcaccttatttgcactgttttctatgtctacctttttctttcaatgcacactttcctgaccttattattgctattatcaaaatattaggctaactgaactaaaactttaaagtttgtgttgaaatatgcagattgtgggaaaaacaaccctgagcttgccaaagagatggagaagcaatttgtcgatcttcttaatgaggaactcaagctgcagcaggttgtagctgaggagcatagtcaccacatgaacgccactcttgtcgaagcaaaaagacaagctactcaataccagcgagaagccgaaaagtgtaatgcagctacagagacctgcgaggaagctcgggagcagtctgaagtagcaatttcaaaggagaagaaactcacagcaatgtgggaacagcgagctcggcaactgggttggcatgattctcgagccacgagcatgtgacagctttagttctgaattttcaggtgaaattatttctggtagctgcatgggttatgccttgcagccaaaccaaccggcgacgtttgtctatgtaatatcagtttccacgacaacattgttaattttgagtctcaacattatagttccagcttc

SEQ ID NO: 98458 - DNA, 1837 bp, Zea Mays
accgagcaaaggcacttcaccgagtctcttggacttctctaaaatccggtccatgcgcggtaactttaagttgggtccacctccacacgaatcagcacgatagtgcgtagtggcaggctgccaagctcaatcaaggattctggactcagcatgccagtctcctctcgcggccctgttgtttgccggaaatccgctcggggaccccgcgcgcactagccatttttgcgctctacctccgcaccaaccatccgcggttagttcacttcccacactcccccacgccactgtttcagtgttcccctcaccacccgagccccaccaccagtccaccaccaccaccggcccgtgccccagccacaacaaggcgaaatcaggggtggtcacgccgagcgactacgcgaagacgcagtcggcgggggcgaagatctcccaacccacattgcgcgcgcgtctacgcccgaggatcgatggttggcggcggggggcgccgcgcggcgctggggcgctggtgcctggtgatcctggccgtggcctccgcgctaggggtctctggccccgccttctactggcgctacaagaagggcttctcctcctcctccccctcgtccaccgcggcggcggtggcttcttccccgtcgtgccctccctgcagctgcgactgcccggcgcccctttccctcaagtccatcgccccagggcttgccaacttctcaataacagattgtgggaaaaacaaccctgagcttgccaaagagatggagaagcaatttgtcgatcttcttaatgaggaactcaagctgcagcaggttgtagctgaggagcatagtcaccacatgaacgccactcttgtcgaagcaaaaagacaagctactcaataccagcgagaagccgaaaagtgtaatgcagctacagagacctgcgaggaagctcgggagcagtctgaagtagcaatttcaaaggagaagaaactcacagcaatgtgggaacagcgagctcggcaactgggttggcatgattctcgagccacgagcatgtgacagctttagttctgaattttcaggtgaaattatttctggtagctgcatgggttatgccttgcagccaaaccaaccggcgacgtttgtctatgtaatatcagtttccacgacaacattgttaattttgagtctcaacattatagttccagcttccttacaaatgtgactagcttgctgccgcctagatatctgaattttgtcatagtactgttgaaagccattttattaaggacatgtttgtttttctcctagattatataacctgaattatgacgaaagagtaagagggtaaaatatcactttgaaagcacaaataagctgaactaaactactcaatgccagcttatttatagttctaaagtgatatttttacccttctacccttacaccataatccaacttatataatctagaagggaaacaacagatctaagtgctgatttggtgacaaaagaatcactggggatggaagagggttaaaggagaaataaactaattttcctctcaatcccatctaattctcccgtgatctctggtcactaaaacagccctaagtgttgtggttgtggtttaatgccgaattgttggagaaacttaattcaaatctggatacaggatgtacagagtcttgatctatagcatcaatctggcggtacagcttacttgttgggtgacggaagtaccttcggaatataattgttgtatgtgttgacatattgatatattcttgtgggtcgaaggcctatttgttattatataatccagcttaaataagttaaaagataaacaaataacatata

SEQ ID NO: 98459 - DNA, 1527 bp, Zea Mays
ccgaactgcggggcatctcctgttccttcatcagcgagccactcagatctgccgttcctgacccggagcgaacgaggtgagccgaggcggggggacgcgccaccggccatggagcccgggctgagaatcgagtccggttccgccatccgcgtcgcggtggtccccgtgggcggcccgatcccgccgccgcgcctgcgcgaatacgcggcgctggtggcgcgcaacgcgcgcgtcgacctcgcctcggtccgcacctactacgcggagcaccagaagagcccattccagcaccagccctgggagaccggatgtctccgccttaagttcgtgctcggcggctgcgtgccttcaccctgggaagacttccagtcctcgcgcaaggtgcttgccgtgatcggcatctgccacctgccgtcctcgaccgcgtagcggcagacttcatagacgctgcgcggtcgtacccgtcagcgctcgccaaccggtgcttcgccttctgccccacggacgctcaggtgtcatgagtagtgaaatttcagccatctcagcttcatcaaacaccataaaagggataatggcaatgaggatactcaagctcgtgaacactctgatgaggaaatggattctgacgaggaacatgagagtttttgtcattcagagcaaaaattatgtgatgagaacaaagcagctgaagttggaatatattgagatggctataatgtggtgtggtgtgacccatgattgacatagattaagaagatttggtgggcttggcttgatgacaacattgttttttttgtgtctgtacacgatggcagcagtgctttcgccttatgtgtgctgctcttcagatgacagatcgccatgtcaacatgggatgcccatcatcgaatgattttatctataatttgcgatgtgttttgtgagatgagtcgggcgatggaagttggtcaacatgcaccagaggttgaggttgctgaagcatcagatgaagatgttgaggcctacatcggcaaagccaccgagatgaattgagacaatactggaatggtgaccttcaaggaattcctttttgcttttactcaaccgaagattaggcgttctgaatcgatcgagccagcccctcaggaggcctccagcagctccctcctgtcgtgcctcagaagtagtagctcatgttctatatgtggcgagctgatggtagaaattaccaggttcattctcttctgtgatatgtgaagctcgagtgaaaagaaaaattatgtgatgagaacaaagcagttgaagttggaatatattgagatgtctacaatgtggtgtggtgtgacccatgattgacagattaagaagatttggtgggcttggcttgatgacaggcgacaacattgtttttttgggtctgtatacgatggatgatattgccccctctcccactattattaatttaatttgtagcgagactgacatgatgatgataagatgactgatcgctatgtctgcatggatgcccaacatcgaatgattttatct

SEQ ID NO: 98460 - DNA, 366 bp, Zea Mays
atgtcgggccgtggaggagggccggggccggggcgggtgaaggcggggagccgcccgccgtgggtcgggctggcggcagcggtgtgggtgcaggtggcggcggggagcgcctacgtgttcccgctctactcgcacgccatcaaggaggcgctcgggtacaaccagcaagcgctcaccatgctcggcgtaggcaacgacgtcggcgagaacgtggggctcgtcccgggggtgctcgccaaccgcctcccgccctggctcatcctcgtcatcggctccgcttgcgccttcttcggcttcggcacgctctggctcgtcgtcaccaagaccgtcgccatgccttactgggtgttggctgaagctaaatga

SEQ ID NO: 98461 - DNA, 462 bp, Zea Mays
atgacactttatccaaacaaacaaacgaaggaaaattccagcacccttgctccatcttattcaagtgatagcctgtctggtgcagatccagagaactcacaaccacttctgggcagtgcctcaacaacacttgctacaggtaccaatgaatctgatgacagtactgatttggatgttctattggctgagggtgagggagcagtgaatttgaaaaacaaaagagggccaagaagggggggtgatttcacatttcgtgaagccttagtaaaggcggacttctggctactgtttgttgtttacttttgtggagttggcacaggagtcactgttctcaataacctggctcagattggaatgtctgttggtgctaatgatacaactattttgttgtgcctctttggcttctgcaactttgctggccgtatctttggtggatctgtctctgaatatttcgtaaggtaa

SEQ ID NO: 98462 - DNA, 1828 bp, Zea Mays
tcgctgctctgcgcctacgtacgccggtacgcattgccgcctcctccccctctttccagtcccgacccgcagcgggcctaatcctcgtcttcctcccgtaaaccacctcgtccctatccgcagcaaccgttcgccgcgccgcgaggcccgctgatcccaccgacctccaccgctatggctcctctgtcccgcgcggctcgcctccttcgatgcgccgtcgggcggctgaggttgccgccgccggcccgggccttctccagcgccgcggcggcgaccgagacgggggcggggaacggacgcgaggccgtgatcgccgctgctgccgtggcgatggccgggtccgggcttgggctgtggctgaaaccgccgtcgcttgccgactccggcgaggcgcccggcggtcagatctcggtcacctgcgctgcttccacggaggcgcaggaggagaaggggaggttcctgttcgcagactcattccgcagaagagtattctttaactatgagaagaggatacggcttctcagccctcctgagaagatatttgagtactttgcttctgtgaggaacccagaaggggaagtttacatgttgcctggggacttgatgagagcagtagtccctgtttttcctccatcagagtccaccatagttcgtgaaggaagattaagaggggagcggagccctggagagttgcattgtgctccatcggagttctttatgctgttagacactaatagtgacggtctcatctcctttgccgagtacatcttttttgtgacattgctcagcattcctgagtcacatttcactgcggccttcaaaatgtttgacgttgaccacagtggggtgatagacagagaagagtttaagaaagtaatgtcactgatgcggtcctttaacagacaagggtccactcataaggatggtttacgtattggacttaaagttggccagcctgtggagaatggtggggtggttgagtacttctttgggagtgatgggaacgagcctctacactgtgtcaggttctcaaattttttgaaggagttgcatgacgagattattcgattggagtttagtcattatgatgtcaagtcgtctaaaactataccagcaaaggattttgcattgtccatggttgcttctgctgacatgaaccatatcaacaagctgcttgatagagctgatggtttggtcaaggagccagatctgaaggacatacgcatcacctttgaggagtttaaggcatttgctgacttgcgacaaagattggagccactgtcgatggctatctttgctcatgggaaagtgaatggattattgacaaaggaggatctaaaacgtgcaacacaacatgtttgtggtgtcaacttaactgatagagtggtagacatcattttccatgtgttcgacacaaatcaggatgggaacctgagctcggaagagttcttaagagcattagaaagaagagaaactgctattcgtcaaccaacaataccaggtccatggggttttttgtcttgctggttcagtggtaggaagtgttcacttaaacaggtggtgctctgatttggcccctacttgatcctcactgaatctgtcatccaccttcaattgtcatctcccgttgcaggaggtaatcacgaagcagtgcctagctgatcggtaaaacgactttgttgtacatgtcgtctccgagtccgaagcttgcctagcagtagcagctgtaattgtaagtagtgtcagccctaggactgaaccttgtgttattctcatatgtaaatcaaaccccatacgatttaaatatatgatatctgttggcgttgac

SEQ ID NO: 98463 - DNA, 2163 bp, Zea Mays
tcgctgctctgcgcctacgtacgccggtacgcattgccgcctcctccccctctttccagtcccgacccgcagcgggcctaatcctcgtcttcctcccgtaaaccacctcgtccctatccgcagcaaccgttcgccgcgccgcgaggcccgctgatcccaccgacctccaccgctatggctcctctgtcccgcgcggctcgcctccttcgatgcgccgtcgggcggctgaggttgccgccgccggcccgggccttctccagcgccgcggcggcgaccgagacgggggcggggaacggacgcgaggccgtgatcgccgctgctgccgtggcgatggccgggtccgggcttgggctgtggctgaaaccgccgtcgcttgccgactccggcgaggcgcccggcggtcagatctcggtcacctgcgctgcttccacggaggcgcaggaggagaaggggaggttcctgttcgcagactcattccgcagaagagtattctttaactatgagaagaggatacggcttctcagccctcctgagaagatatttgagtactttgcttctgtgaggaacccagaaggggaagtttacatgttgcctggggacttgatgagagcagtagtccctgtttttcctccatcagagtccaccatagttcgtgaaggaagattaagaggggagcggagccctggagagttgcattgtgctccatcggagttctttatgctgttagacactaatagtgacggtctcatctcctttgccgagtaagtgaaatgagctttagaaaaatgttggcccaaataattgtattctgaatattgaagtggagattcgcactcctgaatgaatactgtcattaagttgctgtaagaaagccttgaaaatctgtaggtgtttatctagcacctgttcaggataactgatgtactgtatatatcaataaatcattatgtgacgccacaggtatgatgcatatgttgaaagtcatggtgcaatgcattagctatttgccatctgatgatgcattgttgcagacatattatattattggcctctcagttacctgtgttgttttgacaggtacatcttttttgtgacattgctcagcattcctgagtcacatttcactgcggccttcaaaatgtttgacgttgaccacagtggggtgatagacagagaagagtttaagaaagtaatgtcactgatgcggtcctttaacagacaagggtccactcataaggatggtttacgtattggacttaaagttggccagcctgtggagaatggtggggtggttgagtacttctttgggagtgatgggaacgagcctctacactgtgtcaggttctcaaattttttgaaggagttgcatgacgagattattcgattggagtttagtcattatgatgtcaagtcgtctaaaactataccagcaaaggattttgcattgtccatggttgcttctgctgacatgaaccatatcaacaagctgcttgatagagctgatggtttggtcaaggagccagatctgaaggacatacgcatcacctttgaggagtttaaggcatttgctgacttgcgacaaagattggagccactgtcgatggctatctttgctcatgggaaagtgaatggattattgacaaaggaggatctaaaacgtgcaacacaacatgtttgtggtgtcaacttaactgatagagtggtagacatcattttccatgtgttcgacacaaatcaggatgggaacctgagctcggaagagttcttaagagcattagaaagaagagaaactgctattcgtcaaccaacaataccaggtccatggggttttttgtcttgctggttcagtggtaggaagtgttcacttaaacaggtggtgctctgatttggcccctacttgatcctcactgaatctgtcatccaccttcaattgtcatctcccggtacgtatgtcatctcctgttgcaggaggtaatcacgaagcagtgcctagctgatcggtaaaacgactttgttgtacatgtcgtctccgagtccgaagcttgcctagcagtagcagctgtaattgtaagtagtgtcagccctaggactgaaccttgtgttattctcatatgtaaatcaaaccccatacgatttaaatatatgatatctgttggcgttgac

SEQ ID NO: 98464 - DNA, 2144 bp, Zea Mays
tcgctgctctgcgcctacgtacgccggtacgcattgccgcctcctccccctctttccagtcccgacccgcagcgggcctaatcctcgtcttcctcccgtaaaccacctcgtccctatccgcagcaaccgttcgccgcgccgcgaggcccgctgatcccaccgacctccaccgctatggctcctctgtcccgcgcggctcgcctccttcgatgcgccgtcgggcggctgaggttgccgccgccggcccgggccttctccagcgccgcggcggcgaccgagacgggggcggggaacggacgcgaggccgtgatcgccgctgctgccgtggcgatggccgggtccgggcttgggctgtggctgaaaccgccgtcgcttgccgactccggcgaggcgcccggcggtcagatctcggtcacctgcgctgcttccacggaggcgcaggaggagaaggggaggttcctgttcgcagactcattccgcagaagagtattctttaactatgagaagaggatacggcttctcagccctcctgagaagatatttgagtactttgcttctgtgaggaacccagaaggggaagtttacatgttgcctggggacttgatgagagcagtagtccctgtttttcctccatcagagtccaccatagttcgtgaaggaagattaagaggggagcggagccctggagagttgcattgtgctccatcggagttctttatgctgttagacactaatagtgacggtctcatctcctttgccgagtaagtgaaatgagctttagaaaaatgttggcccaaataattgtattctgaatattgaagtggagattcgcactcctgaatgaatactgtcattaagttgctgtaagaaagccttgaaaatctgtaggtgtttatctagcacctgttcaggataactgatgtactgtatatatcaataaatcattatgtgacgccacaggtatgatgcatatgttgaaagtcatggtgcaatgcattagctatttgccatctgatgatgcattgttgcagacatattatattattggcctctcagttacctgtgttgttttgacaggtacatcttttttgtgacattgctcagcattcctgagtcacatttcactgcggccttcaaaatgtttgacgttgaccacagtggggtgatagacagagaagagtttaagaaagtaatgtcactgatgcggtcctttaacagacaagggtccactcataaggatggtttacgtattggacttaaagttggccagcctgtggagaatggtggggtggttgagtacttctttgggagtgatgggaacgagcctctacactgtgtcaggttctcaaattttttgaaggagttgcatgacgagattattcgattggagtttagtcattatgatgtcaagtcgtctaaaactataccagcaaaggattttgcattgtccatggttgcttctgctgacatgaaccatatcaacaagctgcttgatagagctgatggtttggtcaaggagccagatctgaaggacatacgcatcacctttgaggagtttaaggcatttgctgacttgcgacaaagattggagccactgtcgatggctatctttgctcatgggaaagtgaatggattattgacaaaggaggatctaaaacgtgcaacacaacatgtttgtggtgtcaacttaactgatagagtggtagacatcattttccatgtgttcgacacaaatcaggatgggaacctgagctcggaagagttcttaagagcattagaaagaagagaaactgctattcgtcaaccaacaataccaggtccatggggttttttgtcttgctggttcagtggtaggaagtgttcacttaaacaggtggtgctctgatttggcccctacttgatcctcactgaatctgtcatccaccttcaattgtcatctcccgttgcaggaggtaatcacgaagcagtgcctagctgatcggtaaaacgactttgttgtacatgtcgtctccgagtccgaagcttgcctagcagtagcagctgtaattgtaagtagtgtcagccctaggactgaaccttgtgttattctcatatgtaaatcaaaccccatacgatttaaatatatgatatctgttggcgttgac

SEQ ID NO: 98465 - DNA, 1859 bp, Zea Mays
tcgctgctctgcgcctacgtacgccggtacgcattgccgcctcctccccctctttccagtcccgacccgcagcgggcctaatcctcgtcttcctcccgtaaaccacctcgtccctatccgcagcaaccgttcgccgcgccgcgaggcccgctgatcccaccgacctccaccgctatggctcctctgtcccgcgcggctcgcctccttcgatgcgccgtcgggcggctgaggttgccgccgccggcccgggccttctccagcgccgcggcggcgaccgagacgggggcggggaacggacgcgaggccgtgatcgccgctgctgccgtggcgatggccgggtccgggcttgggctgtggctgaaaccgccgtcgcttgccgactccggcgaggcgcccggcggtcagatctcggtcacctgcgctgcttccacggaggcgcaggaggagaaggggaggttcctgttcgcagactcattccgcagaagagtattctttaactatgagaagaggatacggcttctcagccctcctgagaagatatttgagtactttgcttctgtgaggaacccagaaggggaagtttacatgttgcctggggacttgatgagagcagtagtccctgtttttcctccatcagagtccaccatagttcgtgaaggaagattaagaggggagcggagccctggagagttgcattgtgctccatcggagttctttatgctgttagacactaatagtgacggtctcatctcctttgccgagtacatcttttttgtgacattgctcagcattcctgagtcacatttcactgcggccttcaaaatgtttgacgttgaccacagtggggtgatagacagagaagagtttaagaaagtaatgtcactgatgcggtcctttaacagacaagggtccactcataaggatggtttacgtattggacttaaagttggccagcctgtggagaatggtggggtggttgagtacttctttgggagtgatgggaacgagcctctacactgtgtcaggttctcaaattttttgaaggagttgcatgacgagattattcgattggagtttagtcattatgatgtcaagtcgtctaaaactataccagcaaaggattttgcattgtccatggttgcttctgctgacatgaaccatatcaacaagctgcttgatagagctgatggtttggtcaaggagccagatctgaaggacatacgcatcacctttgaggagtttaaggcatttgctgacttgcgacaaagattggagccactgtcgatggctatctttgctcatgggaaagtgaatggattattgacaaaggaggatctaaaacgtgcaacacaacatgtttgtggtgtcaacttaactgatagagtggtagacatcattttccatgtgttcgacacaaatcaggatgggaacctgagctcggaagagttcttaagagcattagaaagaagagaaactgctattcgtcaaccaacaataccaggtccatggggttttttgtcttgctggttcagtggtaggaagtgttcacttaaacaggtggtgctctgatttggcccctacttgatcctcactgaatctgtcatccaccttcaattgtcatctcccggtacgtatgtcatctcctgttgcaggaggtaatcacgaagcagtgcctagctgatcggtaaaacgactttgttgtacatgtcgtctccgagtccgaagcttgcctagcagtagcagctgtaattgtaagtagtgtcagccctaggactgaaccttgtgttattctcatatgtaaatcaaaccccatacgatttaaatatatgatatctgttggcgttgactggacgtcaatc

SEQ ID NO: 98466 - DNA, 752 bp, Zea Mays
atttttgcactcagtttatctcttattattttcatgaatgtgtatttgcaacttcaggagtttaaggcatttgctgacttgcgacaaagattggagccactgtcgatggctatctttgctcatgggaaagtgaatggattattgacaaaggaggatctaaaacgtgcaacacaacatgtttgtggtgtcaacttaactgatagagtggtagacatcattttccatgtgttcgacacaaatcaggatgggaacctgagctcggaagagttcttaagagcattagaaagaagagaaactgctattcgtcaaccaacaataccaggtccatggggttttttgtcttgctggttcagtggtaggaagtgttcacttaaacaggtggtgctctgatttggcccctacttgatcctcactgaatctgtcatccaccttcaattgtcatctcccggtacgtatgtcatctcctggtaagtatgagataagtttgttgtaatgatatcctgtcttgacaccgttatcctgtctttgacaccgttttccatcgatgttcagttgcaggaggtaatcacgaagcagtgcctagctgatcggtaaaacgactttgttgtacatgtcgtctccgagtccgaagcttgcctagcagtagcagctgtaattgtaagtagtgtcagccctaggactgaaccttgtgttattctcatatgtaaatcaaaccccatacgatttaaatatatgatatctgttggcgttga

SEQ ID NO: 98467 - DNA, 2098 bp, Zea Mays
ctcaaggcagccttcctcgtcacttccgcagcgacacaatccaagggcccgtccggcagtggcacaccaacccgccgccccgccacgggcgcgcgcgcgaacactgggccccacctggcagcaattcgcccccggcccccatacaaatatccggcgcgtcgcggcgtcggcgtcggcgtcgtttaccagtcttctcacccggtcgccggtcttgagcgaccgcctcgctacttcctcctaccggcgcaggcacacggtttccgcgccagcaaggggtgcccaccgcaaagatccgatcgatcagatcaaaagggaattcctgaaaaggagagaggagcacccttcctcgccatttccgtccaagtgttttcccgaggagtcgtgcgtgcctgctggcgctggggcggctggacgggagcattgctggccgcggcggagcccggcgctcgagtcccttctctcctctcctctcctctcctctgcggggggcagccttttatttgacaacggtataaagaaatcaagtacaaatgaagaggcacatctctgcccagtatttgatgactgaagataggtagcagtatggtagctgctacaattgcgggaatgtttcttgtgtgttttgagtccctctgcacctgttttggcacaaaaaggaaagatgaaagcgaagaccatgttcttgcagaacattccaattccttgagttcttatcaaatgaggtcggtttctgatagaatttctgcaagctcgcttcgagcacctgcaagtccatctagattttcattgtcttcgccaccaagcagaaatgaacctttaaacatcagtcttgaacatgtggttaaactgacacataacttcgctccgaccttgatgattggtgaaggttactttggaaaggtctacagagcgacactgcgagatgggcgtgtagtagctattaaaagggcaaagaaggaaaattttgtttctttacgtactgaattcagcaacgaagtcgcattactaaaaagtattgaacataagaacttggtccgattgcttggttatattgacaaacccaatgaacgaattctcataacagagtatgtaccaaatggcaatcttagggagcatttggatggtcaacatggcctagttttgggatttaatcagcggcttgaaatagctatagatgttgcccatgggttgacttatctgcatctctatgcagagaagcccataatacatagggatgtgaagtcatcaaacattctactgacagaaggcttcatggccaaagtggctgacttcggatttgcaagaactggtcctactgagccaggccagtcacagattgagactgatgtgagaggaacagcagggtatttagatccagagtatctgagatcaaaccatcttacgatcaagagcgatgtgttctcttatggtgttttgcttctagaaatcctttcaggacgtcgtcctattgaggcaaggaggggtccaacagaaaggattacagtgagatgggccttctataagtacaacagaggaaatgttagggacatactggatccaatgttaacagaagcagtgaacgagaatatactgaatagaatctttgatctggcgttccagtgtgtcgctcctacccgcgaagacagaccatccatgaaagaagttgtggagaggctgtggaagataagaagggatcatacaaaaatacaaaggatagcagaattgactctctgaatccttgaaccagctgatcccggttgccgtttttgcttgagggaacatggatcagttcctagtgaagaccaaaggtcaccacataaaaataatgcaaattttgtggttgtgaacaactggaactttgtacagggttgcaaaattgttgttgtattatgttgtattgtacatggctctatgttcaagagatcaaggtgccgaacaatggcctgtgatcgatgatttccctgtgtagccactagcccgtttatcaacataagctgttcagtgatctgtaaggcacaatgtagcttctgtgtaacacctgcattgttggatgaggcttttaaaacagttagatatgaataaaatctttggctagttt

SEQ ID NO: 98468 - DNA, 2654 bp, Zea Mays
gcggatttgtacatcccaactcgactcgcgcgccccaccaatccaacaacaaatggcgtgctgccggcagtgacctgtattaaagaacgcttggcaggttgagctggacatgcgttctcttctccggtgtcttccgctgcattttcaggagtagagagaaccaagggaggcactgcaacaagaatatgtttgatagctacacttcgtagaggaagaagtatccgggaagaatggatgagaccggggatgctcctctgaggtcctgcatgttccttgtcggtgacgagaaagagcggcttataattgaagcaaccaataagatctcttttgaagatgcaaagcttgatgagatggccatcgcagaaaactacaacctttgcaaaattgttgcctcaaaggagaagatgatcaaagagctgaaagaatcaaaagcgcattcagaccaggagttgaccgatgcaactgcaaggcttgaattttcacaaaaacaatgcgcctccctcagatatgaggtgcgcatgcttcaggaggagcttgagattcggagcaaagagcgagagtacgacctcaaatcaatggatgctggtcggaagaagcagcaggagagcatgaagaagataactgcactagaagcagaatgccagaggctacgggccatggtccagaagcgtctgccaggccctgcggcgttggcaaagatgaaagatgaggtcaagcgacacggttctagttctgctgagaatggaacaagaaagccacgtgcaggtgcaggtgcagcagcgcagccacagcagtcgaagcattccatgtctgaaggtcaccttgtcaagctgcaggaactgggcgatgaaaacagacagctcaggcagttgttggcccagaaggagagcgacctgcagtttgtgttgtccaagtacgcagacgcatgcaagctgtcaatactgcaaatgcagcatgaagaattgtatggtagtcatggtttaacagagaatatccatccaaaaccaatggtgagcgcatttgccaagccggagcactccatgtctgggaagcaactggtgtctaaggttaggagcaggagcagaagaatcacaggatctgacatgcaattgcttgttcatcctctggatattgagaaactagagagggcatccagaccttcaagtgccccacatcagtctgtggatgcatttgatacggactcaaaaatgactgattcagacacatttcacagagatgtcacccccgatggtttatctgacaagtgtcccgaatggatccaggacgttttgaatgtaatcatacacaagcatcaaagcagtaagataagcattgctgtcattattgatcaagtaacacatgcactgaagaatgtgatatctcccaaaggagatgatggtgcaaacttttcctatggcagcgcagagatagaaaagatggtggctactctgataggaagagtaagcagcatggctgaaagatctagcaaagacaatgttatgagttcccgatcactctctcatgaaaagtctgaactcactttgcgactcgagcatctagttcatgtctgcagtgacgtactagatggaaaggctaaccatgaaaggctcactgatgaagtttgcttgatcctagagtggatggtgagacgatgccttttgtgtcctgatggaatagacattgtggagtacacaacaaataattctgatggaaatgagtcccagaggacattaagcattcatgaaaaagatatggtgcagagtataataaattcgaaaatggtttcaggaacgcaaaaggagaacgcaacaggatatggtgctgaagaccttatccctgctgtaatattagaaaaacattctcaaattgagttgatcagttctaagcttgttgaagacttagtggctcttacacaagagcagggtgatagttgtcagggacagcatttggtatgctgtgaagcaaaaagtgctgcttctgacgggagcaaagacaagttagcagaagaagagggaaaccagatcacaacggcctcagcaatatctgcagcagccaagaaacttgcagaatgccaagaaacaatggcgaatctaagtaagcagctgcatgctctagaaagtccggcaaatacatacccatcatcagataaagagaaacgcggtaccctgcccccgtccgctgagcttgacgcaacagagaagaaacgacactgtgagcctgacgcaaatgcaactgagaagagagaacacgagcaagattctgtccgaagcccacagcctgctaaaagtgctccgacgaccctggtcgttgttcgtccgacggccccgaagtcaccccgacaacccatttctgttgacacaaagaagaagaagaagcaccgtgctaaccttctgagcaggcttgtcttcagaaagaaaggataaaactgggactcagcgtcggcctaaaaactgagtcatcagtacagttgttcagcacttgggagctcgttcttgcgttttaagttatacctcgactgatcttaagttatttccaattccaataaaaatgaacctactgcacctacggtgtgtaatttatttggtatttatttggatgtaagttatgttgtacttgagaaatttgtggaaacatgttcaaacgagaagcatgtg

SEQ ID NO: 98469 - DNA, 1647 bp, Zea Mays
atgggccccgccctgccctgccgctgcacctgtgccctgtgccgctgtgcgggcgtttatataccgcacgtcctgacggccatgccactcgatcgcgccgtcgtgatcgcgccccctcccgcactatttcattcgcggggaggtttggcaggagacgccgcgcggaaccggctggctctctcggcttggcaggctcgcgtgaaaggcgcagggagggagacacgtggtttctctcgtcttctgtcactgacgcttcccatgatcagaacccggggaatggcaggtccaggtccagcgcgcgccgcgcgaagcgttgttgctctcctctgtttcttggtttcctgcgctgcgctcgtggagagccgtggcggaggaggcagccggcacgacgtcgaccacggtagcggcgggaccgggagcaggggtaggggccgcggcattggtggaggtggtggcggcggtagcggcggcgatggaggcagcagccctgcgtcgcccccgccgccgtcttcgcagctgcggccgtgcgacttcgagaacgagcggctgtacagggcgtacctggtgatccagcagttcaggagcgcggtgtcgtgcgacccgatggacgtgacccggagctggagcggcacggacctgtgcggctacaagggcttctactgcgagcggccgcccaacgagacggaccgcaccatcgcgtccgtggacttcaacggctacatgctgcgcgccgactccctgcagggcttcgtcaacagcctgccggacctggcgctgttccacgccaactccaacgacttcggcggcgccgtgccggcgctcgccgccctgccgttcctgtacgagctggacctcagcaacaacaggctcgcgcccgccacgttcccgacggacgtgctggcgctcaccaacgccaccttcatcgacatccgcttcaacagcttctacggcgagctccccgccggcgtcttctgcaggttcccgcgggtgcaggccatcttcgtcaacaacaaccagttctccggcagcctcccggacaacatcggccagtcgcccgtgaactacctctccctcgccaacaacaggttcacgggggagatacccaagtccatcgcccgcaacgccggcacgctcctcgaggtgctcttcctcaacaacagcctcagcggctgcctcccctacgagctcggcctcctcgcgaaggccacggtcatcgacgccggcaccaaccgcctcacgggcaccatcccggcgtcgttcgcgtgcctgcggaaggtggagcagctcaacctggccgacaacctcctgtacggcgaggtgccagacgcgctctgtcggctcgcgttcagccacctcaagaacctcacgctctccgacaactacttcacgtcgctcgggtcctgctgctgggacctgatcaaggaggggaggctcaacgtcgaccgcaactgcatccagtgggcgcccaaccagcggtcgcacgaggagtgcgccaggttcctccgcaagcccaagacgtgccctgtcaacaactacgtgccgtgccgcagcaagtaccacagctccagcgagccggccgacgccgtcacagagttggacgcggcggcggaatacaagtacaagacctactcggcgctgcatccttga

SEQ ID NO: 98470 - DNA, 1459 bp, Zea Mays
tatcctcagaagaatcgcccacgcgagcttggaagcttagctcgcggtagcccggcccggtacgtgcttgcaagatgaagaggcagtggagccatccgtcggtcgtgctcccgctgctcgccgccgtcttcctgctcctcacgttccggtgctccctgcgccacgcgcagcagcaggcgtctagcctccgcgccgacgacgcgggaacaagcacaagctacgccgtcgacgccacgctcgcggagctcgcggccgtggacccggccgcgtcggcggtgctgcgggccgccgaggcgctgctggaggccaacctgacgagggctcccccggagcgccggaacgccgcggtgcgcggcctccgcgactggctcggcaagcagcggttcgagccgcaggtgatggccgagctcgtggacctcatcaagcgccccatggaccggtacgccgccggggcgaggggcggcgacggcgacggcgacgccccccggccgtacgcgtcgtgcgccgtggtcggcaacagcggcgtcctgctggcgcgggagcacggcgcgctcatcgacgcccacgacctggtgatccggctcaacaacgcgcccgcgggcgacggcaggtacgcgcggcacgtgggcaccaagaccggcctcgcgttcgtcaacagcaacgtgctgagccggtgcgcggcgcgcgcgacccccggctgccggcgctgccgcacctacggcgaccgcgtgcccatcctcacctacatgtgcagcgccgcgcacttcgtggagcacgcggtgtgcgccggcggcggcggcggccccgacgccgcggcgccggtcatcgtgacggacccgcgcctggacgcgctgtgcgcgcgcctcgtcaagtactactcgctgcgccggttcgtgcgcgacacgggccgccccgcggaggagtgggggacgcggcacgaggaggccatgttccactactcgtcggggatgcaggccgtggtggccgccgccggcgtgtgcgcccgggtgtccgtgttcggcttcggcaaggcccccggcgcgcggcaccattaccacacgctgcagcggggcgagctggacctgcacgactacgaggccgagtacgagttctaccgggacctccaggagcggccgggggcgataccgttcctgcgggactccggcttcaggctgccgccggtcgtcgtctaccgctgaccgtccattcagatcaaccggccgtgtcgatgccgacgtacatactccattgagttcttttttttttgacaatttttggtgctgaaatacaaaatcgtaaatttgcatgttcatgggctcgcggtctagatcgtcaagtcacgaactcttgcaatccggctcaggtcgttattactggagccggtcgtcaactgaatactatgacccatggttgacaagcaagcctccaaagcctggcaagtgccaccgtggcgtgttcc

SEQ ID NO: 98471 - DNA, 540 bp, Zea Mays
atgagttcatcttctggagagtttggtcgtcgtcgtcgggataatgttgaagtgctcttcctagaatcacaatttgtgggcagcggcaatccatcttctgttgcggataacaatgatcttgcttcggcatcatcagtcgttacggattctgcagcactcgttgagaaggctattgcaaagttgcctgctgatgttcgtgcgcatgcaactgattcaaagagaaaagcctatggaggattggcatatgaacaccaaagccttgcaaaaagaattataagcctatgttgctcagcatctggttgtgaaagaaactggagtgactttgcagcaatccatacaaaaaagagaaacagactggagcacaagagactaaataaattggcctatgtgctggttcctcctctcaaactcagacacaaacctatgttagaaccaaaaaacgacccagaaatgcagcagctacagctcaaggcatacgtgaataagatgacaattctcctgctgaagatgaacaagaacaagagacagcaagacaaatga

SEQ ID NO: 98472 - DNA, 1276 bp, Zea Mays
cccgcttattcgtgccgggccagttcgggcccgcatataaccgggccgtgtcgggctcggaccgggcccaaacaacgggtttcgtgccgggctcgcgggcctcgtgctttgaccgtcctcgtccccgcggtggcggcgctcctcgtcctcggggccgcgtccgcctcgccgccgcgcgccttcttcgtgttcggggactccctcgtggacaacggcaacaacaactacctcatgaccacggcgcgggccgacgcgccgccctacgggatcgacttccccacgcacctgcccacggggcggttctccaacgggctcaacatccccgacatcatcagcgagcacctcggctcccagcccgcgctgccgtacctcagccccgacctccgcggcgaccagctgctcgtcggcgccaacttcgcgtccgccggcgtcggcatcctcaacgacaccggcatacagttcgtgaacatcatcgggatcgggcagcagctgcacaacttccaggactaccagcagaggctggccgcgttcgtcggcgacgacgcggcgaggcaggtcgtgagcaatgcgctcgtcctcatcacgctcggcggcaacgacttcgtcaacaactactacctggtgcccttctccttccgctcccgccagttcgccatccaggactacgtcccgtacctcatctccgagtacaggaaaatcctcacgcggctgtacgagctcggggcccgtcgcgtggtggtgacgggcaccgggatgatcgggtgcgcgccggcggagctggccatgcacagcatcgacggcgagtgcgcgcgcgacctcacggaggcggccgacctcttcaacccgcagctggtgcagatgctctccgacctcaacgcggccatcggcggcgacgtcttcatcgccgccaacaccaaccgcctcagcttcgacttcatgttcaacccgcaggactacgggttcgtgacggccaaggtggcgtgctgcgggcagggcccgtacaacgggatcgggctgtgcacgccggcgtccaacgtgtgccccaaccgggacgtgtacgcgtactgggatgcgttccaccccacggagcgcgccaaccggatcatcgtcgcccagttcatgcacggctccaccgaccacatcagccccatgaacatcagcaccatcctcgccatggacaacaggggggactagtcccgccgcgtgctgcctccacccatctcgtcattggttggttcatgccaagaggttttgctgcattgcatgtgtcatggag

SEQ ID NO: 98473 - DNA, 783 bp, Zea Mays
tgcccacctggccgctccatctcgcgtccaacaatcaattcggcgtcgctctcgtctcatcagtcatcactccgcgactgcgagcgagcgagcgaggcccttccgcgccacgcgcaatggacgctgctctgctcgtgaccgtcctcgtccccgcggtggcggcgctcctcgtcctcggggccgcgtccgcctcgccgccgcgcgccttcttcgtgttcggggactccctcgtggacaacggcaacaacaactacctcatgaccacggcgcgggccgacgcgccgccctacgggatcgacttccccacgcacctgcccacggggcggttctccaacgggctcaacatccccgacatcatcagcgagcacctcggctcccagcccgcgctgccgtacctcagccccgacctccgcggcgaccagctgctcgtcggcgccaacttcgcgtccgccggcgtcggcatcctcaacgacaccggcatacagttcgtaagcaacaacagagacagataataggcagccgcgtcgttgcctgccgcgcgcgttctcgccaccggccggccggacccggacgacagggatacagcagtacgtcctgtagtgtagctgcatatacagcagaactaaccttcgttattacgtacgtacggcgtggccaggtgaacatcatcgggatcgggcagcagctgcacaacttccaggactaccagcagaggctggccgcgttcgtcggcgacgacgcggcgaggcaggtcgtgagcaatgcgctcgtcctcatcacgct

SEQ ID NO: 98474 - DNA, 1896 bp, Zea Mays
tgcccacctggccgctccatctcgcgtccaacaatcaattcggcgtcgctctcgtctcatcagtcatcactccgcgactgcgagcgagcgagcgaggcccttccgcgccacgcgcaatggacgctgctctgctcgtgaccgtcctcgtccccgcggtggcggcgctcctcgtcctcggggccgcgtccgcctcgccgccgcgcgccttcttcgtgttcggggactccctcgtggacaacggcaacaacaactacctcatgaccacggcgcgggccgacgcgccgccctacgggatcgacttccccacgcacctgcccacggggcggttctccaacgggctcaacatccccgacatcatcagcgagcacctcggctcccagcccgcgctgccgtacctcagccccgacctccgcggcgaccagctgctcgtcggcgccaacttcgcgtccgccggcgtcggcatcctcaacgacaccggcatacagttcgtgaacatcatcgggatcgggcagcagctgcacaacttccaggactaccagcagaggctggccgcgttcgtcggcgacgacgcggcgaggcaggtcgtgagcaatgcgctcgtcctcatcacgctcggcggcaacgacttcgtcaacaactactacctggtgcccttctccttccgctcccgccagttcgccatccaggactacgtcccgtacctcatctccgagtacaggaaaatcctcacgcggctgtacgagctcggggcccgtcgcgtggtggtgacgggcaccgggatgatcgggtgcgcgccggcggagctggccatgcacagcatcgacggcgagtgcgcgcgcgacctcacggaggcggccgacctcttcaacccgcagctggtgcagatgctctccgacctcaacgcggccatcggcggcgacgtcttcatcgccgccaacaccaaccgcctcagcttcgacttcatgttcaacccgcaggactacgggttcgtgacggccaaggtggcgtgctgcgggcagggcccgtacaacgggatcgggctgtgcacgccggcgtccaacgtgtgccccaaccgggacgtgtacgcgtactgggatgcgttccaccccacggagcgcgccaaccggatcatcgtcgcccagttcatgcacggctccaccgaccacatcagccccatgaacatcagcaccatcctcgccatggacaacaggggggactagtcccgccgcgtgctgcctccacccatctcgtcattggttggttcatgccaagaggttttgctgcattgcatgtgtcatggagctggtggatgacaagttttcgttgctcctttttgtggtttatcagatgacgtgaattagtggtgaattgagccgagtgggttaaatacaactgtcccaagtttcttcgctccagcagattgtttgagggcagggctagctaggaacttcagaaattgctaagcggtactacctagccagtccgtccgatcatttcaagaaaattctcttgcactttgtagtgtgatcctgaacttttggggtacaaggtaccgacaattcaatgccaatgtatattttggtggctggggcacagttatacatgtggaccatggctggcagcgaagtaggtaggaggctaggagctatgaagatgacgctggaaaatgctaccacacagaacggatctcacccgtcgcaatggggaccgagtaaacgggagaaccggagggtagaggagaggactgcacgcagttttactgagggggaaaaaggattcagttcagagcaaatgagcaacgcggtgaaaagctggatgtcagttctgggcaaaatgggcaacgcacagtgaaaagctgaaattcccacatgctctcagacattgcaacgcataatt

SEQ ID NO: 98475 - DNA, 1214 bp, Zea Mays
ccgggtgttacacgccgccgccgccgccgccgccgccgacggcgatagatttggggatggatttgggctcgtgctacctcggtgggaacgccgacgcggtggagttctgcccgcaccgcccgttccgccacgtgctggccgccgccacctacacgctgcaggagcaggagcgcgaccgggcgggcagcatatccctcttctcagttgacgttgcctcggaggacgcgtcccggaggctccagctgctgtatactgtggagaccgccggcatcttcgatatgaagtggagccccaagtcgccgctgctcgcgcaggccgacgcccacggccgcctcgcgctccggcgcttggagcaggaggacggctcggacacaggcattctcctcaccgatgtctctgctgaagatatttcttcttcaatgtgcttatatgtggactggaaccaaactgcggagtctctgtctgttggattatcagatggctcactgtctctggtttcagtgagagaggaccggctggagatatcagaacagtggactgcacatcagttcgaagtctggacatgctattttgatcgtacaaggccacacttgctgtacagtggatcagatgactgttgtttcagttgctgggacttgagagaaagcccatcaaacattgtttttcaaaacaaaaaatctcataagatgggtgtctgttgtattacacagaatccgttggaggggaacatgctacttactgggagttatgatgaatttctcagagtttgggacatgagatttatggcaaaacctgtcaatcaaaagttgataaatctaggaggtggtgtgtggaggatgaagtatcatcctagtattgcagatgttgtattggctgcgtgcatgcacaatgggtttgccattgtaaaagtaggttctggagatgctacggtaatggaaacatattgcaagcatgagtccttagcatacggtgcagattggcagaaaagtgaagaggtggagcaaaatggaaattcttcagttgttgctacttgttcgttttatgatcgcctcctccgcgtgtggcaaccagagaatctagctgagctttaaagacctaaagctttttttgaattgaattcaagcatgactaggccatgaatctatttcctgaatgaaccagtataatttcattcaggtagttctttgaacttatgcttacatattcagacttca

SEQ ID NO: 98476 - DNA, 164 bp, Zea Mays
gatccctgcatggagaacgagggatcgacaatgcccaattgagttggagagtggagctgccatcgcgactcaggtgctttcccgagtgcgatgctcggtctgaggcatgtgttcgtggtcagatggtcagaaatgagccatccctaccttatgcttacgggtta

SEQ ID NO: 98477 - DNA, 583 bp, Zea Mays
atataaagtcttacatctctcgtcttcccattgacccgccgcctctacgcctttcagtatccggaagaccggaagcttcttcctcctcgcctctgacatggccggcggcaacctattcggtcgagcgctgagctacgttgtcaacgagttcttcgtccagggcctcgccaacaaccgtgcagtccagaggtttgctgtgaagaccaacaagactcttgagagcctatcgtctaaagccaaggaaatgagggaggagttatcggaacaattcaaggatgctcgtggccagaaagatcacttcaagcagtgaagccgatccccaaagttgattcaacgacacgaatctagctatgagttttttctagttctcgtccgggtcctatttatgaatggcatttgaagggatttcttggtgtcgttcaatggacggatccgttgtataaagtttatctgcacttagattagtagatatattggtagacacatcactttctgctgcccctttttcataaatacatatatctcgatctctactgtattagcaaaactacctcagtttctaccgttttcgtgctctacacaa

SEQ ID NO: 98478 - DNA, 468 bp, Zea Mays
gcgggcttctctacggcggcactccaaagaaagccaaggtggtggtggaggatgaggaagaggcggggttggaggatgaggaagaggcgactgtgacactatccatggagaaagacgcgctggagtgcgacatctgctgcctacccttccagtccgaagttttcatgtgcaagaacgggcattctggatgtgcaaagtgctgcatccgcacggatggtaagtgctggacctgctccgagcgcattggcaacaatagctctctctccctctccctctcctctctagaaagtcgtttaaaattacatgcttcagtttgtagttagactactttatctcttccaataaaagtagttagactactttatctctaacacatggtgaaaccctatatccaaatgtggctaaaatagaggaaaaatgaacaaaatttggcaaaagaaacataagccaaactttcctagcaactaa
